United States Patent Application Publication US 2004/0265849 A1 - sequence listing, part 2

SEQ ID NO: 6752 - DNA, 68744 bp, Homo sapiens
  misc_feature (1)...(68744): n = A,T,C or G, or insertion/deletion polymorphism (see Tables 1-2)
aacagtattttgtgtaaaaactcttaagaaactaggaatagaagaaaattatctcaacataataaaagtaatgtatgaaaaactcagtgaacatcactcaatggtaaaacacaaagtttttcctctaagatcagcaacaaagcaaggatgctcactctcaccacttctgttcagtgtagtactagccagagcatttaggcaagaaaaaaaaataaaaggcatataaatataaaaggaagaagtaaaatgatctctgcagataacatgatcttatttatagaaaactctaatgatttcacaaaaaaacctgttagaataaaatttagtaaagttgcatgacacaaaatcaacataccataataaatttcgtttatatatgagcaacattgaaccatctgagaaagaaattaacaatctcatttacaatagcatcaaaaagaatactttgaaataaatttaaagaggtaaaaaacatataataaaaactacaaaatattgatgagagaaattaaagaagacacaaataaatgaaaaggcatcctacgttcacagattggaagagatcatgttgtttaaatgtccatactacccaaagcaatctatagattcaatgcaatccctaacaaaaattccaatcgcatttttttacaggaatagaaagaaaatcctaaaacttatggaaccatgagggaccctgaatagctgaaaacaatcttgagaagaaagaacaaagatggagacattaccgttcctgatttcaaaatatattacaaagctacagtaattaaaccagtatggtattagcataaagacagatatatagaccaatgaaacagaagagagagcctagaaataaaccaatgcatagatggtcaattgatcttcaacatagatactaagaatatgtaatagggaaaggataatctcttcaacaaatggtgcagggataactggacatccacagacaaaagaatgaaattggactcttataccataaacaaaaatcaattaaaaatggattaaagatgtaaatttaagacctaaaactgaaaacacctagaagaaaacatgggggaaagcttcataacattggtcttggcaagatttcttggatatgacaccaaaagcacaggcaacaaaagcaaaataggcatgttggactgcatcagtctgaaaagcttctgcacagcaaagaatacaatgcaatgaaaagacaacctatggaatgggagaaaatatttgtaaactaaaaaactgataaggggttaattttttgttgttgtttttgtttttgttttttcctttaacttttaagttccagggtacatgtgcaggatgtgcaggtttattgcataggtaaatgtgtgccatagtggtttgctgcacagatcaacccatcacctgggtattaagcccagcatccatttgctattcttcctgatgctctccctcctcacctgcttgacaggcttccagtgtgtggtgttccccacaatgtgtccatgtgttctcatcattcagctcccactcataagtgagaacatgtgacgtttggttttctgttcctgtgttagtttgctgaggataacagcttccagctccatccatgtccctgcaaaggacgtgaccttgttcctttttatgactgcgtagtattccatggtgtacatgtatcacattttcgttatccagtctatcactgatgggcattttggttgactccatgtctttgctattatgaatagtgctgcaatgaacatacgcttgcatgtatctttataatagaatgatttatattccttgggtatatactcagtaatgggattgctgggtcaaatggtatttctacctctatttagatctttgaggaattaccacactgccttccacaatggaggaactaatttataccccaccaacagtataaaagcatacctttttctctgcaacctcaccagcatctgttgtttctgggatttttaataattgccattctggctggcatgaggtggtatcttattgtgattttgcatttctctaatgatcagtgatgttgagctttttttcatgtttgttggccatgtgaatgtcttattttgagaagtgtctgttcctgtcctttgcccactttttatttttttatttttttgagacagtctctctctgttgctcaggctggagtgcaatggcggggtctcgatctcggctcactgcaacctccacctcccaggttcaagcgattcctctgcctcagcctcccgagtagctgggactacaggcacacaccaccacacccagctaatttttgtatttttagtagagatgggctttcaccacgttggccaggctggtctcaaactcctgacctcaagcaatccacccgcctcagcctcccaaagtgctgggattacaggtgtgagccactgagcctggcttgaccactttgtaatattttttttcttgtaaatttgttaaagttccttgcagactctggatattaaacctttgtccaatggatagattgcaaaaatgttctcccattctctaggttgtctgttgactctgatgatagtttattttgctgtgcagaaactctttagtttaattagatcctacttgtcaatttttgcttttgttgcagttgcttctggtgcttttgttgtgaaatctttgcctgtgcctatgtcctcaattttactgcctggattttcttccagggtttttatagttttgggttttacacttagtctttaatctatattgagttaatttttgtataaggattgaggaaggggaccagtttcaattttctgcatgtagctagccagttctcccagcaccatttattcccattgcttgtttctgtcaggtttgtcaaagatcagatggttgctggtgtacagtcctatttctgagttctctattctgttccattggtctatgtatctgtttttgtaccagtaccatgctatttggctactgtagccttgtagtatagtttaaagtcgggtagcgtgatgcctccagttttgttctcttttcttaggattgtcttggctatttgggttcttttttgattccatatgaatttttaaatagtttattctaattctgtgaagaatgccaatggcagtttaatgggaatagcattgaatctataaattactttgggcagtatggctattttcatgatattgattcttcctatccatgagcatggaatgtttttccattcgtttgtgtcctctctgatttccttaagcagtggtttgtagttctccttgaagaggtccttcacttatggggttaatatttagaaaatataagaaacccctacaactccagaacaacaataaaaaaacacaaataactagatttaaaaatagacaaaagacttgaataggcatttctcaaaagaagacgataaatggccaaacaggtgtacaaacatactcaacataactaatcattaggaaaatgcaagttaagactataattagatattgtatcatacctgttaggatggctattattttaaaagacggccggatgcggtggctcacgcctgtaatcccagcactttgggaggctgaggcggatcacgaggtcaggagatcgagaccatcctggctaacaaggtgaaaccctgtctctactaaaaatacaaaaaaattagccaggcatagtggcaggcgcctgtagtcctagctacccgggaggctgaggcaggagaatggtgggaacccgggaggcggagcttgcagtgagccaagattgtgccactgcactccaacctgggcaacacagcgagactgtgtctcaaaaaaaaaaaaaaaaaaaaaaaaaagctactcgggaggccgaggcaggagaatggcgttagcttgggaggtggagcttgcagtgagccgagattgcgccactgcactccatccagcctgggtgacagagtgagactccgtctcaaaaaaacaaaaacaaaaaacaaataaaaaaaagtgttggtgaggatgtagagatattggagtcctagtgcacagttsggggaatggaaagtggtgcaggcactatagaaaatgttatggagggccgggtgcggtggctcatgcctgtaatcccagcactttcggaggccgagacaggcggatctcgaggtcaggaaatcgagaccatcctggccaacatggtgaaaccccgtctctactaaaatacaaaaaattagccgggcatggtggtgcgtgcctgtagtcccagctacccgggaggctgaggcaggggaatcgcttcaacccgggagccaaaggttgcagtgagctgagatcgcgccagtgcactccagcctggagacagagcgagactccgtctcaaaaaaaaaaaaaaaaaaaaaaaaaaaaacagttacagagttttctcaaaatattaaaaattaaactaccatctgatctaggaaccccacttctgggtatttatccaaaataattaaaatcagcacctggaagagctatttgcattcccatattcactgcggcattattctcaatagccaagatttggaaacaacctgaatgtccacggatgattggataaagaaaatttggtatgtaaatacaagggaatattatccaacctttaaaaagaaggaaattctgccacatatgacaacatagataaacctggaggacactatcccaagtaaaataagtgagtcacagaacaacaaatactgcacgatcccacttctctgaggtatctaaaatagttaaactaatagaaagagagagaatagtggttgccaggagctaggggaggggaaatgaggagttgctactcaataggtataaagtttcagttatgcaagatgaagatgttctagagatctgctgtacaacattatgcctgtagttaataatactgtattgtacacttaaaaatttgttaagtgggtaaatctcctgttaaatgttcctgccacagttaaagaaaaagagagaaaaagagagagagagagacaacgataagctattgaaggacgctcagtggaaagtgtggtgatgtaggcagtttttatttttgcttaggattttgtttgcttgtttaccagtatggtaagcattctgtgagaccattcttgcctctcatgtggtccttcgtgtaaccagggctggatttgtgccagtgtgcagtggcattctgactaaatgttaacgtttgagaggcatgcacaaggcctacggctgacaatgtcttccttgttgttttgcaactcccgacatttatcaccactttgagttaaggtccatattcaagtcagattgtttccagataatcattgaggtactggcatgtaacacacattaaataatctcatctgctaacagagagtaagtgcatttttacatgttttagagattagaattggatccaaatgaggtgtaacgtaatggcaccatgagatctgtggtggggaagggtgatggggagaaaagcttcagcaaaaagaggactaaagtagaaatatcaaccgccagctttcatctgtgcctgggggcggtccttcctgtgctcgtggcacgtgtttatactatgattgacaacccttaaggagaaaggctaaggtcatgaaacaaagctctctttccttttcttttccctccccctacctttaccccattcctttctttttctgtaaaagctagctgtgatgtgtaaatgttgcacctgtcaccctgacctcattgtagagccatcttctgagtaactggcaactggcaactgatgctaagtgctatgaatgcagctggtgggaactgaacacaccagtgtaaaagatgaaactagaagtccttatctgtaaagtgagggtgtcaggctaagcgaccaataagctttgcttaagattttatatttgtgaagcatttatatgtaaatactttcactttttcctctgatctctaaggaagtggtgttaagtttgagtttgtcataatttcacagggtgactcttagttgaaatgtcactgacagcttgcggtttggactttttttttttttttttttttttaactccagtcagaaacaactagaagccattaaacaactacaggaagatgctgtcaaccaggaaggcatccttaggaagagsctccaaraaaccagccaacggctggaggatgtggaggagcaggtagggtggctcatggctacattagattcaggggacatctcctcagatgccctgcaaaccatgaaataaaaatggaggaggaacaacaacaacaaacaaaaaaaaaaagcaaagaggaactgcaagttcagtccctagcgactaacagtgagcagaggaagtaaagggggagttgtaagagaggcggtatcaacagcctgctgatgaaagaggcgactctgcagaaagaggcaacttgacatatcaggactttaaccgctgtagaaatagctcaggcataccaagcccatgcaaacacagaattgcagaagttcaggagaggcttatcacttccctgagaagaaaaacacattttcagttttgcctgcatcataagagtgagcactccattgctttctttcctggccacactgctacaatccagcactaactatccaygtccagggtaaggatcgagatcgagaagcccacactgccagtgaaaaagctacgtctttactgcataaattagaggaagyaatttcggaacaacggaaccttcaaactataaatactgaattatcgaacacttgccaggcacttcagcagaagacaaggaaactgaagagtgagtagcaaatattcatttatgacccagtttttgtccaccctcaggcggggcataggactacagacatttttctagattacagctaggatattattcctgagtttatgacaatgaaatggtttgagaaggcaatattgtggggctttcagagaggtttgctgagtggctaggtgcatgcatgggtttaaccattaacttccctttttgcctttttattataagctggttttgtctgtggctgtttttttcttttaaaattaattaaaacttctcaaaatttctaaaagtaaacaaggagaaaaatctagtatgcatggtatatttgaacttgcaagttgttrtatattatactctgattttattagctagtttttttcctctcatatggtagaaaaggccttgctcgtctattttctttggaaattttagggggttgggcaaaataattatgaattcagtgtatatcaaaatatcaaatgtgtgaaaattcttttaaagttttaatgcattctctacatacatctacatacatattttgcattttaaaaattggaatatttgtcatttttctgtattacccaaaagtatataaacagttaccagagatttatgtgagaagacagttgtcacattacagatgtcagattagctataaaattgtttcattctagaaacctaatatggtaaaaataaaccttacttatttagccatttatcagacaattgcttttgttcagccagtttcttgttctagcagtataaatattctttttatagaaagttacttggtttgagaaataaacattgtttatttgttaattgttatataattataaataattatatatttaatatataagcttaaggtaggctagagatgaaaaatttcagacttgtgtttgttttggatttattgtaccctttctactattatctgagaaagctatttaggagtttaagaaatagtctagttttaaaatagcaatggtttgccggacacagtggctcacccctgtaatcccagcattttgggaggccgaggtgggcagattgcttgagcccaggagtttgagaccagcctggacaacatggtgaaaccctgtctctacaaaaattacaaacaaataaataaataaaacattaaaatagcagtggttattcaacatattattgtcataatttttaaacctttattgaatttgccagttttcaatattctgattcactctgttaagctagtaaggcagtctttaaattacacagtctgtgtgttattttactactgctcagagggcattggagaaggttcccttgtgattagaactgttcatgttgagacatgaatcataaggcattccaaagttggtttaaggtgtgtctgctttagacactgtgcccaggactattcttttgctccagttttgccttttgattaaatcaatattatacctgagttttataaactactaagaatttgttccccttcctcactgtgattttcttgcagtattttcttagaagagtcaactttaataacttaccccaaagtgcacgttcttgatattatgaacttgctattgttgtcttcccagtttatcttcacggcccaatagattcaaatacacttaaaagcagaatatgaaagctgccctgggttgatacgtgtatttttttctgcctggataacgtagagtggacacttcctttctgtcttgagttatgcataacctgtccagatttatgaaatcccttacttgttrcttgtatcttttgctgcccaaaaaacccatacaaatcaggattttgcttatatgaccatgtacttacgatctttctaacaatgccctttaaattcaatctttgagagaagagggaaatttagatagcacgtattttcaaaatgttctatatagcagatgttccagatagactgcaaacaaatgtcaatgactgcagttatcacacaaacacgtccacgcacatcccgccatgaccactgccaccccatgctgtttgakttctgagtcagacatctgattctgagtcagaaaacaaaacatatttatatctatttagcttttctgaaactctctggctagtttaataaattcacaaagtatttcagacaattgttttctgatccatctaagttgcatcagcacattgtgtggggatgcagctggtttgtccaaatgttcagatcaatgtgcataatgttcacactacaactggaaatttatatgtgatgtttgatcagaaatcctgaactttatcttgaataaatgatattgttcaagttttcaattgccttcaggactgggctgatttatgaggcaattcatgtgcatgatattcttcaagaaatgtgccatgaaaactgttcaattgcttgaatggttacttatatattttatttcttctgcatctaaactttgtttatatccaagtatcttgttaatagacacatgactggattataattagtgtttgctttaaaaaggaaattttttttattatacttatgttctagggtacatgtgtacaacgtgcaggtttgttatatatgtatacatgtaccatgttggtgtgctgcacccattaactcgtcatttacattaggtatttctcctaatgctacacctctcctatccmcaccccatgacaggccccagtgtgtgatgttccccgtcctgtgtccaagtgttctcattgttcaattcccacctgtgagtgagaatatgcagagtttggttttctgtccttgcgatagtttgctcagaatgatggtttccagcttcatccatgtcgctacaaaggacatgaactcatctaaaaaggaaatttttaaaagcttataggatgtgtatataacatattagggtgaatcttatgtacagaaatcatggactaattgatacaatccaaaactatcacccccttactattcaccatctcttgttcccatctgacgtgaaatcttcatggagtcagtcttctcatagacaatgagagaattacctttaagaatcacaaatttttccttgaaaagagatcctgggaaactctgatatagcataatttcttatttgaacgtagtatctgyacatgaacttcctagtttagaggagactttcacctagatratatcactgcaaacactcttttagcttgctattcttagcatggagggcgggaggtatggcagaggtaaaacccttagggcttggagcatggattcaagatgaaagccgtgtcctaagcagtcagtaaacaggagggaaatgagccaaagaaggcgggtgaagggatccaggtgattgagatacttaaasatagaaggttttggggtgacggccaaggagaaaaccaaagccaaatacagcttgctcaacaactctgataggatagggacccaagttttcccaaatgaaaaatgcagatatggagaagtaatctgggaagtatagtataatgattaagaacatgggatttgaaattaacaaacctgtgttctcactcaaagtccacagaagagtggctgggtaaagttgagcaaatcacattgcctctctgagcttcagtatcctctttggttaaatgcagttgttgtgaattacataaataacataataaatgcaaaatagtagctaatgcttggccacagttgatatttgtgttctgctagaatacgtttctataacatgaatcatctcatttgtgatttgtaaatggggaaatgctgtggttatatagtatagaaattatgttgtttcattcacgattttcttggcacttggatctggattggtaggaatagaactctcaccttcctcaggaaaggaaaaagtccttagcttggctgctgaacagrcaacaggaaccctttcagctttattttgagaaaattaaaataagtgtctgcacctgggcctccctccccagagtcactctgggttctacagggctctggactttayagggctctaccccagccttgtagagccctggtctgtgtccaatcatactccctcctgtgttcaccttgttagcctcgctgcctctatctacatttgcctttcaccccaccaccactgttctagtgaaagcatcaccagcatttccactctcttgtttttgtgtatttctaatatcctgtgaggcatttaaagttgcatgtctgagtgatgcatgtgatcttcttagtactaataataagtgtgtttgttagtactctggttacagtgttgcacatacatacagataggtaggtaggtaggtagayaggtagacagattttttttttttttttttttttttttgaracaggatctcattctgtcacccaggctggactatggkggkgggatcatggctcactgtagcctcaacctcctgggctcaagtgatcctcctgcctcagcctcctgagtagctaggactataggcgagcaccactatgcctggctaatttttaaattttttgtaraggtaggatcttgcagtgttgcctaggctggtctcaaactcctgggctcaagcaatcctcctgcctcagcctcccaaagttttgrgattacaggcatgagccactctgcccagctgcatgtatttttttagtggtttcttcttaaccctatttctctcataatccctgcattattttgttcttatacttttaacttcttttttattaatgtatttaacatgtcataaaatgttcagatctcgagtatactattcaaccaggtagataaatacacatcaaaacacggaatttctatcaccccagaaacttcccttgtgcaacttcccagtcaatgccccgcctccacctctagcaccytaaggaacaaccactggtytgataggttagcttagcctgttytagaactcagttacacagtatgtacttttttgtgtgtttgtcttttttctgtcagcatgatgggattatgttgtgtttcttagtagtagttttttattattgagttgtatttccttgtatgaatattccaaaatttgattgtttttcctgctgttattggatatctgcagtatatgcagtttggggttacgacggacaaagctgctatgaacgtctgtgtacaagtctttgtgtgcacatatgtttttatttcacctagaataaatatctaggagtagaactgttaggacatagcatagctgtgactgtcactttttaagaaactgtcaaayggttttcggtagtttttatagcatttcacgctcccaccagcagtgtgggtggttttagtgttccacatcttcagtatttggtagtgttaatctttgtcattttagccactctactaaatgggtatttcattgtgattttaatatatatttttcagatgtaatgatgttgggacctttttcttgtgctgattggccattgtatatcttctttgtgaagtgtctaagtctttcacccattttaaaattaagttttctgtccttttattcttggatataagtcctttgacagatatgtgctatgaatagttgatcttagtctggggttctttaatgaaccctgatatttttaatatacaattttacagaacatgaggttttttccagtatagatagtattatacaagccccgtactctataaatgtcatccatcattgatagctaacatgataacggctctaataatgttataattttcattttcaacaggcaattaattgtggggcctttgcctgagacctcattgcttagtcatttagaaagttgctttatctcaactttcttcagaggcaatgtatccaagacacctggtcccatcctacatggcagatggcaacagcaggggatacagtagccattgttttacttccttctatatgaagcatatatttgttctagaggcattacaggtccaactccaaacatgtaaagcagaatgcaaaggtgaatgcaaattgtggtcataagccaacttgttttgccatgtggaaaatatggaaatagttgctatgcattgcacaaaacatctgttgaaataaggctttcaatttgaatgcttcaagatagactgtttctaaaacccaagattgcctggtgagcaagcagatgggcaatttaracaatcttatactagctcatcatcgcttctgaaacayggcttcattggcaattgtaagatagtattctgaatttgtattttggagatacacgaccttcaraaacacacgatggccacttcttattgctttggttgctattgtttagatgtagatcagaaggagcacagggccttccttcttaatacagttaagacagaattttttaaaaatttcatctttaccagggtcctaagtattaataagaaataaattttaaattacttttgtaggttagaaatacttatttttttttcccctgagacagagtcttgctctgtcacccagagctggagtgcaatggcttgatctcggctcactgcaacctccgcctccygggttcaagcaattctcctgcctcagcctcctgagtaggtgggactacaggtgtgtgctaccatgcctggctaatttttttgtatttttagtagagacaaggtttcaccatgttgttcaggctggtctcgaactcccgacctcaggtgacccayctgcctcggtctcccaaaatgctgggattacaggcatgagccaccgcacccagcctagaaatactcttttaaaaatatgcttttcttcctatgtgagggagatgtttgaaaaacaaacatctgttttgctcctagtgggcctagtaacactatgtcaagcttgattgagaagtaagttatttttaccaaaaaaaagtcctataaaataaaaaatttacataggtaattttctacataattgaagcttttagagcctttttcctgaaaaaaattaaaaattagattatgtacttcttttcattagcattatgctcatgactcagaatttctccaggctattaagatataaaactgttggtttataaaataagaagcaccagatttctatgtattttggatgccagagtatctgctgttaataattttcctggctgttagtgattttaaaaaaaagtggtagctattaatatgcttccatctagcagagctccttatatccttgtttaagttttgcttttaatcttctttgggctgagaaggcagtcaaactggtgaaaattatgtatatacccagagcccactgcttgagttgaagtgtgaggtttgccacgtgaataaagggcataaatatcagtatctattctagttgttcaaaagatttgggtttattttctggttttggctatgtttcagagagtaggatttgtcaaataaataatatgttattatgtacatcaaagagctagttaaatattaggtacttttcccccatttccattattccaggcataagacctttagagattttacttaagcagaaaaacaaatatttttagtttcacagaatgataccctgagttaagctctgttccatgagtctaatctcagctccatgatttaccagttaccttttcaatcgtctgcacatcagtgttctcatgatctgagatctacttgtaggattctgggatcctagggctgtaatttgagggctcaagcagaggcttattggagataggatttctttatcagtaggaggtcagactgaaygacctctaaaatgtattttctttttytttttttttttttttgagagggagtctcgccctggagtgcagtggcatgatcttggctcactgcaaccttcacctcccaggttcaagtgattctcctgcctcagcctcccaagtagctaggattacaggcatgcgccaccacacccagctaatttttgtattttttttttttagtagagatggggttttgtcctgttggccaggctagtcycaaagtactggcctaaaatgatccacccaccttggtctctcaaagagctgraattagaggtgtgagccactgcaccaggcctaagatgtattcttagcttaagattagacaattctgtgactcacttctagaagacaattcacatgtatctatcaaagtaaaatttaaatacccaagggagataatggcttatctgttctagcctggttttccatttttcccgagtcataagttgagagtgccattctcagaaatcattattttccctttccttttcttgaggccccaaatttaaagccattaaaagtttttgaagcaatgaaatgaattaaaggagacaaggttaaatatgctcatactgggcatagtggctcatgcctgtaatcccagcactgtgggaggccggggtgggtggatcacctgaactcaggagtttgagaccagtctagacaacatggtgaaacccatctctacaaaaaataccaaaactagctgagtgtgggtggcatgtgcctgtaattccagctacttgggaggttgaaacaggaggatggcttcagcccaggaggcagagtttgcagtgaggtgagatcatgccactgcactccaatctgggcaatagaaccaaatcctgtcttgaaataaattcattaattaattaaattaaaatggtcatattgagctggttataaattctctttgtagcaacaattgagtcacttcaaaaggagttcattgaaggggaacaccatggcttgctgtttcaggtaaaatatctctgatatgtgttcagttactgnggaggaagttgttcaattcatgtaargttttgaagctaatttataacagacaatgactttaatcattaaattaaataaccagtttagaagaaaatgttttggtggactttgttctcttctgcacttaaagtatttagcaaaataagaaaggagatcttacattagtgagtggctactgataatatcttctagagaggaagcatttcagaattttctttgccccaccactatatctattagcgaacagccagtttttcagtcttggggacctcctttctgatagtaagggcatatcattcaatttataatatgctgaaattttgagtattcttgaataggctttgatggttactgtctcttttttctttctcatatttgaattaaactttctatttctttctgtatgggtcatctcaagatatccctggtaaagtgtatttccttcccttgtgatacttggtgaatctcctttttgttcagaaatgaagaacataagggaacagcaaggcagcaaggttggcactggaggaagatgatggaggaggaaagaaagaagggtgatatttgcatgtatctgtttctagggcatcatgcagacacatctgttaaagcaggaaaaaaaaaaccatgtggaagattaagctaggcagagtgcctgaaaagccctctgcaataagttgagctggaaaaacctccatatctaaagatgctttaatcatctcaagaacaccaacaacattttctattataatataactatgatagatgtgaatctacctcttggattaaggcaataattttatagctatcaaattttcacagacaccattttcactactctgagttgcatctctaacaagcttctttagcctctgcctacagatttcagtgacaaagccattcagtttcttgttcccgatcttcagatttcattcctagatcaagtaatggggcaaatacaatgggaggtttaaaattacaaatgtgttcccttggagtagaatacaaaaagaacttgtcaatttcacccactttgggtagtgtcatatcttctattaagtctaatgtgtttgggatctttgactctttcatcattctgtctttgaatacactctaccattttctcttgacagagctttttagatgaggaatttcctcactatgattccctgtcctgcgcagatgcaattcaacaacctcttcaagaaaaattggtaattgcgagctttttgaaattatttaggtagtaattgtgaatcaacaactatcctgtaatagaaagctaaatccagtatgtatcagtagtcttagaactgcatatattgcttttatcaagagattatcaagtgaggcaacagatacgtgtttttgtaaatgtacacatacacacacacaaacctagttggtcctttgtcgcccaggctggagtgcagtggtgcaatctcagctcactgcaacctccgcctcctgggttcaagagattctcctgcctcagcctccggagtagctgggattacagtcatacaccaccacgcccggctaatttttgtatttttagtagagatggggtttccccatgttggccaggctggtgacctgaagtgatccacctaccttggcctcccaaagtgctgggattacaggcatgaaccaccgcacccggcctgttttactttttttaattgcagtatcacgaagaattatgtaactaagtttattcctcacctatacctctttcctcaaagcctttgtttacatcaaagtgtcaattatttggagttgatratgttagcattctcctagattactaaattgtgacttttaaataagaatcataagttactcatatgtataccttttgatcaaacacttgaaagcttttttacttgacagaatttattttcttcttgatctctctcacagggtcacttgagactagtgatattctttccacctttgaaatggaggtagtagattatgaaatatatgttacattcctttagatggctaatactacttggttttctgttcagaagcagtgttgccacaaactatatggtggtcaagaagcaagaatacatcagacacccctgaccttgaaacatacgtgctggtacacacctctgctgggtaagccccccttctatacctgctcagacacaagtaggggtagagttctatttgaaagggaaaataactagttattattacatttgtataggaagaattgttgaatacgtgtatatttacccctgaattcagtcaatcaatatatatttgagtacctgctctgtgcaaggcaacatattatgcatgataaagaataagtcctggccaggcacgggggctcatgcctataatcccagcaccttgggaggccacagcaggtgggttgcttgagcccaggaattcgagaccagcccgggcaacatctctaaaacaaacaaacaaaaaagaataagtcctaaagtagctcacagactagcaaggagacaagacctggactcagagaagtcaaagatgattccatggaagaggttagagttgaactggccttgaaagattagttggctttggaaaagcaaaaaacatcaaaaaagtattctaatgggtgagagtaacatgagcaaacaaaacaaaaaaaataagaagagaagtaagaatcaaaagccttaagtgtttgaaaaagagccaaaggtaggcaagtcattttgaaaatgaaaggttttgggttgagatacagtagaagagacatttggagaaggaaaattgggttgtgggtcaaatttatactcaatgccaagagaaagagctttattccaagaagtggtcaaagtagtgacacctctcaggataacatggatgcagttaaaagctaaaattaacgtctagttctgaaatgacaaaaagaaatgattatcaaagtaaattkaagaaggaataaagagaaaaagtagagtgatttgtggatcatttaaatttgagaaggaaaaactactaatactaatggagtgtctattttgtgtcaggcagtataaattagtgctttttagagattacttgcaataactcagtaacaataaccaccaccaacagtgggagtacttaaacagtgcttgctggccaggtgcagtggctcaagcctgtaattcctgcactttgggaggccgaggtgggcggattgcttgaggtcaggagttggagaccagcctggccaatatggtgaaacctcgtctctactaaaaatacaaaaattagctgggcatggtggtgcacacctgtagtcccagctactcaggaggctgaggcaggagagtcacttgaacccaggaattggaggttgcagtgagccgagattgtaccatcacattccagcctgggtgtcgcagtgagactcagtctcaaaaaaaaaaaagagagagagaaagaatgcttgctatgtgccagacacagttctatgctcttaacatatctattaactcatttaatcctcaacacatccctgtgaggtagatgttaatataattaccattcaaaagataaggaaacagaggaacattgagttaataatttgcccaaggtcatctgtcactttatacataagcaaactgaggctcagagtggcttagttatttattcaagatcacacaactggtatgtggcagagccaggatctgaaccaaaaatttctgattgaccctaaaccctatgttttttctrttaaactctgctgcttcctatactcagaaacacacataacaagatggttttccctaataaatgatttgtgatctcaacctatttcccctaccattctttgatgggttctaattaccatgtctaatgcttttctcttctggaggctgcaaaattgttctgtaaaagacccgatagtaaatattttagtttctgctgtaactactcaactttactgttgcatcacacaaacagccatggacaatgtgtgaacaaatgggtgcagccgtgttccagtaaaactttatttattttttgagacagggtctcactttgtcatttagtggcacgaacacggctcactgcagcctcaacctcttgggctcaaatgattctcctgccttagccccccaagtagctgggactacaggcacatgccatcacacccagttaatttttgtcatttttgtagagatgggggtttgccatgttgcccaggctggtctcaaactcctgagctcaagcaatcaacctgcctcggactcctaaagtgctgggattacaggcgtgagccaccacatctggctacagtgaaactttacaaaaacaggcagctggctggattttcayccgctggctgtagattgttaacctctctagttgcttagtgggcaggggttttctgacctctcccacacttaaaaaaacttttttgaaattattattttgtaaatattattattagaactaaaattattttatatatattaatattactatcattcccaaatgctttgttaaaattaagcatttgacgtttttaccctctgtgattaggcatcaagggagtttatgttaaaatgtgaatagaagcgggytaactttcactttttcagtctctcaagaaggaaagactttatgcttcaatatagtttgaaccagaaattggtctctatttttatttttttctgttctactgcagatgccttatctctggatagttttacagcagttccaaccctggaatcaacacctttctcaggtgtagccaaccaaatccacactctgtgtgaaaggcccacatatggagaagtaaaggatggtgctttggatgtaaaaagacaachcaagtaggttaagagcaaaatttacttactctactcctcatgggtggcccattcccattgcctaacattttaattggtcagattttcataacgtgagatcacatctttattgtcgaacttctctaacttcctgaaaatttacaatttctttctttctttttttttttttttgagatggaatctcgctctcttgcccacactggagtgcagtgatgtgatctcggctgcctcccgaggtcaagcaattctcatgcctcagccttccaagtagctgggactacagacgcatgccaccatgcccagctagtttttgtatttttagtagagatggggttttgccacgttggccaggctggtctcgaactcttggcctcaagtgatctgccctcctcggcctcccaaagtgctgggattacaggtgtgagccaccacgcccagccgaaaatttacaattttgagataaagttattgctgtagttttcttgragtgtagttttcttgcttttcttgaatttcataataccactctaaagcttaaaagacaaattagactacctaaaatgtttccactttttaggactataccgtagactgctaagttaacataggtagattttgatcataattctctttctttcacattcaaagttaacacatctttgggaacctgtccttgtccctgcaccctaccctcttcctctttaagtacacagactaatcttctaatctaaaggaaaaacacactcaccaatggagtgttttttcctactgtagtctcaataccacacttctgataccagatgtgtgggggtttttttccccacactccaagcaattttccacacaccaatcacttctccagccgacatgaaatgggcgtccagtaattcagttcaattccaacgttatctacctggaaatagcatccgattccacaggttaagggctcagttccacaaggctggtccctgcttgagatgccccttgcaggttccagactgtgacctgtgcttctgaccaactctctataaattgggggttgccaagatccccttcttgggttcaaataatttgctagagtagctcacagaactcggggaaacactttccttacatttatccacttactacaaagtttattttattcatttatttatttatttaaatttatttttttggaggcaggatctcactctgtcacccaggctagagtacaatagtaatttgggctcactgaaaccttgacttcctgggctcaggtgattgtctcacctcagccttctgagtagctgagaccacaggtgcctgccaccacaccccgctaatttttgtttttttgtttgttttttgagacagagtctcactctgttgcccaggctggagtgcagtggcatgatctcggctcactgcaacctctgcctcccgggttcaagcaatcctcctgcctcagtctcccaagtagctgggattacaggcccttgccaccatgcccagctgatttttgaatttttagtagagacaaggtttcgccatgtttgccaggctggtcttgaactcctgacctcaggtgatccacccacctcagcctcccaaagtgctgggattacaggtgtgagccacagcacttgaccttgtatttttcacagagacaaggtttctccatgttgcccaggctggtcttgaactcctggactcaagtgatcctcccatctcagccgcccaacatgctgggattacaggtgtgagccactgtgccaggtgacaaagtctattttaaaggatacaaatgaacagccagatgaagagatacatcggaaaggtttggaaatgtctcgagcacaggagggtctgtctttgtggagttggggtgtgccatcttcccagcacatggctatgttttagttcaccaaatcagaagctttccaagtgctgtcctttcaggtttttatggaggctttactaggcacgattgattaaatcattggccattggtgatcacctcagccccctcccctcccaggagcttggcagggtggagttgaaagttccaacgctcaaaccacagattggttcccctggcaaccagcccctcatcctgaggctatccagaagcccaccaagagataccgcgttagaacagaagatgctcgtaatactcaggaaatttcaagagattcaggagcttcgcgtcaaacactcctatcactcgggaaattacaaggtcttagacactccgtatcaggaaccaggatcagagaccaaatattagagtaaagattcccctagcacctctgtctacaaggattttaggaggtctgtctcaggaactgggggcattgatcacaatatcaacgacatcctcctaagttaacttagacaggttttgatcctatttctgtttctttcacactcaaggttaacaagcctttgggaacctatacctgtccctgccctcatcctccttcggtgctcatttgcacctgcctttttaagtatacagactcatcttccttaggaaacattaaaaaatgtcagkgcattttgtgagggcctaatctacctcaataaaatttcccttctrtattgagggtgaggaaggatggctttgaattgcaaatgcttcattttcatttttgactggattctctgttgtttgtaacctctctctgatggaggtgggaactctctttcattatgtgttacttaaaccatgaacttaattagaaatttgataaaattaggactgggcgtaggggartgagaaccatgttatagtttagtatctgctaagatttgcagttttttcacctgtagtaaataactctrcttcctactgccaggtgcccaggccccacaagtggccccagcccaggaacraatctctcaggctgcatcaggatgaatgatgacccaagtatggaagtgagtgttggactggattttggtttcattttcagtattaccatatcctgttcttcttctatgggtattctttttccctgtcttttttattttttaagtattatggatattcttgtagcaagtctgagtctgctattccaaaactcagatgcatgagaaatagcaacctttgaagtcaagaaattaaaattatttaatatgagggctttctaccctgtgtttagtatgcactgtgggttatagaaccaaaaagagatttcaatgaagtgagctaaactttttgtttgagaggcaggctggtttgggacttaaattcacgaatgactgtaagaagcctcagatcccattgattctccaagaattgaggtcgaggctggataatctttgaggggctggtaccctttgtcaaagaccacaaagcacggccatgcccatggagagtagtaaggtattaattggcaargttaggtgctaatgccacttttctacccaagaagagaataatgctaaatgacctgagaaggtcacttaggtcactgtctctatcattgagatgtggttggaatgccttccacagtctgcaccctgagcctcgtgatcttctcaatcaaacagagcaggcagttytgtttcaggatctggcagtccatcattcttctttcttttacattttaattgagatataattcacccaccagacaattcattaatttaaattattcacttaaatgactttcagtatattcacagagttgtacaaccatcaccacaatcggtcttagaatactttgatcaccccagaaataaactgcgtacccattggtagtctctccctatttcctcctgtccccaacccccagctggaggcaaccactaatctactttctgtcctatagatttgcctattctggacatctcatataaatggattcatacaatatatggccttctgtgcccagcttctttcagttaaggttctcaaggatctcagcataaggttctcaagattcatccatgtcatagcatgatatcagtacttcattcatttttatggctcaataatattccactgtatagatacacaccacattttgtttttccattcatcagctgatgggcatttgagttgtttttactttttggctattgcaagtgatgctattatgagcatcagtgtattggtttttgtgtaaacatgtttttaattcttttgggtgtattcctgtggcagagttactgcatcatatggtaactctatgtttaatgtttttgaggaactgcaaaacagacttcgagggtggctatatccttttacatttccaacagcaatgtatgaagattccggtttctctgtatcctcattaaatatttgcctattttttattaaagccatctttgtgggtgcaaagtgatacctcactgtatttttgatttgcatttctctcatgattaataatgaacatcttttcatgtgtttgttggccatttgtataacttctttggagacaagtctactcagatcctttgctcattttaaagatgggattatatttcttttcactattgaattgtacaagttgttgttattcttcctgttgagtgggtatatggcattgtttttgttcwtaaatacctgtctgagcagctaagaaaaaggaaatgaatctattttgctcttacctagaggccaaggtgggcggatcacttgaggtcaggagctsaagaacaacctggccaatatggtgaaaccccatctttactaaaaatacaaaaattaggtggcgggcacctatactcccagctacttggaaggctgaggcaggagaattgcttgagcccaggaggcagaggttgcagtgagccgagattgcgccactgcactccagcctgggtaacaggacaagactccatctcaaaaaataaaaataaaaataaattgaaaatttttaaaaatatatcttgctcttacctagcaattcttataaagttttagtaaaggaagttgaacttggaagcttacaggatgtttggttattagtaatttcccttttatctggcaccgagtttaccaagaagaaggaagaaacaaatatcagttgtgtgccaggaactttgtacaaaagcattcccacatgccatgtgattaatctgctccacacttctctgctttttacaaaggaggcaactgaagttgagggagttaaataacttgcccatgatcactcaattaataaataacaaacctgggattaaaattcagatttgtccagcttcaaaggatacaggcctttgtcatggctactcttagkacactgaatttagacattttaatcataattacttagcattaccttgaaagtatttttttttttttttggctaagaaatgtactgccttttatatctaaaaggacctccatattgactcttattaggatatgtgactgcgtggttttgtctgtgcttcacacccattaagaaataggagctgggctgggcgcagtggcacacgcctgtaatcccagcactttgggagaccgaggcaggtggatcacctgaggtcaggagtttgagaccagcctggccaatgtagtgaaacccaatttctactaaaaaatacaaaaattagccaggcatggtggcaggcgcctgtaaaaccagctccttgggaggctgaggcaggagaatcacttgaatccggaaggaggaggttgagtgagccgagatcgtgccattgttctccagcttgggcgacaagagcgaaactccwtctcaaaagaaaaaaaaagaaagaaaaagaaaaaaaagaartaggtgctaacagacatcacaatcgagcctccagtcacatgctcctgtaagttccctgaagattttcttgtgtcttctgtagtttgcaacagcccaggaattagtctgttggctgcaccttctgactgatcccaccarttctcaaccttcccattccagrtttctgctccactggagaatctcaacagcctggtaactgtactctctgcctctgacccttgtcccttgagcaactccccacctaccatcattttatactcacattatctcttaagaaaatagaaagctctccttagaaaacgcttttctaagcattgtcattggtaataattacagggaattagagtaaaatataagatataaattattttaaaaacataatatatgtttatcatcccagtggacmccccagacgatgggtgttttcttaactccttgtctctaaatgatggattctgtcaatctctacagccttataacaaacaacttgacctggtattggagtccctctctaaactggttgcagtctacctttttacctttatttccccattgttgtgtatggttgtgcctgtacgtcagccaaaccaggtagcctatattgtcagaatatatcacgcaaacgtgtttgtgctgttttctttgcccaraacaatgtatgcttttccatttatcaaaattctattagactgtcaagccccatttcaaaaaccaataaaaactttttttgtggtagcataaaatgttgacattcaagcatctccagtccttcttgaggtggaaatcataatggattaagagtggggagatgaggtttttctgtgggttggcctctgtgtgactctgggaaagtcgtgttttcaggcctgtttcctcatttctcaatgatccaactcagaaaaaaactaagctcacttccttctttaagacccttgtaattctctgtgccccacatttcttgtcatctgtatgctggtttgcattgtagttatttattttcttatatttatttgtgtattaggtgataaaattgctggacagtacctttatttggccattaaccaatgcgcatgtagcaccctgcataggattatatacagtagctgcccaataatatttgttgaatgcctatttatttaggttgtactcactacaacgtctgtttaaaacactgagagtgagcactcaattagcttactgctttctgactcayttcttgggctggtgctcctaagaacttgagatttactttctgttccttccccatattcacagaggaagctgtcttctaatatctttcccagaaggcacagtgcaatataaaagtgaacatcattattcataagcaggtctttgggagagcaaagaasgctaacaaggttaatgtctcaaaaagaacatctcaaagtaaaataatttggagccctgtttgggacattcttgaggaagaaagaacttctttattcacccaataaattagtttatttgggatattctggtgtagttaggaaagaaggaaacaaattatttccagtccttatcttttggagattcattctgaaatatttayggataaaaatgttatgatgtctgccatttgcttcaaaacaaggtttagagggtgagagtttgaaacaagattggccataggttggtaattgttgaatctgcatgacggatataccaggattcattagattctttgttttgtctacttttgtatttatctgaaatttttcctagtaatgctctagaatctttagccacatagcataggctgtagaatgaagcacatctagattgaagactggctttattacttattagctgtgtgaacttggacacatgacctaacctgtctgaatttgctgtgtcccctgtgaaatagacattgattttcatagttcttttgaggattcaaataaacacacacaaatactttacatatatacatatatttccacatatctgtatcactgagttctggcctaacctgtccatggaaacaaaccaactaggtcatatgtagaggcaagacactgcctctcaatgccttgtttccccacttgctgatgactaagaaggcctttcctttcatggagtcatttcccaacatttccagtgagytccagaggtgaataccaaatatatccccatgttcttcaggcctcacygactagtggcttccatgcagacttttaacctctcgagaaattgtggggccaagaagttggtttcasgactcatgtctctgcagttcttttggtttgttgtccacactgtcctatgacaacaaaattgattcttccttctatcttacttcagtctcaactctgaccccaccaagatactctgtaacatacgcaaaatacctgaatcatagtaaaacctcaaaaagaaaattagctggtcatatttcccagaatcagaattatcagcagcatgaaggccagagtatatcttgaaacaagccaatgatttggagatgaatttctctgtttttcttttggctgttaaaaaaattacatataccaaatattamgtgtcttgtctctctttgcgttatccttcatgttattacatgcttttgtctaagatgtactatcactgggaggcggtgatttattaaggccaagaacaggatcaatttaaaaatatctcagaagattttctggctattgtctgtcctgttcttccaagttgtatgtgggtgcagcattaataaccttggagaataaataacattgccagttgcaaaattggaacatgtagaagttgactgataactatattataaatgaacctgaaagtggtgggtgtaacctgtagatctgagggtgtggtatacctttagttagaaagagaaaaaataaatgcaaacctataagcaaatttagctttgtttaggttccagtagttctaatcttttaaaattcaacttagcattgttcctctttttggaacatttaaacagacactgagtcaagtcagaagtaagtctaatagactctttgttaagttatttttttgttctcagaaaatcacgtttatttaagtatcagttatctaaaatgggtcaaatagtaaacattacattggaaccataaatatttattagtagaaggtttctgatcacaaaatctgtagtttagtatttcatataaaagagcaaaaataaaataatcctgggatattaggccaattaatcttaaaagttattttttattgttcatgttgttcaatctaaatattgaaataatattgctgtgtgtgtgtatgcgtgtgtgtgtgtgtgtgtgtgtgtgtgtgtgtgtgtgtgtgtgtctcctgtgtttgctgacccagcccatgggagaatctgtttcattttttccatgagtacttttgctaccccaccctacattagactcttgctgtcaaaagcaaatgggctggaccatggatttttcatgtaaatgttatgcaggttaatatttgaatggcttggacagaaagagcattctccctgctctgtgctatcggcatgtgttagattcattgacttgagccaatcttctacatgtaagtgaatctctcatctgaactttctttttcttattctttattttccttgattttaaattatatctagtagattatctttctcatgatctgtccaggtgtcacagttggtgcgtgctggttatgttctgctgtgggcctggtttgctggtttaaatagaggyggctttagaagctagaagaaaagagcccaaatgtggaaagtttttgccccaaccccttgagggtttcatctccagctttcatgaactgttgtcctaaatttgaaaccagatcaaaaaaaaaatcttctttactctagttagtctcacaagaagaaaaaaaaattgtcattagaccaaacttgtgaaaacttaggattgggatatgttgtatattgggttgttttctgattactgacttttacaaagatgagtgctttgagaataacatccagttgcttaccttgctactgttccacaacaaggtagtattaaatggctactaaacataggcaatttctccaaaatcacataattatttgtttaatcaataaatattttgtatttattgaaagacttctaactacratgtttcatatctaacgtatagggcaaaagaaggccttacacagagcattagggcaaatgagactgatatgtaacataatggaggcaaactgtatttttactgtatttattactttggctttaaatactaattagacctttttttgaaaaggtttgcagaaatgatgtactctcttttccccaaactggaaactggcataatggaatagaaaataagaactgcattctctttcatatttcttaaatatgaatacccatgatcttgacaggtacaaaatgaaggcttttctgacaagtgtatagtgttttttagttatagtgcaataataaatgttatttcatgctacagatagtaacaatgtgtttatatgtgttaggatattatactttattattattaagaaatcaattcttattgatttttatgaagggttacactcaataaaactgaaggatatttaattttctcctttttttatagcttcctttcttttgttttctttctttcttttcattttttttaaagcagggtcttgccctgtcacccaggctggggtgcagtggtatgatcacagctcactgcaaccttaaccacctgggctcaagcaatcctcccatctcaccctcccaagtagctgcaatcgcaggtgtacaccactgtgccctgctcattttttagtagagatggggtattgtcatgttgctcatgttggtctcaaactcctggccacaaacagtccttccactgcagccttccaaagtgttgagattgcaggcgtgtgccaccgtgccttgttcatttcatatatatatgatatatatatgaaatatatatatgatatatatgaaatatatatatgatatatatgaaatatatatatgatatatatatgaaatatatatatgatatatatatgaaatatatatatcatatatatatgaaatatatatatgatatatatatgaaatatatatatcatatatatatgatatatatatatatatatatgaaatatatatatgatatatatatgaaatatatatatgatatatatgatatatatgaaatatatatatgatatatatatgaaatatatatgatatatatatgaaatatatatacacataatagtatagttaaataaacataaaaattactaatataatttatttaaatattttaaaatagggccattatcacgtaactacaatttaaggtacagtttctctttaaaattgaattcagatatccccacgctgttaattctgccctgtgcatattactttcctctgtggcatgctgcttataaattgtagagtaggatttgtattatatatttctctccatgcttggcctacgggcttcttcaggataagaactgtgtgtttatatataatctttagcccttgtccctgttcctagcacaaagtgggctttggatgaaagtttgttgaattaaattaaactggtgtcatgaggggtttcagtcatgtatgaactgacccaaagtcacttaaggcagaaacaaaatgaagtaaaaaagagaaaaagttgaccaacatcattgatgcagaagtaggtataaatcctcgctttgcaagttcgattgtagatttttctaaacatttgaggtgaacatcttacaagtctacattaaaaatcatcaaccagtctaagacaataattgggaagtcttttcctctccaatagcctaggttagggtatgcccaagttggttttgtttacagtggagaagacactgtatttagttcgatatgtgtttgaaagctgactccaccattctgactggtcttgggaaattaccttattaactggccttcatttcattacctgtaataagtaaatcttttcttgctaaaatctgctaaggttgttgggagaattaaatgagatgatatattaaagggctcttgtaaattttaatgtactaaacatatataagctactatcattgtactggataaatacaaattcagcaaacccttagtaaacctgyactttacttgtctgtgactatgggagatactttctgggactgattctaaatactgtgtttgatatacaatattcccccatgggaacctattgttggttgtgacagttagtaagttctgattatggaataactaaatgccttctttttactttgtgtaggttttccatatgtctgaatgatttcagttttattgaattttaatttatttttctaaactaaatcaaataattaaaataatatactagaaaagcttgttattagaaatgaaactatgttctcactgtattttttgaaaaagaaagttgtacaactttaatgccctaaagttacccccaaaataggaattccttgtagaaattaagaggttcatagaaactttcaaacacttgccctggcaggctgggactataattttgttaagctctttttgagaatcaagtaataggtgctaacttagatgtaatccttcagatctctcagatatggattaagtttgaaatgcatgatttttctagctagaaaactaagagcaattttaaaattaccaggtcagaaattttaggttgagtgctattcccacacatagaaatgttgtttcatgcccttgtagaattttctgtttaaagaaaacttgacttaagcgtatgaaataaaccctatctgccatttgagtttagaatttgttttgcccaaaatttttatcagatttttttaaatatcagacttgtaaatatacttaatattggatttttgggtaagtgcagctttgaggaagtgtgtatatccatctgccctataccatcccattcccatatcctttccaaaagagctgagtaaatatgggttcatttagaattgtatgaaaatgtttgcttaaaacaaccwctttggaatggaaaatgtcaaattgttgaacttatgtctcctttctttttccttaaggagaatggtgttgaacgcgtgtgtcctgagagcctgctgcagtccaggtttgcttgtttgtgttgtgtgtgtgaatttgtatgcatatttagttggttttaagagaattatttggacctgacattccaaaacatgtttgctatctttttggcagggaatattcctcactaccattacccagacacacttcatcgrcagacggtactataacttcaagtggtaagtggatttggaaataatattaaaatagactgttagtattacagctttcagcctgatgttctgtgacctgctggggtgtgagcaaatgagaagaacataggcaaatactccttttgcatagtatagttaaatacactatayataatattatgtgcatagtattcgcaccatttgtttctcctgttgacagatcctggattagaaattctgaatatggcttcttgtgaccttgacagaaactcgctctgtaagaaagaggaggatacaagatcagcttctcccacgayagaggcccaaggtaaaatgttgacaggtgtaagcatgattttaattctaaaacacgaagcaagtctataagctagtgaagtaactatccacactagctcaataatgttatttaattttttttrtaaaataattcttataaaacaattttgaagatatagtctgcagaaaagaaatccaagtggtaactaaccatggcctttcacacataaggatggtatcaatttttttcgattttgtagccagaacaaaaattatgatatattgtaatgggacaaatatttcctatggcaaagattgactggaatttactgggtttcaactgtagcacagaagtgacatcatctgcttaggaaattcttggaatcctagttcgaatttatcaggttagaacgatggagcaattagcaatggtccacccagaggcaacagaactaaccagttggtttgttaggtccttttctgctacttgactctgaaaacaatgtagttattctcgaccattcccagtgagacaccactttagttgacattcatgggaggaataggctctaattcccatwaaaaaaaatcaatcaaggaaaattcattctttttcttttatcttttttttttttttgagacggagtctcgttgtgtcgcccaggctgcagtgcagtggcatgatctcagctcactacaagctccgcctcccgggttcacaccattctcctgcctcagcctcccgagtagctgggactacaggtgcccgccaccacgcccatctaatttttttgtatttttagtagagacggagtttcaccgtgttagccaggatggtctcgatctcctgacctcgtgatccaccckccttggcctcccaaaatgttgggattacaggtgtgagccaccgcgcctggccaaggaaaatacattctatcgttttaactcgacrtttaagtttgagatagaggtgctaaaatagaatagccacaaaattgcagaaatggaatccatttcatgggttaattacagaatgtctttatactccaccttatgtctaataagtaaatcttttaattaaaaatacaccaaggttccatttgttacctatcatrtagacaaagaggcacaaatttgattacactctgttggtaaagttgtaagaacaaaagaaaagtgctgtagggaatgtaactttttgtaaatatagtagtccccttttattcactggggctacattccaagaccgccagtggattcccaaaactgatagtgccaaatcctatacacactatgtttttggctatatagacatacctacgataagtttaatttattaattagatatttacagcaataactagtaataaaatagaacaattttgacaacatattgtaataaaacttatgtgaatgtggtctctctctctctcaaaatatattattgtggctgggcgtggtggctcacgcctgtaatcccagcactttgggaggctgaggcaggcagatcacgaggtcagaagatcgagggaccatcctgactaacacggtggaaccccgtctctactaaaaatacaaaaaattagccaggcgtggtggcgggcacctgtagtcccagctactcgggaggctgaggcaggagaatggcgtgaacccgggaggcggagcttgcagtgagctgagattgcaccactgcactccagcctgggcaacagagcaagactccgtctcaaatatatacaattgtatgtaatattttcagaccatggttgacagcaggtaactgaaaccatggaaagtgaaaccttggataagggagggctactataatgtggagagaaatgttctaatatctatcaaaatgttgaatgtatatatcctctgatacaactattcattttctaggaatttatcctatagataatatgcacacacatcccaaataacatatgcaaatgcttatatattgcagcattgtctgtaataacaaaatattagattttggcatatccatgtaatagaatactaatatgcaggcataaaacataaataaggagacttttttcttacaataacataaaaggactactgtttcttggggaaaaaaagtacagaatgttaagtatagtgtacacaattttgtgaaaaaaaggacagaaaaagttggtttttggtgcacatggggacggtcttactctgttgcccaggctggagtgcagtgttacaatcatagctcactgcagcctcaaactcctgggctcacatgatcctcctgtcccaggttcctcagtagttgggactacgggtgcaagccaccacatttgactaattaaaaaaaaattgtgaagatggggtctcactatgtttcctaggctggtctcaaagaaaaagtttttatgtatgcatgaaatatccctggaaagctagacaaaatttaataacattgtgtctagggagataaactggatttctggaagtcatggatgggaggaaaaattttcactgtaaaacatttttacgctttttgatttatgaaccatatgaatctactacttgtcctaaaattttttaaaaactaaagtaagggctaggcacggtgcacatgcctataattccagcactttgggaggctgaggcagcaggattgcttgaactcaagagttcaagaccagcctgggcaacatagtgaaaccccrtctctgcaaaaaaatacaaaaattagctgggcatggtggtgcatgcctgcagtcccagacacytgggaggctgagggggtaggatcacttgagcctgggaggcggaggttgcagtgagctgagactgcgccactgccctccagcctgggtggcagagtgagaccctgtctcaaaaaaaaaaccaaaaaacaaaaacaaacaaaacaaaacaaaacaaaaaacctaaaataaaattttcataaggaaaaaattgtatagctgtgaagaaattgcttaccattttgttcttatttccatataaattttacaaatataatacacgctttaaatatttttctcttaaaaaggaagaaacaaaacctgcctgtatctgctgacctttgtgcctgcactgaactaaatgtaggacaatggactgagtaaacaggagaataattatccggtacatttcagtacaaataaagtacataaaaataaacagaaattaccaaaaggaatggcacaagttaaaaatgcatcttttcctcttggtttcatgacatttaatttagaaagctaccatgttttagaaggatatcatattttttgttatcagccttgcaaatacaatattgaaagaaaatttgttaagctattaaaaaagctactaagttaccaattgttcatccttccgccctccactttctattattgtaccagtcatgtgttccattaaaaaaagcagcagcagcctaaaaaatgatttttaaaaaatcctattagaaggccatttgtacagatgttcacttcttttaagaaatcttttacggccttagctgctccatcctaattctgagtcaatgggcacgtatacattttttgtagttcataatttgtctcatatgttaagacctttgtcagttactggtcagcccatattgccactctcactgtttcctcctcttttacttgctcctgcccccctaactgctttgtgtgtttcctgtttctcacaggcayaagtccagctcatgataatattgcattccaagactctacgagtaaggataaaaccatattaaatctggtaaggaaatacgtatgttcacaacaaaggtggtggtatcttacaatggtagaactatccctctaaaaagtagtcttaaaagtattatctcatttatcctttcaaaatattatgaagttcatataatttaattaatattttataggcaaagtagttgaggccaaagtgtttttgtgacttgtctaaagtcacacaacaggatcagaactaggatctcctagctccaccttaatttattgttcattcattcatttgctcactcatttattcatcaaaagtcaattggaaacaagctaaatatttctcagtagaggactgcttaaataaatgaatgcattaataaatgaagttgaataaaacggtggtatctatcctaacgatatgttctaatcaggtgaagaaacagataatyactgaataattagagtgtgcttagtgctttgaaagaaaaaatgcttgagatggcaggccagaaaacatgtcacggaggaagtaccatgttaatggcattgaaagttttacagttgcatggtaaagctctataaacataaggagagctggaaatgattagagaaaagagttaaattccttccttaaagagaaaattcattaggcccagagtggtggctcatgcctgtaatcccagcactttgagagatcgaggtggaaggattgcttgagcctaagagtttaaggccagcctggataacatagggagaccctgtttctacaaaatataaaaacaaatctgccgggtatggtggtgcttgactgttgtctcagttatataggagggcaaggcagacagatcacttgagcccaggagtttgaggctgcagtgagcaatgagcatgccactgcactccaacctgagcaacagagcaagaccctgtctcaaaaagaaaaaaaagagagagagagagaagactcatttccacttctatgaattaataatcattaaagagtaactacaggtctaatttcatgattcttcaagggtcttgcttatgtcttgcttatgtcttgctatgttgtatgcatggaggggtgtgtgtgtgtgtgtgtgtgtgtgtgtgtattattgtttttttcttctcaatatacaagcattgttctagttaagcatttggttgcaagaaacagagacccaygcaagctaactcaagttaagaggaggccatggcacagacttggggcaaaaaagtagatgaaaatttttcagcatttcattctaaagatagtgaaatgattggatttgtgatttggaacaatgacatgatgtcattcgtttcctttgttatccagaggcgattgattccaagaaccccacagataccaaaatcagagaatgctcaagtctcttatataaaaattgcatagtatttgcatataacctaatgaaacgggagagttccctgattccccttgcaggacatgcagcagtggtgtgtctcacctgcttagtcaccccatagttcaagcccctagggggaacatgcagaccagcagctgcagaggccagggcaagcgcttttgggctctgccccctggcagcatctaggggtcagtgtctgtgattcccaaagtccaagtgagtgtgtgttacaaagctctttcagatttgccatctgcagacagcttgtgtgttaattagctcaatggaccctcagccttatcacaagggcagagggccagtgtgacagctttctgtatcctgagctgtcgctcagtgtcccaaaagaatcagatcacacgtgagctggaaggatgagtgcaaggttttactgagtggtggaggtggctctcagtaagatggatgcggagccagaaggggggatggagtgggaaggtggtatggaatgggaagggggtattcccctggagtcaggctgcccagaggccatactcttctccaactgccccaggctaaactccccttggcatccagacatcccccctcttctctctttctctgccatgtcattccactattgtcagtctgccagtctgctggtctgccagtgttgtgtgctcacttcagctgcttgtgttgtgtgcccactaaggtctcgggtttatgttggcacaggatgaggggcatggtaggccagagtggtcttggaaaatacaacattcagacacaaaaacaggagtgcctgttctcacttaggtctgcaggcacaggcctgagggtggagccctcactggggaccccgcctttctctatccagcacttccctgcccacctcccatatcactaacacatcctcttatatactttaaatcatctctagactgcttatgatacctaatacagtataaatgctatgtaaatagttataatgacaagaaaggaaatctgcgtgtgttcagtacagatacaaccattgtaggcctaactacattttttttagttaaatccatagatgcaaacccmcaaatacagagggccagctgtataggtaggatatagtgttggctagcacatatgctgaaaatggttgctcctagtaaaaaatgaacagaagaaaactcaagtcctttactctttcatagtagaatcttctgagagaataaaattccttctcatctcaaaaaaaatatagacataaagacactttttaaaataatggatcaatttgccattggaagttgtgggactggttaggatactatggcaataattcagatgagatgaaggtagtatgaatttagtgaaggtggagaaaaggagataaatttgagaaatatttaggggtagaattcacagaggatgatgacatgtcacgggtatgggaaacggtagatacccaggcttatggcttaacctaccgaatgaatagaataacatgacagtagggaaggaggaaggagagtagaatttgtggggtaaaataagatcagtttgagacaagtcaaatttcaggctgatctgagacattgatagtcggtaaggagattttatatacggctgcatacccatattcataaactcayctgtgcggtttttgaaagctgacatatatttgtgaattatcagcaaaaatccaagtgtgtggatgagatttcccaaggactgtggcaggaaggaagggagcattgaggataatggaatcctggctaacaatatctactagagaaggcagaggagactgagaacgggctgtgacgcggggctggggcatcagaacagggaaatcaaggggaaaaaatcttcaagaggaaaggatgtatagataattttagatgctatagtaaggtcaagtaagataaagactgaaaattatccactggatttggcaatagggagttgatagctggtgagaacacttttcttggagtgctgtgtaaaggggtagagtagttaattgatcacgaatgggagaggaagagctagaaacagcagccacacacaactccttatgtgaccttaaaacayatctatatgcggtaaaagcctaacataacactgtcttagcagccatytttgtcacaatttytccaaaaacctatctagaaaactccatgtgatagccctatatcacccacaccttaccttttcatctatccagtcctacctcttcatcaaacttcagcatgtttcttgtctgcagaaattccatgctactcaagtcatggtgtcatggtgccactctccttcctttttttttttttttttttttttttttttgttgagacagagccttgcactgctgcctagcttggagtgcagkggcatgatctcggttcactgcaacctctgcctscccagttcaagtgattctcctgcctcagccttcagagtagcttggattataggcctgcaccaccacccctggctaatttttgtatttttagtagagacggggttttgccatgttggccaggctggtcttgaactcctgacctcaggtgatccacccacctcagcctcccaaagtgttgagattacaggcgtgagccacagcgcccwgccatttccttcctattaagagcacttgtttatctatctcatttatttggcaattaatcctagtttgcattgttgtaattcrcatcatgtttgcatcttttcatgtatttacgccctttttgcttcaactagwttggaagcrcccttgcagccaattttatttccttcttaacagcattaaaaactgtagagcaggggtccccagtcgctgctgagccagggatcagaacccattcgaggctgttaggaattgcgccgcacagcaggaggtgagcggcaggccagggaacatgaccacctgacctctgcctcctgtcaaatcagtggtggcattagattcccacgaaccctattgtgaactgtgcaagcgagccatctagattgcatgttccttaggagaataacgcctgatgatctgaggtggaacaggttccttcagaaactgtttccccctcacctcacccccgtggaaaaactgtcttccaggaaactggtccctggtaccaaaaaggttggggactgctgttatagagtgtttttgtcagagtaggcttaggagaggacasgaagtaggaaaatgactggttatkaagtatttccactctatgtacagtggtaaaatcttatgattttaggaagccaaagaggaaccagaaacaatagaagaacataaaaaagaacatgcttcaggaggtaaggaatgtttctttcaatccccatgtgaacttttgttctctgctgatatttttgtgggtgaaatctgtctgaataaagctatgtcacttacaaattctgcatctctggataaggtcagtcaataggaccrattattgattccatttgtgtcattttcaaaaagccacatttgcattgtgttgactgtgcgatcccagaaaacytgtaataactggtgctctattgtgaactaagaaccaagcgaatgttggtagcaaatgctatgytctactgttagttcttttttagtatcccatctaaaagtaaagcccctatttacagaataagtgctaatatgcttttccccttagcctacctccattgggatggaatagtggatagagttcaggctttggagtcatagagactctacatgggatcaatctctgactagctattgatcttggaaagttacttaaccttaagtctcaattttctcatttgcaagaggaaaatgaaaagaagaaaagtacacttaattgagaatatattctatgctgagaactaggytaatttcatgtgcatagttttatttagtcctccaaatactatgtgaggtggtaaattgtgattcagttgcctagcctataaaatgtggacaataaaagtatctacaacagaaggtttgctgtgaggattgaataaattaatatgtatgaagcacttagaaaagtggcaccaaagttctcataaaagttagttactattataaaaaaatcaatcttatcttagatgataagatatctttatcttatcaatcttatcttagatggcttaatgactttgtgacttgttcaagctcacataactgtaagattcaaacaaagctcagacttaaaccaagtttgtttgactttaaatccaatgctcttaataactaatacatagtccttggtaaagttgtcataaaatcatatgtgtaaaatgctttgctctgtgattggcaatataataaagccatggttgatgccatgtttattgtcactgttattgttaccagtattattattactactattattattactactactgttcctgctactgctaataaagccttgatccaaagaagaaccaggataccagtaggaggtttaggcttttagccatgggatcragtatagcaaacatgcaaatgcaaagagaacaaattgggctgttgcttgattctgagacatctttaagtatgaaagactattcacatgctgaggtataaacaaatgattgtaatggcattgtgatcccaatagcttagcataacattataatttaagtgcatacattattagctggcgatcatctcagacatatttaaatgaaatacttttgtttagtggagatataacattagatcaaatgtgcttttacaggtcaagcctttttaaccaaataatattttattatattttaatagactctgtggtttcccctcttcctgtaaccactgtgaaatcggttaacsttagacaaagtgagaagtaagtgcttcttcatgtagcatgttaacatgttttatttttctgttggattatgtttaaatatgttttttgtcttatcctacagcacttctgctaatgagaaggaggtggaggtgagtttaaagcaaattttttttccttttaaaraagtgttccagactcacytgctacagtcacttcatgttttggcacaagctctcatatgctcggtgtctgtttggcttggctgtgactcagtgcaggtgaaccctgtgcatgtcagcattatgttrctggggggagaaagaaatgcctcagtataaaacagtattaaactgaaacatctgaccacatccggttttctctcctcttcctcaccctcacattattttgacaacaggcagaatttctcagattatctttgggatttaagtgtgactggtttaccttggagaagagartgaagcttgaagagaggtcccgtgactkggcagaagaaaatttgaagaaagaaatcactaactstttaaaactattagaggtgagaatcagaacatttgggatataaacatttggtctagccaggcacagtggctcacacctataatccctgcactttgggaggccaaggcaggaggatcatgggagaccaaggcaggaggatcacttgaggcccggatttcaagatcatcctgggcaacatagtgggaccccatctctaccaaaaaaaaaaaaaatcagccaggtgtgatgatgtgtgcctgtagtcccagctacttgggaggctgaggcaggaggatcatttgagcccaggagttggagattgcagggagctataatcacaccattgcataccagcttgggtgacagagtgagaccctgtctcaaaaacaaaacaaaaaacacccacagaaaacatttggtcatattttcaataacactttcataattacatatgaaattacttgtatgacccaaaccagtaccaggtgccaagctctgcctgacccaaatgtgaatcatagaaagtaagaatgcaggatcaggctgaaataaaagtttcactaataggagagtatcagctataaaatgaaaaatgtctttttaaagtaggttgcatgagtcatctgccttttctctggattttcaaatttcaggcagaaaaggaatcatacagaaaactgagcaataggaaatatcaattttaagcttcaaagaagagaatcgagtctatttccatttatgattaactgaggaaagagaatggtaactgattcagtcttgcagatgatgggcaagcytgctgtagggtactgagagaagaatgggggtgcagaggagtgtaacaactactattatccttccatatggtgaagttaccatacatttagagatgagctggaaaattagtaggcttagttttggatgaaggacattaaaattgagaaaccatggaaaagaatcacgttattttttaccgtgataaaatatgtaacataaaatktatcatcttgaacatcttcaagtgcacagttcaatgtaagtttatttacattgttgcaaaacagatcttgaaactctgtacctgttaatttcccttttcctccttaccccatcccctggtaaccattatcctactgactctatgaatttgacaactttagggactttgcataagtggattcatacagtacttgtcttttgtaactggcttatttcacttagcataatgtcttcaaggcttatccatattatagcatgtgagcggattgccttctttttaaggctcaataaaattctcttgtagctatcaatttttgcttatctattcattcatcgatgggcatttgggttgcatccacttcttggctattgtgaatagtgctgttagaaacgtaggtgtataaatatctcttggagacccttggagaccttgcttacagttcttttgattatatctagactcaggagtgggcttgctaggtcatatagtaattatatttttaattttttagaaaccactgtactgtttttcatagcagctatatcattttagattgttaccaacggtgcacaaaggttccaatttctccaaatcttcaccaacacttgttattttctgtttgattttatgatagccaccctaatggatgtgaggtggtatcttattgtggtttggtttgtatttctctaatggataatgatattgtgcatcttttcatgtgcttgctggccatttgtacatcatctttggaaaaatgtctattaaagtccctttctattttctttgcagaaaaaaattttatttataaaagtacagtttcagggctgggcacagtggctcactcctgtaatcccaacactttggaaggctgaggcaggcagatacctgaggtcaggagtttgagaccagctggccaacatggcgaaacaccatctctactamaaatacaaaaattagccaggtgtggtggygggcgtctgtagtcccagctacttgggaggctgaggcaggcagatcacctaaagtcaggagtttgagaccagcctggccaacatggtgaaacaccatctctactaaaaatacaaaaattagccaggtgtggtggtgggygcctgtagtcccagctacttgggaggctgaggcaggagaatcgcttgaacccgggaggcagaggttgcagtcagccaagatcacaccactgcactccagcctgggcaacaagagtgaaactccatctcaaaaaaaaaaaaaaattaactgggcatagtgggacacacctgtaatctcagctacttgggaggctgaggcaggagaatcgcttgaactcaggaggtggagggagcagtgaggcgaaatcatgccattgcactccagcctgggtgacagagcaagactctatctcaaaaaaaaaaaaaraaaaaaggacagtttcagaaggtaacatagtagcataagagtaatctttctataggcatattttagtagactrgtctctcattcctggtggaggagcttctctcattgatggctgatattttacagaagattttcagctcccaaaagtgttcctactttaaataacacctggaaggctggatgaatcttatgtttcctttacgtttggttctttctcctgaacatctgaatacttccgatggagttgttttgaattagataagaaatagctgcattcctaagggaagactgttctctccttaagttcataatattttgtttgtagttgtttcagttggtggctctaaccaaagcagctcatcctggacttcagtcaaacgctgtcatttctttttgatatctgaaattaccttagcattcttctttttcagatttttcaatatctggactttttaagcattttgttgagttcttctttactagtacaataaaatttattgatgtgtttcttacaaattttagattctattcartgtttatactggacgaggtttttctcaaatgcaggcaaaacaatattcaattccatgatgtcgttggttttccttccttccagacaccaaatatgcacaatgttggaaatatctgagtctatggcttcacttcttgatttcttccttttgccataagatatattcccttttttctgggttttgcttgactttctgttgtcagtgtgtctttttcaacagatggctgggcattaatgggtcctatggttttggaagtgactgagtcggctggtttctctgaaagggctgaagatgctgtagttggaatagcctcgtgttgttgggtctttattttctccactgacttaacttttcttctcacatcactttcttcagtgctttcagactcatcgctgagtttgagttttcttcctggctttttgcactcatttttgcagattcgttttcacttccttcattttcagaagtgctcgagcttctttttgcttcttttcctgcaggagttgaagtggtagataatccacaatatttggagaattcttcattggcatacatagatgagctgtgtaaaggaggatcaaaggtttcataaggttcttcatctttctcattttcaccaagcctgccaattcttgagacggcagaattattaggaaaatcaaacacattggtaggcttgcacttttgaccagctttatctttcacaggatgtattcttcataaaatgttctttgaatatcatggacctgcatgcccgggaggctgcactcaatgtggcagggccatcaggccactctctttccattttttaattgagttatttggatttttaattgttgagttgcaggagttctttatatagtgtggatattaaccccttatcagtcgtatggtttgaaaagattttctcccattctataggttgccttttctgttgactgggtcctttgatgtataaagacttttaagtctgatgtagttccatttgtctattttcacttttgttgtctgtgctctcggtgttatakccaagaaaccattgccaaaacccatgtcctgaagcttttcccttatgttttcttctaggagttttctagtttggggtcttacttttaggtatttaatccattttgagttaattttcatatatgatgtaaggtaagggtccaatttcattcttttgcatgtggatatcgagttttctcagcaatattttgttgaagagaccatcctttcctcattgtggattcttggcaccctggttgaagatcatttcatatacatttatttctgggcttttaattctattccattggtctatatgtctgtttttatgtcagtaccacactgttttaattattgtagcattgtaatatgttttaaaattaggaagtatgagtcctcctactttttcaaaagtgttttggctattagggtccctttagattccatatgaattttgggataaatttttctatttctgcaaagaaaaaatgccattgggattttgatagagatgcccttgaatctgtgtatcactttgggtactatagagagcttaacaaaatcaggtctaccaacccatgaacacagggtgtctttccatttatttgtgtcttstyttctttaatttttttcagaaatgttttgtggtttttggtgtacatctcttttatctcctttgttaggtttattcctcagtattttattcattttgatgctattgtaaagggaatggttttcttaatttcttttttggaaattgttagtgtgtagaaagacaactaattttttgtgttaattttgtaccgtacaattttgttgaatgtgtatattagttctaacaggtttttttggtggaatttttagtgtttactatgtatgagatcatatcatctacaaacagaaatgatttgacttcttcctttctgatttggataacttttcattattttccttgcctaattgttctggctagaacttccagtattatgttgaataatattggtgagagtgggcatctttgccttgttcctgaccttaaaggaataagctttcagtctttcaccactgagtataatcgtagtagggttttcatatataacttttattaggttaaggtaattttctcctatttctatttttttaaattagcacttcagtgacatagtaaaaataatgtgtggttttttgcatctttttgttagtattcctagtttttgtgttttttaatcataaaagtgtgttcaatcttatcacatgcttcttctgcatcagttgaaatgactatatggtttttgtcctcctttttgttaatgtggtatattatattgattggttttcatatgttaaaccaccctaacattatagaaataaatcctacttgtacatgatgtataatcctttttatgtactgttgaattcagtctagtagtattttgttgagaatgtttacattaatatttatcagagatattggtctgtagttttttttctttaatgtctttttctggctttggcattaaggtaatgtggacttcatagaatgagcttggaagtattcctcttcaatttttgggaagagttttatgaagattggcattaattctttaaatggtagaattccccagtgaagccattcagtcatggatttttctttattgggtgatttttgattactgattcaatcttcttactagttataggtctgttcagattctctgtttcttcatggcttaatcctggttgaccatactctgttttgctaacaattaacatctgctctttccttcccaactggaggtggtggtttaaaccactgtaagaaactgcatgtctgacaattgccatcctagttggttagcaactctctaactacaacttacacatatctgtctgtttcaaaagtggttatccttcattgagcaccaaatgtgcaacaggcagttggcatctcttacctatcatatgacagtatttctggagaggatacgtgattgtccccactggacagataaggaaacagcaaatcagaaaggttgattttttttgaacatttctaaaattatgatgcaatttacagtcggtggtgcctaatggttttattgacagccttttctttcttaatgatatacaaaatcgttgtatctcttataattcatgttgctttagatttgggaaagttttagaaatttgctcacaatcacacaggtaatgagcagtgtcatgtctgcttccaaatctgttattcacttaatcctgtctgtactctggtgagaaggatgttcatcaggaagggcatcatattgtgtaaagggcacaggattgagaggaaaattcataaggcaatgaatgtatattcacctagccagcccagtcataccgtcagagacatttttaattccaatatgtttggttacgtttcttaaaattccaacctatgctccttatatgatacattcacctcttttgtaagcataatctctttaccattaccarttaattgcagcccatcctattagctgtagaagaaagatgtggcaaatttgggaagtaaagaaaaaagggatcaagaatagacataaaagatttgtgatcacctgcgtatatctacccagtacccaaaaaagataataatatatcagtatcattcattattgatctttgctgcttcttttcatcttccaccgaaataaytgagattagaatgtcatccacatttgcaacttagtcagtgtcagaatcactcgctgaatgcttgtgttagatatcttttaatatgctgttttctatacagtctttaacacctctgtgtgaagatgacaaccaggcacaggaaatcattaagaagctggagaagagtataaagtttcttagccagtgtgcagcacgagtggccagtagggctgagatgttgggagccatcaatcaggtaacctgtcttcatttctctagttagaatgaaattacaaaaaagattcacttttcctgagactatggatttctcacttctaggaataagttttaaaaaatacttttgttgtataagacatatgcgtttaatacatatgtgtttaatacagaaaaaatggaatatacaaataaaaaatgttaaaaaaatataatcacgatccagtgacaatcataaaatttttgtgatatattcttcaagatgtatagtgttataatatagtgtttataatcccttatatagtgttataatctgctttttattcatcatacaacataggtaactttctgtgtgatataattatatactcacatgtcaccattttatggtattctactggttgagtagatataaattatttaaccaattccttgtattcaatcatttcaggatgtttttggtatttttctgttataaacaatgctccagtaaatatccttgtatatgcatctgtgtgtatttgtccttagagaagtagaattccaaaatttctttgtgggcaaacctggggagatatgaattttttaaatctatacctaagcagacttgttaaaatatattttcttaaggagaaatttaattgtggtagtaattttagtttgatcatttgttatatactttcacaccttagttcctttttaacccctcactagagaatactgttattctttgtttcatttttactaaagttatatatgcacatagttttttaaaaggtcaatcagctctataagccttactaatttcccgtgatccagagaaacaactttcaactttttgtcttatttgttttgtatttgcattcacatttttcaataacatgctcatgctgccatttagtgatttattttcagttttaggtattatctgttgctcttccactacgaagacaaatatttagttcttttatcaatctctggcccatcacaccttttcactgtccctcaagctactgttggccatcctgctttcctggccaagcttatactccacagttaaacatagttttcactaccttgcatgtcccctcatcacttacccctttcttgctttgtcttactcatttggcgaatctacaagtaaatccgcttctccacctctcatgcctgcatagctggaaaatgtcacattcccatgctgacctgtttctctttgaattcattatcacaaacctcaagcgggtccttggggcttcccctcaatcaccctccttctcttttaaatatcaatttcccaccctttcctttctcctcaaaccactgtcatgtctttccccatattctctctcaaacacaggtaatgactgcttccaacctcactgaggaaactgggacaatcaaaggaaactgccacaaagcctcccagcgtgtgaatccttacacactcccttgctcttgttcctaaagatgcgttgtctctaaccctatccaaggccagccttccccactgtagatgggagccttcccgactaatttactcagagtcatgggaccaaattctcctgacttttctccatttacattttctccactctactgaaccatttctatcagcacacaaataatatgttgttttctagatgggaataataacacaaaacaaacacaaacaaaataactttttatcctttcttttctggccaccaccctgtttctctgctcccatttacagcaaacctcgacagaatggtactcactgtgttcagtctccctcctcccacgttctctccaacccactctgtatcagccttttgcttccacaaagcagatttttccaaggtcactagtgacctccacattaccaaattcagtttctcagtcctcatctggcatggctgatgtcttcctcttcctggaaatgctttcctcacttagcttccaggcaccatgtcctctagcttttctctacatcacgggctgctccttctaggcttcctgcagttctaccccttctcctggacctctgaatattgaagagccccaggactccactcgtgcacatctgatctccatgtgcacgcaatccccctgtgatcccttgcagtcacctgaggactctcaaattcatatgtttagcctaacccactcccctgagctccagascagagtatgctactgctgactcaacagttccacttggatgtttgataaactcaaacctaccattcaaaactgactgttcatggtccccccaccaaacctaccccatgcataagctccttacttcactcaagggcagctctgtccttttagttgctcaggccaaaataggggcagagggagctggggtaattctcaacacctttctctctcacttcacattaaatcctacagaaaatcctattggctgaattgtcagaatatattcagaattcaaccatttatttccctttctactgttaccatcttgatctaagcctccattctgttttgtccagattaatgcaataggttcctatatggtctccctgcttccatccaattccaatccctcctcccaacatagtctgttcttaataaaggagccagagtaatccttttaaaattagattgygttactttttggttcagcgtcctaaagctcctcagtttacttggggtaaaacccaatgtcttactgtggtttgaaaggatgtgtggccgggcgcggtgactcacgcctgtaatcctagcaccttgggaggccaagatgggcagatcatgaggtcaggagtttgagaccagcctggccaacgtggtaaaaccccgtctctactaaaaatacaaaaattagccaggtgtggtggcacgtgcctataatcccagctactcgggagactgaggcaggagactcacttgaacccgggaggcagaggttgcaatgagccgagatcgtgccattgcactccagcctgggcaacaagagtgagactccatctgaaaaaaaaaaaaaaaaaaaaaaaaatgggcaaaagacttcaatagacatttcttcaaagaagatacacaaatggtcaataagcaggtaaaaagatatttaacatccttaaatgtattagggaaatacaaatcaaaaccacaatgagataccacttcacacccacgaggatggctatggtgaaagaagaaaggaagtaaggaagttggaaaggaaggaaggagggagggaggaagcaaagaaggaatagtgttggtgaggatgtggggagattgcaaacactgtacgttgctgggagatgtgaaatggtccagccaccgtggaaaacagtttggtggatccttaaaagttaaacatagaattaccatatgactcagcaatttcattcctagatgtatacccagaagaattgaaaacaggcactcagatacttgtacacaaatattcataggactatgaacattccagatgtttcactggggtactcctaatgtcattagttataggacttttatcttagaatattagaatccccagagaaaaaccttccaactgcctgccttgagggtgtaactctggctgccagtgtttggaggctggaaggaggaataaggctggatctcaatattcaatatgcatataagttgttgcttaaatctgttgttttcagcatgatagatccatcatcaactatctgttctttcccaatccacagaacctcaagttaactctctctagatatccaactgtatgtagtctttcaccaaaatagtggagggaaaattgctgtgctggccacagtaaggaaggagtctctggacctaatctttttttttttttttacacagactttcaaccatttcttctgttcacatacccaccatcaaccttactgaggtgcagtgtaggttgcttctaggcttttcttactgccttttttagggttcagcttttccaggtcttagtcatttgccactagtccttctatccagctttcaaagtcttgttgtcatattctcttctgtttgcccctgtagatgcatgtctttttaaaaaaaaaacatttattgccactttagtgggatttaggaatggagtgaaggtaaatgtgtttaatcaccatcttttaattgagagtagtattttcaatgtaaatgtgctcgttttttctcttgctaggaaagccgggttagtaaagcagttgaagtgatgattcagcacgtagaaaacttgaagaggatgtatgccaaagagcacgctgaattagaagaactgaaacaggttcttctgcagaatgaaaggtctttcaatcctcttgaagatgatggtaataaaagtttatgataatagtattagttgtgtttttctacattctcctcttttttgctaagtcttattattacttcagtataataaaactcttaggttaactttatattagaaaaataattcattcctgttatttatatagctaaaagtgaggtgtcagaaaacaggttgggacacatgaaggattctttagtaatgacaccaaaaatttattaactcaatttagattactgagatgacagaatatatttaatccaactcatgaagttgaccttagtgttcccctacttaggatacattagaatttctccacacgtaaaaagtaaggataaataatttaaatgggcgctgccatcagcaacggttttgattcctcacggaaggaatgaccctggcacagtaagctgattgatgaactggaaaatagagaaacatatgaggccacggggagtaacatatcgtttctataaatcttacaatagttttatttaaaataaacaatatgaacttttctgagcagaattcttatttcaagaatctgttccctgttctagaacagtaaccatatttgatactcttctgaactgtacttttggattcctttctccagcagacacacatgtagtgcctaccctgtgctagctaggcattatggacatcacagtgacacagaggactgtattccattggttaagatggtaattgttatgaagmatgaaatgaatgataaacagatatttatattgctcggtagtctctaaagtcttaatatyttctgaattttgctttacctttaaagaattaagacgttgctttaacataaatggcatgtgtaatagctaaaatgtgtcaatgtgtttttcctttcagatgactgccaaattaaaaaacgttcagcttctctaaactccaaggtaattactaattcacttaacaaatgtctagcaaatactataagacggttttaaaatgttatttgaagtttcaggcctttatatgtaaataacaaaatagtgattttaattcatayagatgtattwgtttatctaagtatgcttttatactctctgctatatttttgtatcaattaagtgtgcctggcagcatgaagaaagtcagtacaacaatggtttctctctgttgtgtaaaactgaagttggaagtgggtaacccgacaatggcacagcagcttcacaagatcctgagggatcagcctcctcctttcgtgctgcctcactaccctcagcccttggcttctgcctcaragtctaagatggctactttagatccaggcaccaagccctcatcattacatcatctcattccaagaaaaaaaaagaagcaatgacaagtattccctctccctgtaaagacaccccctagaagtccaaagtaacatttctctttccattctttgttacgaatgagactggaaaatacagcgtgtatttgggaggctgtatgcctagctaaaaatcaggaggcttattactaactaagaaggaagaatgtgatactgaaggtcaactggcaggttttgccacagtgtaaaaatcaggatttcatagatatacagaatttttgaataagtgactttaaaatcattccatacaaatccctctttttcagatgagggaagagaaacacagaagttaagtgatcagttatgatcatgtattggtagragcatgattagaaaccaagtttcttgggccgcagtttcatattcttgatgctcaactaacctatgaaattaaattagggatgatggtttaagaaaacgattcacatggaacccccttaaattagtttatttattacatattttaaaaatttatcctgatgtacttatttaaaccttaagaaccacataatactatataatgcttttctgtacaaatctcaagaaacactttcattcattaaaacatcatgaaaatccttaaatgtgttaaatggaaaaaaatgaaaccatgaacaaaaaagctatacatgtaggtgcatatttatctcctcctgagttgggagaaatctttctaagcacagaagcaatggtagcaaaagagaagaatagatttggctggattaacaacaaaaaatttctgccagaaatatgaaaattcaatttagacaaaattcaatataaacaaaattaatatagacaaaggtggtaaacaggtggttctcagagaagataaatacatgattatttaacataaaaagaaatgttcaatgtttctagaagacaaataattacaaacctaaacaaattgtatatttgttagattggcataaattataataatccaacattgagttaggtggaatataaattggtaaaatatttctggaagacaatttggccacaagaggatcctttaagatatgtctgtttaactcagctgtggtcaagtacacggatatgcatgtacaaggatatttattggtgttgcatataatgataaattattgagagttttctaaatgtacattttcctccttctggtagccatcttctctacgaagagtgactattgcctctttacccagaaatattggaaatgcaggaatggtaagacaattcctaagtgttcttagtcaaaggtaaattcattttcatatgacagaaaatataaacgtatattttatcatttcttttaacatttgaacttctactaaaggtggctgggatggaaaataatgatcgattcagtagaaggtcaagcagttggtaagtgtaattttatggttcctctttgggaaccttactattttatacttgggctaacctaaatgagtgctcaaattaagtgatatagtaatgtttgatttgtacaaagtgtaaacagaataattatataaattggtatctaattatgaagttttttatcataaagtaggagawctgtgaatgtgccaagaaaaaataattaggacatataattttgtatttacttaagcagtaggaaataaattgataatggctacagatgtatttgatttgacaagtggctataatcatctttatttaggcgtattttggggtcaaagcagagtgaacaccgtccctcattacctcgatttattagcacctattcctgggcagatgctgaagaagaaaaatgtgaactaaagtaggtgaagctcagtgtgtttattaacctgayatgaactggggcataaacaatgggaatcacttttattccatggagatgaaataatgctgtataattaaaaagataattcattgtaaaacacttttataaactgtaaagcacaatataagtgttatttgtgaatattaatacattcactctcatagctctcagaatggcaaagtttgaggtcttaagttagaaaagaccctggagtttgccatatttgtgaagataatttttttcctgtccaggtgtctgtctacaatggggaaaggtcaataaagagccacagaagtaaaatgtccatctatttatatatttttaaaaacatgagatatataacgtacgtattatataacatataggcacatatgtaacatgtatgtacatctatctatcttccatttatgtaagtgaagagtagaggaaacatgaaattctgaattgctatctctgtatctagtaaactaaacaaatatacttctacagtgaaaggtagagggcaagaaggagggatatgcagaaatgctacctctgagtccttgggtgacattagaaaaagtgcctaaccttacttggtctcagtttttttttttttttttttttttgagacggagtcttgctctgtcacccaggctggagtgcagtggcgcgatcttagctcactgcaacctccacctcctgggttcacgccattctcctggctcagcctcccaagtagctgggactacaggcgcccgccaccacgcccggctaatttttaatatttttagtagagacggggtttcactgtgttagccaggatggtctcgatctcctgacctcgtgatccgcccgcctcggcctcccaaagtgctgggattacaggcttgagccactgcgcccggccttcagttttcatatctgttaaagtgaaggatcttaaggagatgattttatgtttatttattttattttatacattttcgtgagtgcctaccatgggatggacactctgctcaattctaaggaatataaagatgagcatgacatggtgcaatcctcaaataatctgttttggtttttttcttttttttaaagtcctgggagcctactgcatgtgttacaaactcttttcagatttagagttaacataatgaatttgagctggttggaaaaaaaaatcagttcaagagtctccttcaaaagattatctagtttttgctttttgttagtatggtatgatttctactgagaagtctttgtaaacaagactgaaaccttgagaatcttacagaaatgcaatgcaatttattctggcttttgggtcttgttttctttaaaaactaaagtctatcatatttatttcccatagatgtttgaatgaaaaaaaagtctttgagacacatttccctttggcaattytgagggtattatgagcttgagatttcaaaattcaaatccaactaggaactcatcagcaaatatagtggaacaattatgttttgcttaggtggargaacacctctttaaataatatgatttgatttaaaatgcagtcaatcaattgctatttcccagttcactgaatactaatttattttaaccagttttatactgagaatattttcaaaaacacgttttaaattattaagattttcagagaaaaactctgatgttactccaagttagcactgattggaaatcatacagagaaaggaataaaatcaataataatgagaaaagatttttactaatgttaaataaaatttaaaaggaagagatatggtgcccacatttgttttatatatacacatacacacacgcacacacaggtatatgtacacatccatatacaaaacatatatacaacatatacatacatatttttatatatataaatatatatattatggaatatgtgtgtatatattataaactttgtataagcatatattaatatgcatatattatatgtagatatgtgtgtatatattatatataaatatgtgtatatatagtatatatttatatatactgcactccagcctaggcaacagagtttcttctccagcctaggcagagtttctctgcatayatatatgcagagaaagaattcatagtaataacattggttaatgatgagactaacttctgaaagttctttttaaattttccctttttgtatatacttggctaatattctattgtatatacttggctaatattctaactaactttctacacatttattatttttctaaatagaagaacttatttttaattaaatttctataaaaggtttaaattataaatctggtgatttgatttttagagttagatatttatcractttccctaaaacagaacaaatatttgtgagcctcttgagttacagtaagattcagcaatattttatgaataattatagcatattatccttagtttcaaatattaaaaacaacatttatttacagaactaaagatgactcagagccatctggagaagaaacagtagaaaggacaaggaagccaagtctttctgaaaagaaaaataatccatcaaagtgggatgtctcttcagtgtaagttatctacttgataaattctaccattttagtggaatgggaaagggtgaggcagggctgacagtattaatcctaatcaaattactaaaagacatgccaaattgttgtatttaagatgaataacaaactttgtatgtcaggttatccttgaacctatgttatctattttgagagacagactacattcacataacttttactgtaatatatgttatattctattttatgttagttattgttcatcttttactatgcctaatttataaattcaattttgttataggcatgtatccataggaaaaaaacagtatatactgggtttagtactattttcagcttcaggcatccactggaggtcttggagcatatcccacaagaataaagggggactactgtacacacacataagtacatacacagacatccactctacccagcaaataacatttttgtttccactgtaggaatatgttgccttaccttactgaaagaatgagatacttgtatgtacttattagaagatactgcctacatcacgtaattttcagattctcatcgtagcacatcatttctttaatcctaataggtacaaagggtgggaggcagattgtttccaaaaccaaaatgataaatcataatatgtagattaaaaggcagttttgggggtatgaagggcagatcacctgastggtggtgttagcaaaaggaatgtttctaatgacaaattaccgattaccaaattctatttgtgttttccttatagttatgacacaatagcttcctgggcaacaaatctcaagtcctccatcagaaaggctaataaggccctctggctctctattgcattcattgtactgtttgcagctttgatgagcttcctcacaggccaattattccagaagtctgtggatgccgctcccacacagcaagaggactcatggacgtctctagaacatatcttgtggccatttaccagactccgacacaatgggccaccaccagtgtgacagcaggacatcctaatatatggatcttgatttttaagtttcagtatctgaacttcgtaaattagtaacttttagctgggaaagtatagcatgaaaccagaggttctcagaatgactgtaagatagcttacatttcctctttttgcctttatctccccaactaaaatacaatggggaagaagtctgcctatgatctttgaatgagctttttaaggaagaaatattatatattgtttgttaaagtttattgaaataaagaatcatttaaatcttsatagagtgaaagctgaaattcttaacaggccaagtattcaaaggaaaaaaaaatactgtttttaaaataaaacttgagtagaaaatgcagattagaaaatttttaatagttgatttgaaatgtattcattcactcattacattgtgttgcagaaatacctgtctttcaccatgcttggttcttcatacttacaatacagtttgtaagtggaggttaggagtagctgagcaatctggtagagagcagcatgtggcacacagagttgacaaactgacagttggaactcctgactttctccattgcttcctcagaagcaaaatccttcaccatgtgatataaagtagaatgaaactcagtttcttctttaagtgcttcagaaaatgcctcactctcttccttgatcttcagtctttgtgctctgtcaccactaaacattaaaagggcccaattaggattctcagtacattcttcagtaaggkgttccctcacctaaaaaaaaaaaaaaaaaaaaaaaaaaaaaaaaaaattcaagcaagttgttaataattcctcttctattcagtattttggtagcagattattatttgaagggctcaatttatcccccaaaattgcaaaggttaaaagaaacagtctatgtgttccattactgggttttgaaaaaccatcacactgtttatattttggtgattatggagcttatccacatgtattaattcatgcaacaaatatttattgagtgcctatcatgtgtgaggtactgttctaagtgctggggatataacagagaaagaaaacacagaagaaatatagacatacaacatatataaataacaactgcaacaacaaagccctgccctcaaggggcttatatttgagtgggggaaacacacaataaacaagagcaataaatacagtggcttgtttaggccaaaatattcatcagcttttagaatttgatatggttactaccacctgataacaagaaggtatcaggaagttaagttggaggactaaccctctcagaggagaggggctgtaagtcacagatatattaatgttaaaagcctccatttgttgttttttttaagagatgggggtctcactctgctgttcaggctcgggtgcagtggtgtgatcatagctcacttcagcctcaaattcctgggctcaagcgatccttccacctcagcctcccaagtggctgggattacaggtgggagccactgcacccggcaaggcttccatttgttcttgagtcaatttgtaaacagatacaaggactctggcctggcttgaagtcaagagcttggacaacaaaggcataaactttatataatttagatttatatttttgacaaaaaatttgaatttttttttttgagatggaattttgctcttgttgcccaggctggagtgcaatggcatgattttggctcaccacaacctccacctctcaggttcaagcgattctcctgcctcagcttcctgagtagctgggattacaggcatgcgccaccacacttggctaattttgtatttttggtagaaacggggtttcaccatattggtcaggctggtctcgaactcctgacctcaggtgatctgcccacctcagcctcccatagtgctgggattacaggaatgagccaccgtgcttggcccaaaatttgaaattttaaaattccgtattgaatgttaatttttttaacttttctaagaggggaagccatggtctacattcatttagtctttgagtactttatcttcttttggaggacaaagtagttttatgggtttctacatatcataccttaaatacgacttttgtagaattacatagtaggttccacttgctccaaccaaatgcaaaagcagaacttagtagggccatctgtcgataagctttcacttctaccaaaggaacctgtcaatataaaaacaaatagaattgatctttgagcctcccaacaagtcttcctccatctttggcctccttcagtctattttcaacacagacggatccacttaaaattgtaagtcagagtacatgactcctctctcaacactgggcaatggctttcctttctctgagaatagagtccatagttaacaaacgacttgcacggccctctgacatccctactcccgactccacatataccccattacctgccgacctctttttcttctccctttgctctctcagttccaggccccatggtttccatggtgtccctccaatcctccagcacaccaagccactccctcggggctcttgctccagttgtttaccaggaagctgcttccccagatgtgcacatggctaaagtccccacctttgagtttcactcaagtgttatctctcattaagctgccctccctgacaccctatttaatatgggtgtcatatggcctcagcctcactattccggatctaccttttctttttttccatagcacttttcacctttttaacatactaatcatttatttttttaaatgttttccttcgactgtgaaagaaaacaaaggtaaggacctttgtttcattcattgctatatcctaatcatctaaaatagtgcctagcacacagtgttcagaaaaaaatatttcctggagtagaatattctgaaagcatgagcagaacactacattcaacaatgtagagtaacaggcaatttgagttactaaaaccaagggtttttttcctatgcatatatgtacatacacttatttctaaatattatataaatatctacttatattgtcattttctgatacattcataaatattcttgagtacagaactcttctgcctacaaattcacttttcatgattagaagttactttgtgtcttcatatatcacaaatgtttactaagcatctactatattctaggactatgctagatgctagaagaatcaatgttcattaagaaatgacccccatcctcaagaagctcacagtttaacctggaaggatcttactgaactaaagccttatgacgaacatgaaacagtacacagacatggaggctttgccaagaaactaaaggaagtgggttttgtacattggtggtccttgtatttttaattctgcctaacttaccatgtttgggaaagtgcagttatttactcttttaggaaatctcatataatatccagtaatgcaaaaagaaagtatataaaatgagaattgcttaaactacctttgcactaaactgaccgtctgtggatatgctccatttgtcaatatgaagatcgcactacaggcttactttcttagggaaaattaagagaaccctggatttctggtcttttcacttatttctttataatactgtataaatgaatatataaaatacagtgtatataatattaaattatataacatttaataattgctaacattttaaatgcacgccacattaaatttggaaagattcattcttgccttattgtttataataacataaaaatgagagtgtctagtaggaaagatattcagtccagcttctttcaaagcaataatgaaaggaayaggagtcatccaggttccttccaaaatagagatgtgtttcttgtcttttagtttgattgaagataacatgcagaggttttcctagtttaaataagaaaaaagaagcttttatgtaagttaaatcattacttcagtatcactccaggtgcagcctttagatgctttatacatttttaaaagtcatctatcactctatattagaaagaatgcagggcaagtatatcttaagcctcatctgaatgctctgacacaaagtccccatgttatgttaagcagtttactaactctttttgggcttcatcagaacattcaaagaatggactatagcatctctcaagcctcctattttagaaattgtaatataagaatatgcatatgttcacactgaattaaaatagttattagataacaattatgattatacttttagggatcattcttttcacatccgtaaaagttaacataatgaggcaatattattatccagttttaaagtcttgcgcgaagtgacagtttgaaggtgtatagaattcacatctggtttttttttttttttttttttttttgagacggagtctccctctgtcgcccaggctggagtgcagtggtgtgatcttggctcactgcaagctctgcctcccaggttcacaccattctcctgcttcagcctccctagtagctgggactacaggcgcccaccaccacacccggctaattttttgtatttttagtagagacagggtttcaccgtgttagccaggatggtctcgatctcctgaccttgtgatctgcccacctcggcctcctaaagtgctgggattacaggcgtgagccaccacacctagcctacacatctgttttatttttaatgttaataatatatttcatttaacccaatatatctaaaatatttcaatatgtaatcagtatagaaattattgagagtttacatttttttcttcataccaagaactcaaaatttgtgttaattttacagttagagcatgtgctaatttggactagtcacatgcagtagctatatacggctggtagctaccacattagacagcacagatctactaacctgaaaacgcacactgaacagtcttgggtgtttcaatcgtcatattaataagtgaactttgtgaagatgcttgtatttttccatgagtctagaggaagaatctctgcacaagggtcgtcagggctgctggaatggtgcagggaagcctgaaaggaggctccagcaatacaatccccttacacaatctcagaaaggtcacataacctcctaacctctatgggccttagtttctctctatatacaacaggagggtagaccagaagcattttaagggcacttgcacactaacaattctacggcactccatctcccatctcacctagttttttgttgttgctgttgttgttgttgttgttgttgttgttgttgttgtttttgagatggagtcttgctctgtcgcccaggctggagtgcagtggcacaatcttggctcactgcaacctccgcctcccgggttcaagcgattcttccgcctcagcctcctgagtagctaagactacaggcgtgtgccaccatgcctggctaatttttgtattattagtagagatggggtttcaccatattggccaggctggtctcaaactcctgacctcacgatccacccacttcagcctcccaaagtgctaggattacaggcgtgagccaccgctcccagccctcatctagttttaaaagcaaagtttaataatattctaggctttctgtactcatgatgaattccaggctatctctgtttttaaaaacaactttttaagatatattttacatatcataaaattcacctatttcaagtgtataattcaatgatttttagtaactttacagactggtacaactatccccataaatccattttagatcattttcatccctcccaataagattcctcatgctcatttacagttaatccccacccactctcagccccaggcaaccactaatctacttttgtctccaaacattacaggctatgtaatttctttctttctttctgggttttttttttgttgttttttttttttgagacagagtttcactctgttgcccaggctggagtgcagtggtacgatctcggctcatggcaacctccccttcccaggttcaagcgattcttttgcctcagcctcctgagtagctgggattacaggtgtgtgccaccacgcctggctaatttttgtatttttagtagggcttcaccatgttggccaggctggtctcgaactgctgacctcaggtgattgcccgccttggcctcccaaagtgctgggattccaggcgtgagccactgcgctcggcccaggctatgtaatttctgactgatgagcaataggggatcattcagagagaaaccaacctcaaaaaggatttcaaatggctggatgataaacatcacgtagcccctttagggtggatcaaaaactctgaaattcatactgcaatgagggttgttggttcatcagttgatctatccctagtaactttagggtacaaatttaagtttgagccttgctatttacatgttattgcctatttaattattcaactaatatttcatttagaaatatagctcaaggtacatttttaaggtcattataagacacttatatttcaatatataaatcagcagccactgattgcttttgacaaactagtattccatcaaaatggtttacctctgatacgatagtacataacagctacaagagtaactcaccttaatttgtatttgaatctcagtaaatactgtagtcacagttaaaagtactttatttacatcaagtggtcttagttcccatgactggtacggcatgttaatatgagcatcttgaatcaaggtaacagggccaaaggtgtccag

SEQ ID NO: 6753 - DNA, 100412 bp, Homo sapiens
agcatccttggccagtaggtgattgggttattaatctgcaaattgcctgcttcagactttgtgcttatatacaaggtcccacagatggaccaggccaactgtatacaacagaggccacatgcattggcaggacttcatctcatggtatttccctgctactatttaacttcagtctcatattgggggttacatatgtgattgcaaattaatcctttctcttctgaaaatttggttttgaagaacagctgtgtctcccttctgaattccttaattatttatcctccctgatatgttaaacctttcattagtgtggtgaattgccaagagtacacagaactgcttagatcatgtagcaaaaagtataaacatttgataggtcatttgaagactacatggtgagccagaatctgtagtagtaccaaatgctatgggattgttggaggtagcttgttgttggaagttgcttgttggtttattttgctggtttattatttttttatatttatttatttatttatttatttatttatttatttatttattttgtgacagagtctcactctgccacccaggctggagtgcagtggcgcgatctcggctcactgcaaccttcttctcccgggttcaagcaattctctgcctcagcctcctgagtagctgggattacaggtgcccaccaccacacccggctaattttttttatttttagtagaaacagggtttcaccatgttgaccagactggtctcgaactcctgacctcctgattcatccacctcggcctcccaaagtgctggaattacaggcgtgagccaccacgccctgcctgctggtttattgttttacactataacatggagatagtaccgatgtcatttgtatttattcagaaaagaactgattctgcccccagctcttgttaaatttggagggcatatgcccatatatgagttaaaattaaatcaagaaaattaattacatatatctgtatgtcattaattatatctataattatgtgtgtttgtgtatagatatatatatttagacattctatatttgcatttgtagatttgattccataactgctgttcctgaaagagatttcacctcaacttttcaggtcattactctttggaaagatgctttaaatgattattaaattattagaacttccacttcagccataacaagtgtaaatgattagtagtgatagagaacttcccttgttgctaagaatagcaacccaacatttataagtttactagtgcctttttaaaaaaaatcatttttcatcttaaggtcctggggcttgcaactgaaaatattaatctcccaatacacatcacaaatctttgacctcagcatatcaacaatttctgatctgcaaatacattttttagaatgatctttagtctcttgatttttctgtttttctagctgaactattccagaatttatgtattctattacctgtccttggataattggtttttccattcataagaaagaaaactaagaaaagttcaaacaacaggtgctaatgagagccttttattagaattatgattgaggagaactgggaagtttagtgtcttataaatgaaactaggtttctggagtggacagaggaaaagcaccttatggtgtttctggttctatttctcaaaggctttgaaggttataattagttgctactgaatcacatggctgtggtgcttcacagctttatttctgggctgcagtccttcagtcagagaacaggttagatccaggcaaggcctatgccttttaatttgatcacttcctgaagagagctgggattttgacttgaggaccacatttatgctcctgggccctcaaactaaagagcagtgtttgccaagctgacctggaccaagtgatggtggcgggcctgtaagaatgctgtacaatgtcaacacctccccgctccggttacgtctgagcagtgagttggaaggatggacgatgaagctgtggtttgtctccttcctccttcacaggagggaaaactgaggcaaatggatctctggaattctgagcacagaaagtaggtgggcaggtggtataaattaaaattggtgttcttaagattgaaaatgagcaggctttgtccataatttacttttccccatttctgtatatatgtttcaaatctttgacatcatctctggatgttctttatatcttaaagagtttgtcaaacataaacaattggattgtgggtttgcccatcaaaaccccacattttgaaatccttcaaactgtaaatgcaaactgaacaaaccagcaacgaataagtagtactaaaggcagtgactaattaggatggtttaggggtttcatgttaggaggaccagtcacattaggtgccagttattttagaatgaatctgtgttcaccttgcagggatcatgatgggtggtgtttaaagtctaggcatctgaggtctatttgaccttgaagggcctagacatatatctggggtagaagacagggatgcttgtttgatatgtagattcatctcatgaccttttgaaatagactctttttagttagttcagaaacttcctcttttacttttgattttgctgattttggtgagaaaaaatattgctaatttcataatcatagtattattaaatgaagtcaatagatatgagatcaaagcttttaacttaaaatcataattttatagcagatcagtgactaggttagcctcttagggttgctgctcttcgggattgatgaagaagatatgcagagcttatttctcaccttttttttttttcctcggttttggtttcttagaggattaccatctgctgcaaaaacatatgaatgggtcatcgtcatgtccagtgtgtttttgtctctgtccttctctactcccttcccctccacttgctgtcactttttgcacatgtgcccatgtaccatctcataaacatatcaagtttctctctctttgattgggccatgccagcaacttctattttcttcttctgtcagcgtcttcaggagaaatgtgtacacaaaagcaagatggctttcaaagtaggctacatcctcctttcagtacttggtgcagacatgaaattgaaggccattcagctctacctgatgctggttctctcagcggcctggagattaacctcttctaaggctctgagctatttttgaggcagaggctgcaacaacattaaagctagaacccattaggaaatcactttcatcatctcttctttttccaaatcagtgactctttttctgatctcataaccctttaatctcctttgtagcagaacaaggagattgttagtttatgtttgtgtccagtgaagttagcatccttgataatagcttcagaagacaccaagatattagagaactacatagagagatgaatttcatttctaggtggatgacttaatgccgaaggtgccctgctttccttctgcagaaccgtaacttctgttgatgttgtgcaaatcaggctcaaactttccaaaagacacacagcagaaagccttttgttgcattatttctaaaggcttgaagttttgaagrgaagagattttgttttcctctctgctacacaatggagctttcagagaacctcctttaaaaggaatagctacagcctttgtgttgaagggtgtgtctgttggcagggtctgctgatgcagacagactggctggtgattaacaaaggtcattagactttggaatctggcaagcagagtcggatggtatgtcttctgtgtgtggaaggacgacttccaagaagccaaggcattctggaggtccccccactgcacccctaaatcctgatgtagaacaggatctggcccagggtcatcctgctctgaccagggctctgctgggactaacaaaccagcatatcaatcatggaataaaagaacctttggagatcttggtgaatgacatttgaggaggagaaaggtgctgcttttcagagagaaatgaaaacagttaattctttgttgggaagagaagagcataggaggagcccagcctgctcttctagcattcatttctgattgttagcctagcagactccaggagaagccatgttgtgcacggaggagaagctctgagctaaaatggctgcccctaaagctcagaggactagggcagcttagtgagtcttagagcttcagtgacgcaggagctcatatctcttgaaagtgtgataaacacattcagcagagctgtggcttgtttggctgagatgaaaggactaagcttgggggatggggagtgcacactggatgatctgcttttttctgtgaagtgttctaaatgcaggagttgtctgcaccatggaaaaatttgttttcaggtctaatggactgtgcgaaaggagaagtggggtggggcctcagtgactgctgtaatttgatccagagctgatagcaacctcttccacacaatytgggttggtgcttagacataaaagcttgtgtatctggaatattgagacttagctgaaaagagtctggtgcacagttcaatgtttattgaaaaaggataaattgctgggtgaaagaagaggaggtaaatatctgcggctcactctgcaagctcagtctgtccagaactggacttgccagaagttattttagcaggcgatcaggaggagcattctttgatagaaaatccttgtgtgatggctcctttcactacattgatgtattattactggacttttttgttcctgcagaaataatttatcttttacagtaaaagtatagagtattacatcataaaatacattggctacggtgttagttcttggacatctggttctagattacagtgactcagtagagtttgtgatgatcttactgaagtaacttactcattagataataacagggtatctcaacttaggatatacattaagataggaaggactccacctttctaatacatttttgacttcttgatggtgggactctcctttgagttagtgtgtagctttctgtatatttcagtcacaaagtaaatagcagaatgaaggtagctgggcaagttttgatttattccacggtaggttcacagctttttgcatccaggtatgtgcttcatgtttgtaaaggaaagaagtggaaaaaggtaaagtcatgacttagaagcccttcttcaaaaatgcaagtttctgttgtcttcatgcaaattgaggtgccaaggtgcaactttaaacagaaactggattgtcatccaaagttggttgtttgaaaatctcatgaggaatattttatgacctaattagattgaagaagctgttaggttataattggtaggtagtaaaacagcraatagtcatttagctcatggaaaaaaaaacccacaactaaactatttggagaagggaggaaagagaggtgcaccccaatatcagcaaagttattaaagtaagaaaagctacaataaaaatgctctacctccacccccaagatttaaatactatttcactaattggtgataaaacaccaaggtcataatactaaataaacagctaatgaaggttgaaattttccctttcttctgtgtggacatcctctttacttttgagatggttccaatttaaaaagaaaatgagtccaaggcagaaccaaagccaacattaagttaccaagaaatttggattcagtggagaagctcagaaacttctaaaacttttgaagtattaagcgtttccttgacaaatggcattggaagacatatcatgctagaaaatgtttatctggtatttttccttctttgaagttatgaggtcaaggacatmatctccattatgtctgattgcctctctttagccaatgttccaactggcaaagtccaataagagaaatctactgatactggaattttttcccattaatggatatatagccccatcagctcgaggtatgtgattagtgcattccttaagatgttttgttctgacttctgccacaggttcctaatgtgagaggctagacccagatcatggaggtgcttcagtgtgatggctgtgatttccgagccccgtcttatgaagatctcaaggcacacattcaggatgtccacacggcatttctgcagccaactgatgttgctgaggacaatgtgaatgagctacgatgtgggtccgtgaatgccagtaatcagacagaggtggagttttcttctataaaggatgaatttgccattgcagaagatttatcaggtaaatctatactaaacttggcacggccgatgtattttaattgctcttgtttccttttagcctgtagccatggttcttaatatacgtggcttttgcagagtttcttgtgctttgctagccatttttgtggtttgggcatcatgtatctctccttgagtaccttaggttttatcctttcgaaagcttcctcatatatcctacctttcaatttggagaacaagatagttgcttggaaagttctagaaaaagtagtacaatttatgcaacttgtatttttatagctgtgtggctcatttatggagatgaggagaatacctaaagctatacactgcatctttatccatgagaaggtgcagtacgtatatcttcattgatgctttgtgaatactcttcaaggcctcatcttgagacttcaggccttttgcatgtgatgtttagtaatgaagaataattggaatggtactgatttgcatgattggatattttaattatcttttgctttgtcactttccttatgctttttctttaggtcaaaatgcaacttcattggggaccggaggttactatggccacagtccaggatattatggtcagcatattgccgctaatcccaaaccaacaaacaagttttttcaatgcaagttctgtgtacgctacttcaggtcaaaaaacctcctcatagaacacactagaaaggtccatggagctcaagctgaagggagttcatcaggaccccctgtcccgggatccttaaattataatatcatgatgcacgagggatttggaaaggtcttctcttgccagttttgcacatacaagtcaccaagaagggcaagaataattaagcatcagaagatgtatcacaaaaacaatttgaaggagaccactgctcccccacctgctcctgctccaatgccagaccctgtggttccrcccgtatcactgcaggacccctgcaaggaactgccagcagaggttgtggagcgcagcatcttagagtctatggtcaagcctttgaccaaatctcgaggcaacttttgttgtgagtggtgcagctaccagaccccccgccgagamcgctggtgtgaccacatgatgaagaaacaccgcagtatggtcaagatcctttccagtctcagacagcaacaagaaggaactaatctacctgatgtgccgaacaagagtgcccccagccccacttccaactccacctatctgaccatgaatgctgcaagccgggagatacccaatactaccgtctccaacttcaggggctccatgggcaactccatcatgagacccaattcttcagcttccaagttttcgcccatgtcttaccctcagatgaagccgaagtcacctcacaattctggtctagttaacttgacagagagatcccgttayggaatgactgacatgaccaattcttctgctgacctggaaactaacagcatgctaaatgactctagttctgatgaagagttaaatgaaatagacagtgagaatggtttaagtgctrtggatcaccagacatcaggcctgtctgcagagcagctgatgggctcagatggcaacaaattattggagaccaaggggattccatttagaagattcatgaataggttccagtgccccttttgtcctttcctcaccatgcatcgacgtagcatctctcgtcacatagaaaacatccacttatctggaaagacagctgtctacaaatgtgacgaatgtccgtttacttgcaagagctcrttgaaacttggggctcacaaacagtgtcacacgggtacaacgtcagattgggatgctgtgaattcccagagtgaaagcatttcttcctcactgaatgaaggtgtggtgtcttatgagagctcaagcatcaatggtagaaagtcaggagtcatgttggatcccttgcagcagcaacagccaccgcagccaccaccaccgccgccgccaccaccaccatcacagccacagccactgcagcagccacagccaccacagctgcagccaccacatcaggtgccaccccagccacaaacacagccaccaccaacgcagcagccacagccacccacacaagccgcacctctgcacccatacaaatgcaccatgtgtaattactccaccacaactctgaaagggctaagagtccatcagcagcataaacattcattctgtgacaacttgccaaaattcgaggggcagccctcaagcctaccattggaaaatgagacagacagccacccctcttccagcaacactgtgaagaaaagtcagacctcaattcttgggttgtcctccaagaacaattttgtagctaaagcctctaggaagctcgccaatgactttcctctagatttgtcacccgtgaagaagagaaccaggattgacgagatagcaagcaaccttcagagcaaaattaaccaaaccaaacagcaggaagatgcagtgatcaatgttgaggatgatgaagaggaagaggaagacaacgaagtcgagatagaggttgagttggacagggaggaagaaccgacagaacccatcatagaggttcccacttccttttctgcscaacagatatgggtaagagataccagtgagccccagaaagagcccaacttcagaaacatcacccacgattayaatgccaccaatggggctgagattgagctcaccctttctgaagatgaagaggattattatggctcctcaacaaacttgaaagatcaccaagtttccaatactgctctgctgaatacccaaactcccatctatgggactgagcacaatagtgaaaacacagactttggtgactctggaaggctttactattgtaaacactgtgactttaacaacaaatctgcccggagtgttagcacccactaccaacgaatgcacccatacattaaattcagctttaggtacatcttggaccccaatgatcacagtgcagtgtacaggtgcctggaatgctacatcgattacaccaacttcgaagatctccagcagcattatggcgagcaccacccagaagccatgaatgtactcaactttgatcactcggacctgatctaccggtgtcggttttgttcatacacgagcccgaatgttagaagcctgatgccacattaccaaagaatgcatcccacggtgaagatcaacaacgcgatgatattttcaagctatgtcgtggagcagcaggaagggctgaatacagaatcccagaccctgagggagattctgaattcggctcccaagaacatggcgacttccacacctgtggctcgtggtggtggtttgccagctacgttcaacaaaaacactcctaagacctttactcctgaatgtgaaaatcagaaggaccctttggtcaacactgttgttgtttatgattgtgatgtttgttcgtttgcaagccccaacatgcattctgtcttggttcattatcagaagaaacaccccgaagaaaaggcttcctactttaggatccagaaaactatgcgaatggtgtctgtggacaggggctctgccctttctcaattatcatttgaggtgggtgctccaatgtctcccaaaatgtccaacatgggttccccaccccccccacaacccccgccaccagacctcagtactgagctttactactgcaaacactgttcctacagcaatcggtcagttgtgggagtgcttgtccactaccagaaaagacacccagaaataaaggttactgccaaatatatcagacaggctcctcccacagctgcaatgatgagaggggtcgaagggccccaaggctccccccggccacccgcccccatacaacagctgaaccgaagcagctctgagagagatggccctyctgtggagaatgagatgttcttttgccagcactgtgattatgggaaccggacggtcaaaggggtactcattcattatcagaagaagcaccgagacttcaaggccaaygcagatgtgatccggcagcatacggccaccattcgaagcctctgcgaccgaaatcagaagaagcctgccagctgcgtgcttgtctccccctctaatctggagcgggacaaaacgaaactccgagcactcaaatgtaggcagtgctcatatacctccccctacttctatgcactgaggaagcatatcaagaaagaccaccccgccctgaaagccacagtcacgtccatcatgcgatgggcatttctagatggcttgatagaagctggctaccactgcgagtggtgcatctactcccatacggagcccaacggtttgctcctgcattaccaacggaggcatccagaacactatgttgattacacctacatggctactaaactgtgggctgggccagacccatcccctccctctctcacaatgccagccgaagccaaaacctacagatgcagggactgtgttttcgaagctgtttccatctgggacatcactaatcactaccaagcattccacccctgggccatgaatggtgatgagtcagtgctactggacatcatcaaggagaaagatgctgtggagaagcccattctttcatccgaagagttggcaggccctgtgaattgtgaaaacagtatacccacccctttcccggagcaggaagctgaatgtccagaggatgcaagactgtcccctgagaaaagcctgcagctagcttcagccaaccccgccatatcctccaccccataccagtgcacggtatgccaatctgagtataacaacttgcacggccttctcactcattatgggaagaagcaccctggcatgaaagtgaaggctgctgactttgcccaggacattgacatcaacccaggtgccgtctacaaatgcaggcattgcccatacatcaacacccgcatccacggcgtactgacccactaccagaagcgacacccgtccatcaaggtgaccgctgaggactttgtgcacgacgtagagcagtctgctgacatatcccagaatgacgtggaggagacgagcaggatcttcaagcaagggtatggcgcctaccggtgcaaactgtgtccgtacacacacggcactttggagaaactaaaaatccactacgagaagtatcacaatcagcctgaatttgatgtcttttcccagtcgcccccgaagctgccagtccccctcgagccygagatgaccactgaagtgagcccttcccaagtctccatcactgaggaggaggtgggagaggagcccgtgtccacttctcacttctctacctcccacctggtctcccacactgtgttccggtgccagctctgcaagtacttctgctccacgaggaaggggatcgccaggcactaccgcatcaagcacaataatgtccgagcccagccagaaggcaagaacaacctcttcaagtgtgccctgtgtgcctacaccaaccccatccgcaaaggtctggcagcccactaccagaagcgccacgacattgatgcgtattacactcactgcttggcagcctccaggaccatcagcgayaagcccaacaaagtgatcatcccatccccgcccaaggacgactcccctcagctgagcgaggaactccggcgggcagtggagaagaaaaagtgctccttgtgctctttccagtcgttcagcaagaagggcatcgtgtcccattacatgaaacgccacccaggggtgttcccaaagaagcagcacgccagcaagttggggggctacttcacggccgtctatgcagatgagcatgagaagcccacactgatggaagaagaggagagaggcarctttgagaaagccgaggtggagggtgaagctcaggaaatcgagtggctcccattccgctgcatcaaatgcttcaagctgtcctttagcactgcagagctgctgtgcatgcattacactgaccaccacagtcgggacctaaagagggacttcatcattctgggcaacggcccccgcttgcagaactccacctaccagtgtaagcactgtgatagcaaactgcaaagcacagccgagctgacctcacacttgaacattcacaatgaggaattccagaagcgtgccaaacgtcaggagaggaggaaacagcttttgagcaagcagaaatatgcagatggtgcttttgcagatttcaaacaagagagggtaaggatatgttttgatttcccttcccccaggaggcctctcatcactggtgcccacatgcacttcttcgttgccagccaaactgctgcaggcttcctagtgacttagcttgccagagagctcaataagtcaattaaacatttcgagcttgattatctcccattctgtgctcacccctctccttggtcccttctcctccctccttccctttgactcctcccatggctccccaggggaggtttggggtggtttctatgtatgtctttctgccaagtagctttatctgaagcctagttttacaacaacgctcgctctttcctaaggcagtgtgggctgtctcttggtaccattagcacttctcagccatgtcttggtcttcagtgtttgctacatgaacctaacgtctccaggagtagattttattttatcaagaagttcattaatggcgcaactatgcaacgtttcacctgcctagttgaaactggtttgaaaaccagatgacttagtggcagtgacgatgagcttctgcacagaaatcttctctactcacaagccgtaatgtatttgggtttcaaagactttgcatagtaggcagcgtgccatgatgctgacaaatttgttatataaaaatactcgcctrtatctcccttggtttttaacctgctaatcggctttaaaataaagtatgttagtaaactgcaagaataaattctgacaattgagggagggctcggagtactgatggmtaccactgtattttaccagccttttggtcacttagaagaggtgccaaagatcaaggagaggaaagtggtgggctacaaatgtaaattctgtgtggaagtgcacccaacgctccgagccatctgcaatcacctccgaaagcacgtccagtatggcaatgtcccagctgtgtcagctgctgtgaaggtgagaactggaaggtctggatgagcattgtgtgtgagcgattcgagttacttattaaccccattgcctaaagcagctcaggaaagagcatctcagaatgcgggcattcctgaattatgcttggattggtttggcttgttttgatttctttgcaggttggaccttcctcatctttctgttcagggaaaggtcgagtttcgatctggtttccttccacgcggatagtttggtggcagcagaaggtccaggattctcggtctaggaggcttcgggtcgtccttctattctgcgtttagtgccattagctcttcgttcttccaagttgcccgagctcttgagaggaatcaagtgggttctgttcccatcatcttctgctcctctttcttcctgacttcttactgttctcatctggctgaggatgcagagagcctaggagaatctctttgtcttcttatcctgggtcctctggggactgcaagagacattaaaactaaaagcgttcaagtcgcaattgaccctgaaagccttggtttgtctcctccatcccctctcccatatgatgctgacaagtgtcttcccttttccctctgacttttattaggccacctgttttgaacatcataatcctaatagcagccaccatgtcagtaaccaagccaccatccccgtcttccaggatattgctaagccctattatttattaaaacagaagtcattttggggttctgccctttctctaagggtacacgcgaacatatttttgtcatctgcccttcttgagcttacatcctattttgccaatttaacatgaagataaagtctctacttttcttcactgaagactgaagctttctgtcttttggcagaacagtggcaacccagggatatcagcagtcactttctttcagacaccactgcggtgtgtcccaggctcgtttcctgggatcatgtgagagagacagaagggcttttcctgtgtaatcagtaacccaaggagctatctcgaaaaacaggtgacttaaaactaggctgctccttaattttttgaattgattatgcagcagtctccagtcatagagtgaagtcaccatctacagggtagggggcagacagcgggatcttttgctttgcttcctttccagataatggcccaaggctcctcaatgaccatactactttgcttttctttctcttcctttcttcctctcctttctgtgagccacaaccctagcccaactttatgtcaacttagatggggttgcagtttgaattttcttttaagatggggaagaagtgagtgaagtgtcttcagagtgggagaagcccttgttcacatttcgcaaacagtagcaacctgtgtccgggtatgttgtcctaaaatcacctccactgcatgaagaatggcagttgggcttgctctccctctaggggtagctggagaggcaggggaggaagctttgacaagaagtgctgttgagtttgggagaatgtagggagaaaaagaaagctggaggcaatgatgatggatatttattttgttggtggggcatgtgtgtgtgtgtggttctcttagcaggaggcggatgaccctgcccacttgttcctggatggattggaagcagccaaagacgccagtggcgccctggtgggccgggtggatggtgaacactgcttgcttgatggaatgttggaggatgaaacccggccggggggataccattgcagtcaatgtgacagagtcctgatgtccatgcaggggctgcgttctcatgagaggagccacctggccctggccatgtttacccgcgaggacaagtacagctgccagtattgctcgtttgtttctgctttcaggcacaagtaagtgctattggggggtcactagtggttactgggagatgatgtcatagtggaaggcactaagctaaagcagaagcttggatgagtaagaaggccccactcatggttcacacctgctgctatgttacctggagcctcagtcaccttttctgtaaaatggggctgagaacaggagattgatcggatggcgttagatttggcaaatgcaggcattttaaaaatgagaattggaggaattgctatgatttacccaaaggtaaaatggcatctgtggagagtagatgagtctcctgattcatcgttcaaacrttcagccaaaatctagtcattgtttgaggaagtaaagtccatttagaaaactgagttgctaaagaggtaaaattaggactattaacccatgtgaccaaagaaacattgcttgcaatttttcaaaagatcttgaaaggtaaagaagttcatggatgccaaagagttgcttgacatacagggagattgaggagagggagcttcccattactcatcacagctttgaaagtgtaaatatggaataggtgtgtaaggctttttggggccatggaaagaggggtggttttaagaacaactttttgttgcctttctctttcagccgtgtaaaagagagataaatattcaataatgcgtttggacagtcttggataaaggtgactaagactgacatgctttttaaaacaatttttttaatgaaataaatgatggactatttgcttcttacaaaagataaagggccagttagtggttgttgaacagaagaaggaggtggtgttttcacagaggttaggatgggttgtaaacactttattattatacagagcctaatatctaatctttgtcatcagatccatacattggcataaaacttgaaatacttcaattcaagaagtatttattgaacagcatctatcacattgtctgacgcacagtggaactttaaataattgtgaataaatgaatatatcctgtcctaggtactgtacttttgggaaatataaagacacaggccatggtctgtggccaggggaatttagggtcaagggttggtttatgaaattaaaaaaaaacaaaacaaaacccactgactcakcaaaataaagcacgtctttgaaaatatcagtaaaatactatgatgtgtcaaagaagagaaatgttacatcagctttggaagagtcaggaaggttttatggcataaggagcatttgggtgaagtcttaaagtaggaaaataggacttgaatagtttggaaaggacatatgatgtagaggaaaagctgagggaggagaccatgaagctgactggggccctagctgggggttcagtttgactaatccttaagttacatgtaaaggaatagtgaaagataaggtctaaatactttaaaggagaccatatttggagttttaaatgccaggaaatagtatttcataatttaaattgctggtaaaaggaagagtcaaattagcaaaataattataattgctaacatttattgcatctcactatataccaggcactgtactaagggcctttaaatattacttaatttcattctcaaaactctcctataaggtatggccccattattatcatcttatgaataagaagagtaaagcctagaaaaattaagtaatttgcccaaggacacacagcctatatgtaatggctgagattttatcccaggtagtctgactccatagcgtgtgctcttgagatgaaaaaaaaaaaaaaaaaatccatgggggctgggggacaaggaattaagaagcaataatagtagctagttcaagaagttagggaatgattgaaggaatggatttgcctgacttggaaaaattgacttcatgcgtgggatgagggacaaagtaaaatacaaatggcaactaggttttcagtttactcatctggaagaaaggttagtgccatttatagaaacaaggaaatgaagaagagaatttgttttgtagaaaactctctgatgggtttgtttagaacaggttgagttaaagagaactaaaggacacccagagggagctgtccaggggcaattgaaaatgttgctttggagctcaggacagcattatatgttgaaatggtaagcagtaccgttcccacatgaggcatttagaagggaatttagttctctggagtgctgatacaaattagaacttcccacaccttgtttggtagatttattatttttttaggctaataattattatgaagtactaggggttcgttgtaattaaataactcccttgtaaattgcttctggaagacttacagcaaacatggttgtgtgtatcagaagggatgtgcggccttttgaccacgtggctcctttaaacatgcatgcactgtgcctccatattaatatagaccctggcaacaagacagcccattgcaagaaggtcagccacttcgaaacctcccttcctcactctagtgttcacaatgaaagtagaattagaattcaaaaagaaagtcagctcttttcaaatgctaaatttctctaattcccattctgttatttgaataagttagaggactaattgataggcactctcactggcttggcaggaagcttgaattcacccatattgtaccttctctttagatacactcttccaatgatcagagctctaagaagggacaataaagattcttaccatgacctgttaccactgccatatctctaaatccaaaaaaaactcttgatctcttcctttagcttcctgtcctcttagagtaggtacaactcttgaaaattaattaattaaattgataaatgccattattggaaagtaaacaaaaggactttgaacgacctagaagtaggattcctggaaaaaaagcaatgagcaaatcctctatgcaatttttaattttgtcatttttctttttgttttccttctacatcaagtttggatcgccatatgcaaacccaccacggacaccataaaccattccgatgcaaactctgctccttcaagtcctcctataacagccggctgaaaacacatatactcaaagctcatgctggtgagttgtgcattgatgatgcacaagttctttagcactctctgagtttgaaacctgatgatctttattgagtgaaatactgtcctgccttacacttgagaatgttattcttgggatggatgtatattcagttttatttttacctagtaaagaaaaaataaagaaaaaagtaaaagttaaacaaaatcacctaaatccaaaataatacaaagcctatgtcacccatgttatggttagttcgttcgtcctactgacaagttagaattagactgttggtgatttttacagaaatttctaaactgcctatactttctaattcaattgccaagaattgttatatctattaaaaagactttccagctaaaataaagttaccaacttaaggaagttagaaagggcaaagggaactcaagatgtgtgagatttttcaagagatacccttagatatgtttccgtacataagacagaaatgactttgggttgtgagtgtccagcagctgtgctggtctctatcatattgttgttccatctcattactcattagaaaaaattggaaatgaaagaagaaatacagtcagtcatctataatcttatctgaagaccactgttgttgacgtctgatgtgtcatgacccttacccaccaggctgtgcactaggcgtgttatatgcatcatcttctttagtcctataatcgtcctaaaggggaggcattgtgtcacattccttgtgccttgtataacccttggtcacagtttgaacagtgttgtaagaactgctcagaacctgggtccttcactttcgccagctcctcatgctctgtgtaaacaggaccatgtctcttcattgtcttctgagtgttggattttgttgaactgacttaatgcagtaagattacccaggtctcccagttgcctcaaactccactaggagtaaggaatgggacagggaagttagctataggggcttttctctatctttttgtatttttctgtctctgggaaatttctactaaagtccttgaagtgagtggcttcagggttcaaatcactgttttctaacttgtgtatattgtaaattatccagctgggacactatcctggtgagttttgcccataggccttagccttgtcaaaagcacttttaccagcgagagctgggaagagatgattcggcctgtgggaaagacttgaagagagcatcagagcctgcacactgatgccagcgtattaagctgaagtgtctgctcttggaactgacccaaaaaactggcctccctgtactcactggctggcaggaagagagcatccagtaagagagattgggagcagtgtaattcagttcttgacataccttggaaccttggcctccatgacattgctttgagtgactgagtggggcttggcttggaaaaagccagtaccttttctgaaagactcttgactcatcttgtcttttctagatagattattttattttattttaaagaagaaaaggtaatgtgtgctaacccaaacatctggatttgaattctctctcaggtcgtgcaactcacagccaccagcaatattcacacaaccaagcttgcattaaaagaaaaaaatgaaaaaatagaataaagagggcagtagtattctatatattgtyatatatatattcatccgtggtgagaggaaggcttaattacagaacttggatgctatactcacttcacatgtgaacccatttagtaattttcatggtggcaggaaaataataatctcggaaatgtagggacaaagaatgatcttccaatacctgtttttcttacttttaatccttagaccacacctctgttcattttcactggtccacaaaactttatgattctgttttctcttttttcttctctgagttttaaatgtcaccttaaaaattaattttaaaaatacatgttcattagagaaagtttggaaatgaaagaagaaatacagtcattcataatcttgttatctaaacgccactgttgttaacatttcatatatttcctttcagtcattttctctgtaattatttttaatagttgtaattctaatgcaattgaatatatatatttagcctttgtatttacttttatttttatgttattataaactccaagaatttattttaattgaataaaataaatcatcaataggatatgcccagatttacttaatcttttccttatggttgtaaatttaggttatttcatacctttttcaagcataaatgatgtatatttctaagtaaaactttatatttattaaaggatatcttcttattactctttgaaatggagttactgggttggaaacatgagcatttctaagtctattgttcttaaaagcaaaatggctttctgaattgatcttaccagtgtatatatgtccaacaatttaagcctgcccacttcacactcttagttcttaaaatgtaattaatttaacaggtaatatatggcgaaggtaaatcacactttaacttaatttggtcatggtgatctgtgttgtatttcagtggcataaaattaattttaaaagtagtgcttatttttactgagaggcagtctttattgaagaatattggagataaacacacacactgtaccccctaaacccccatgtttacatatacagctctcttccttagagaaatgacttatttttacccatttctgtgctattgactagataaggaaatggagttctatgctgaggtttatgaactggtccaaaaatatatatatgtgggatgagaatgtgtatagttagcaaggaagtacagaatagaatagcacaacagagcttgcactgaatgactttgtgattaaaaagccactaatagatctttggaataataattaagcatgttattttctgggactgacaaaaaggccaccttgaatgaaacctgacatggtcatttctagtgtagagagggagggaaagggattggaaatttttctaaaggaggtatcatgggcagttgggtttgacttcctattggggaattaattcatagcttcactcctgtaagcagagcccaaaatgaaaaaggaccagttcactagattctggagctcatggaagagtttcaactccaaaggagtactgtggttgtggcaggttgttggtctgtgaggttcgttcatagaacatgaagcttgagatgcgcttctctagcatgagttaactgagttatcttgtttccaccctggccttatacccttctcccctctttttcctgttctatttcttgtcaccatcctcttccaggtgagcatgcctacaagtgttcttggtgctcattctccaccatgacaatcagccagctgaaggaacactccctcaaggtccacggaaaagccctgaccctccccaggccacggatcgtcagtctcctctcctcacactcccaccactcctcccaaaaagctaccccggctgaagaagtggaagactccaatggtaaaaatgggcttccaagctggaattaaccactcagggttgaggtgggctgggattcattgccaatcattttttttagaggaaaatcttatgtgaaaacatgatggttcaagtgaaggaagaaatatgaaaaagttgaaatggtgtggaagttggagtgggaaggggaaatgaacttgttgagcatctgtgtgacgccatgatgaaaatggaattcagtgctcatgggagtgttgctagtggaaagagcctgtcaagtgggatggattagttttggatcgttccactgtggtttcaagcaagaaagcgaatacagtaccaggccaatttgtttgtttttatttatatcctgtcttgttctaaaaatatgtgctgcgaaatgtttggggagacaggtatgtacattaatgacacaaaattcagagtaggagtgcaaagggtgaatgagtggggaagtgtgtctgactgagccacgtgataccttaggggtgacatagggatttcttacagctaaaggatgctaaggaggcatgagttgggaggagagttttactgtttagttttggagtttcagaagaaatacaggaagccagggagagggtctcctcgctagcaatgtgaccaaagctgtaggggagagaaagagtccagaccttagggcctgcagatatggcatagtaagcaaagggatagtttattgtttttataagaccaggaagcagacctgcttgatttctcatctcacctcaaatgattgcagaatcagctgcttagaagagaaggagaggaagtctgcagattcttcgaggtagacctgctctcttccaaccccttctaattcttgaatcccttctgcgggagccagttagctaccatcagcttgagtacttcccaggtcaaggaatgactgtctcccaagatctactgttacattcttgggaggagcttagtggactggaaagaaagcagaacaaaagcttgggtttgaatctcacttctctcgatgatggtcacgtttccctgggcaatcttagcttcttgtagccgtatgtaaaattgtatagtgatatctgcctcaactgattatcttcagagattaatgagaaaagatacgcacctgtaaaatacctaatacagcctctgacacatagtaggaatttaataaaaggccgttttatttctgtacttttcatcctttggttgcaattctggcctttgggaccatttataacaagtacgaattttggttatttttaatgtgtgtgtttaaaacaagagactcttcagataacctgatgatctgacagcccaacttgtcaacatggtctaattctcagattaccaaaagagtaaatgagtaatctttattcatgaggtctgtgagcagacacctgtaggaggaaatgaaatggtaagtcctaagatgaaaagctgctttttaaaaaatttttgaagcttggtggtctttcctttgcaaatcatttatagtgttcaacactatagctccttactggtgtcccggccttaaaggacttctgtttaacaaagaaggcttgttatgatggctacgacttgtaatgaagtgaccacacaatctccttagctactgtgtagtagtttaaaatggggaaggaagcctgtagtgttttttttttctcttctgggaaaattcagagtcacacatctagggctgggtgagagtacctgtggaagggtaaagaaaatgtccccttttcacctgaaatcttctattcaccaggaaaggttggtatattgcaaccagaagggcaaaatctaacttgactcaaattgtaggatctgtattaatgtgatttttaattaattgttttcatctgacatggaagctacatttgtggagctgtttggatgaaacagattcatctcagtgccattgctagcaaaggcttttgctgggacatttttctcaatgtcataccttctttttcctttgtctgtcttccttgaaaggtgggtctcagtcagaggtcaagggaatcctttaaacccacccactgcatgtatcatcatcctctgcatagactgagaagagttgagttcagttatactcttgagcctgtactctcttctgagggctgtactatgcacggaagaatcagaaatgagtatagtatttttctggccctccgacaacttaaaatcaactgtttagatgatactattagcgcttacatttgagctaaccataaccctaagcctcaggcctaatctatttgtggagtgatttcagattcttggaggatggactgtggggaggagtgggtgtcacagaaatatgacaaagtgacgttgagtagctctctctataacatagatattctgtttttgtttagccacagggaaataatttgcaatatataaaagggattcttacttttatccttatgamagaacacagtaactgaaagctctgtgtggtaactatttagtgatccgtacacaaaagtcattgggcctgtactgtttttaatgtatataaatgacctatatcaatggatcagcagtgattaatttgatgacataaaagctgattagatgaggtaaacaaaaagaaggctattcacatgaatgaataattctgtggaaagagtagttaataattgttcattcagtaagtattttcttgaatccttactatagattttgtatagttttgcatggccaagagtggctgggcaggcccaaagtgggaagactttgctaaggagccggatggtggattcctagaaacagctaagtctacaggatggaaaaacagctgtggggctagatagtagcctgtaaattaggccttgaatggtgtttgaaacactcatgtgaaatccaattgcacattttaatagagagaagctgtggggctattggctcacagttaaggtttcccacactgcagatgccaggacaatgtgaacacaccaaccaaaaatgtgttgcaggcctggggggagtcaagatccataaaaccagggaaatcaccagtgtgtctttggctttctgattccgtagtgagggatgtgaataaaacaagttgacatgctcctgttatttgcagtggtcaaatgcttgccgtcttgagagtgagccagtcttctctggcagagggaaacagcctgaaaagggaggttctttctaagctgctctccctcccaacccagaggagggaggaaagtggagaaagcaaaaatgagaaggtagaggggagatttcactccagctgcctggccacacacctgttctgtgcttcagccctgctcttgggctctgagctgtcagtgttgacatgtttcaccagcacacgaatcctctatatattcatgatgatcagttgttggaaagaaaagcaacggctctatggtattggttttgtgtataagataatgggcaatgacatgtaattgctattctaaacaatgcattaagaggaaacaataaggttgtcaacaaagggaaatgctctgctgtgtttgtgtttactgtgttccttctcctgccatatacaacacaggactagcttttatccggctatttccaagtctctgctttcagtacagaaaaatacacatataggcacagctgtaaaataacaaagaaactaggacagcgtagtttagctatgagatttgttttaggtctgagaagctacacaggacatgggcaatggatacgtaacttaaaawtcaactatgtgttttataagaagtcaagccagtggtgacattccatctttttcctccctctagtttctcccggggactaataagttattttgtttcatctatctatgcagttatgctatggaattgcctgctttagaaaatagttactatgatgcatttaggacaaaaacaaaaatcagaccaggtgcaaaatgaataaggtgaatgatggtaacatagttttgttttgcgcgcgbktgtgtgtgtgtgtgtgtgtgtgtgtgtgtgtgtttgctggtgccttagttagcaacccagagaaaacagaaagaacacttggttgtgatacccctccatttataatatagaacttgatatagtcctcccaaaagagaagtctgtgatattgtgaattaatagaaaaatgttgcaaggagcttggcartttccttttgtaccgatttttaaataaatttcaattggtttttctgctctaaactctagaataatatttgacaaacactatttttatcaagacatttctcatcaaggaaccacatgtacttattgtctgtcatatcaaagtcttcagcattgcatccaaagttcaccatttagtcatgctttctccattgcacagtggcttcactagcaaatactgacattcctaccatctctctacttactaccctaagcatttaatgtcttcctttgtacttctactcactttcagtaagctctgctgggaggttaggtggatttctttcctgtctgcttctctctactagtccatgactttcacttcctttaaggattgattttcactggccccaaactactcttattactcttcctggtgctgtattagtacttgcagatatgctatttttttctgtcccctaattttccaatatggacagttaggtaagtacttattaaatacttattcttttcatggaccagtggtatcttggaggcatcagttttcagttctgttaattgtactgggtcctcaaatacattttaactccactaaccaaattacacaggctgagtttatttcatttccatttaagaggcagatcaaaagacaatctgaagatgaaaccttagggaatgctctaacattaattctctgacacaattactctgccaagataaaaaaatcttccttgacaaagagcgttttaaatattgtcattgttccctgcatgatgagacctcctgtataggtgggaagctgaaggttgagacagggtataaacccttctgtccctcagaatgatatagaaagtatgatggagctggagaaatgaacatttctagtatggtcagctgttagcagagttgcttcttggagcaagtgcgcacaattattgatcttagagtgggctaatttgttctctgtgtctctgtcaatatacagtgtttggttgcagttaaattcagattcaaagatgatatagcgataaactgaccaacaaaacttgtcaatgagtagagctttctattctacctgaaaacttttcccatcagacttttaaaacaatatattggttagaagaagagactcatttggtgagactcagtttttctaaacattagagattggcaaactttttcctttaaaaaaatttaaattgacacataataattacacatttgtagcatacagtgtgataatttgatacatgcatatgatgtgtaatgattaaattagggtcactagcatttccatcacctcaaacatttatcatttctttgtgttggaaacattcaaagtctgctctttaaactgttagtaaatatacaatcagttgttgtttattctagttatcttaagatgctgtaaaattctagaacttgtttctcctatccagctataattgtgtatctatttaccaccctaatgcccttcccagtctctagtaatcactattctacttgctacttctatgagatcaacttttctagcttctacataggacataagaatgtacagtatttgtctttctgtgccggcttattggcaatttttttctataaaaagggccagacagaaaatattttcagcactgtaggttatgcagtctctgtcacaactacttaattctgccattgtaacgtgaaagtagccatagacaatatgtaaacaaacgacatggctgtgttccaataaaactttatgtacaaaaacaaaggaaaggcccatgaatgatacttcactaacccatgccatagatgagatgattggggggaataattacagcaatacccatgagattaatccagtctttaataaatgtcattctgagcctttatatttaacatatggaatactcctagatgtcacttaaaaatgtaacttgacctaaatatattattagattcatatatgaaatgtaaggtatcagatgaagttttaaaaatatttgtgcatgaattacatttaagcttaaaaggaaacccttctctaagaattatgttgagtctatcaactcatttaaccttggctgcagcaatgcttgacaactaaaaaattaagatctgggatgctttatttttgaagagaagcttttcagatatctaaataggtcagacataaaattcagcctttaagaggatccagttagttgctagggcatcagcccttccacacaggttccaattgcaatcagattaaaagaaaaaatgaggtggtttctttaaaaacgacaatcatgaaatggagactcccaagtgaataattaattgtaaaatacaaaaatttacatcgtttatagcacatgcgatgtaagacataattttaatggcttgactataatttttaataggttctgctggtctcaaaattatctgaccagatactaactaaccttctctttttgacatcagaatttctccatcaaaatgtggcctaaagttcattttaacacttactatgtttctatatttctactgtaaagacttaagaggtctgcaacttcagtggagcaaagtggcattgaagaccccgaatcttctgttattacctggaaatctacagggattaaatgttaagactctgcctcagtggcaaagagcaaccctccaatattatcaccactctgaactcaaaggtcacgtgatacacgcttcccaagataccaacctgcctgggatttctgtgactttgaattagccatagttttgtggctgctatcatcctttgtgccagagatgaaaacatttcaagtataggctttccatgtcctgggaacttagtcaactaattcatctccctgttcccatgccaacaaaaacattgttcatcagaaatgtaaccatatactactaaacttattcagaactagttcccagcaacactggagtttgcttcataattccacatctgactttcaaatctctgggtgaactgcttggagattacttcaagtcttccagacctcatttgtggaaagtatctaaaagagaagaaatctactttattctttagcagaaaaatatgtcagtcattagctgaatcatctaaagcaattaatctcagttattttttaaaagaaagaatttttccttgtcttctcattgcccacttcaaattttctgtccctggagctgaagctagtattttagcccaattttacttgagataaaaatccctcaaactgtcttgagacttcttatgactcataggtctctccagtctttctgttctgtgtgagaggattttacataggcagaaggaagggtatttgagttgggagaagtcacaagagtgagccatgatttagaggtagaaatcctgcaacagccttgctagagtcgagggtatgtcctcggaaagatgggtatgtaaaaaaataatttttttaaaagtgtgaagagccccggtgttgtggctcgtgcctgtaatcccaacactttgggaggctgaggcaagaggatctcttgaggccaggagttcaagaccagcgtgggcaacatagcaagatcccatctctacaaaaatataaaaataaaataaaataaaagtgggaggtgagaataagatgccagaaataactttttagctacaattatttttttgaaaaaataaattacatacattctgattgtatgtcccaggaaagcatgtccaaatgttgtacacatatttttgttaacatgttttgttaaccgtaaataacaaccaacagaaaaatcccagtggtggtgattaaacaaaaatggtgaaatagcaaatggccaaaagtgacatgaggggcaagtatacagctgggagaatctgcttgctctctgctggattcagtccgtttctgtttaggctcaggaaatgatatgttcctgccattggggctcttccactttgcaaacagtttccgagtcgtcaagttcaacccaaaggaagtgtttggctgagaatttagggcccagctaaagtttcatttcccagcacactgcttgtggagaagtcattccaaggctaggttcttcagcttccatggggacacaaaacattcttagatgactcgcacaggtcactcactctcttatgtcatcttttattttgatgcactgtgagtcctccaccagagctgctatgatagccacatcgaagagatgcaggaccttctaaactcttaacctatgtgttgatttttagcactgctagttatttttttcccctttggccagtttgaaagtcatccattctggtttacataacggttctgcatgtctctttgttcaattcccaagtgatgaaaaataattcttattttttaaaattctaccaattgccttaaatatgtcatctgctttaatatgtctaatgcattggaggtataaatgattaatctcatttgaaagagaagggcacgaggagtgaaatggtgagtcagacatcacaaagcatgtacgtggtagagctgtttcattcacaggtttgtccaattccagagcctgtgcccttgaactttgtgcctcagtggggtctagtagcaaaaacacatacccaagaaatgatccagagtggtgaagccttggctgcttatatgtctgtgggctctggaatcttctacaggaaatgaaagacaagtgtttattacttattgatatttggagcttaagttaacagatgtacagataatattaagttaaaagaccagaatagaataaagtgagaaattgtatatctgcatttgaatggctataactttggataggagaaggaattgagtcatgtagggcttcatggaagaggcagtactcaagctggacttgaagggtgagtggatgtatgcaggtggatggaaggagtatcagacatgagcagagatacaggagaaaggatcctgggactgcaaaaatccagtgtggctggagcaaaggatgtgtggtgaggttagtggaagggtaattagtgaaggaaggagaggtagagccagacgacaggagtacttaacactgggaagaggactttggatttattaagaaacagactcaatggggaagactagcagcaagattccttcctctctggaagtgccagggtacatttgagctataagtgcattcagctagcatcaataggtcttcaacaaggaatgtgcaatgaaatcagtcatgggtagtagtcaccttcttttgagatggctgcatagaatttttaccttctgatgacaaaagtaataccaactcgtgactaacgaacagctttatggcaatacataataaaatgtaagggtcacccatcatgccagcctctccctacccagaataatctctattcacagtttgttgaagtcatctagatatttgttctatgagtatacaaacataggttgtcatttagtttagttttttttttttcttcaaaactgaaccgtactacacaaactatttttctttcatgtgtttttgctctcactatataggttccatcaccacatgacttactatagctttgaaatataaggattcatatcgcaaaaataattccttttcaaataataaatattgagtacttaaaggtttcaaatatatttttatgtataataaattatatgtatattatatttaaggtgggattctcagagttatagaaggcctttgagattttgccaatcaaaaattcattaattttatcttaaggctcactcacctcctcaaaaattactcaagtagagtctgtttccccactacttacttgagacttaatacatttacagtattggtgaacagttcttaaaagacaaaaatcaagattacagactgcctagactgttcagagtaatgggctagaaataagactttgtgaaaggataaatacaaaataagttgggtagctgatgacccttggcatttatttccattcctggacttgccaaatattcttataattattagctaccttacctgtgtctccagctaaactgtgtgctctccgaggtcagggaccatttcctattcatttctagagccctagcactgggtaggccattcaatagatatttcttaaattgttttgaattaggacagcaaaagcaaccgcacacaaggaaagccaagagaacaatttatgtgtgaacaagcctgggaatctggaaaaagccaatggaatctggctgtgtgtatagcaagatgtgccatcccatgttactgcacttttcatgcatcattcccttgtccttgagttaactaacttctcccttcctcccaccccagtggcaacaccatagccctttcaactttctgcaaatgaagcaactaattcctttttttccaagcagccacggagacaagtgggtaccttccttactttctgccacctcttcagagtacttctacttcctttgtttaatgatcctttttcaaatgcctgcttcctgcttattttcttcctctcttttggagtattcttttgtcttcctctatgaactcagtgactggctcacagccttgctttccaatccaaatgtaatcttcatgctctggaattacaatagactagactcaatggtaataactcaacagacacttcagtcgcctaagctagggaaatttgtctccttcctgactgtcctccagctgcccacctgtggccaaattcaccataacagctccgtctccagcacctcaaatttgcctttactctgaccactgtgggtggatctccttccccatccaacctagacctgaccagagggttagccgtttcaaaggggctttctccagcatcctggtttctctcgtcccctcgtcctctggtttccaacttaccagactccaaccctgaataaccttcactcctgcccttcctctgatgttagccagtctttctgattctaacctccatcttttccaatctgttttccaggatatctttgttaatcacaaatcaaatttacttttcaaaataaatttgagctgagtcagacttatccctatgtaatgtcagtttacacctaagtatttcaaggtattttcttaagtgaaagagacaggaatagagccacaaccaatgtgctagaagttgcaaatagctgcagtctatcttacttgtcccaaactaaatggagtgagcagctgtgtggttagtagctgtggcaatcacaaattattgtccttgtgagttgtgattttattgttactctgattttatagtattttaaaattttgcccatgggtaagtttttaattagggatacagagaaggaaagatgaggaaattcacatctaccttgcatgtaagcaagagtaatgccatcaatatgtctattagaagaaacataataattgtcataactaaaccacaggcagrcagtgaagtgtaagtgcagttccctattagcacattaaaattgatcagttctgtgtgttgttctgtggacaataaaataagatcatttttgctaatatggttacagtatactgttgcatcttagctatgttatctccataacggaagtctggaaaacaataactctttaaaaaattaagttcaggccaggcgtggtggctcgcacctgtaatctcagcactttgggaggccaaggcaggcggattgcctgaagtcaggagttcaagaccagcctggccaacatagtgaaaccccatctctactaaaaatacaaaaattagccaggcttggtggcgagcgcctgtaattccagccactccggaggctgaggtgggagaattgcttgaacccaggagacagaggttgcagtgagccgagatcacaccactgcactccagcctgggcaacagagtgaaactccatctcaaaaaaaaaaaaatttaagttcaaggtttaagtaaaatattgataagatttgctttttctgttttaaaatgaaagctttttagttactttttgaatagcttcattattatgtgcctctacccctataacttaacaaaaaggtacatagtacttttcactgtacttctttctcttctgattttttggggtattttctaaatcacggcatgcctaggagagaacgttgagtaaatagatatcatccactatgtgttgccaagagcagaataagagttggagaacttgaggtcggagaagtaattctgtgcaagtgtaggtttaagatttatttatttatttattatctttttccaaattgagagaaagcaaaaaacaagggtaagaaagaagctttcaaaactatactgtgctgcacacgttggtggttgtttttatattaattatcataatcccaatgaacagaggtgactctactgggactggccatataaagccactgttaataaagtactgagagcagcccagccgcacagcactagcccaggcagagcagctttcactgtgctcctgggcttcctgtatccaaaaggggaaggagggttgttgacagcaacggatctgcaacatttgagggtaccataagcctgtccaagttccaccccaggccttcttgcttgcctcagccccaatccggcactctcaccctggggaagcatccagatgttccatggaacctcttctccaagtcataacagtgttgtgtttttttttttttttccagtggaattttggagtcgcggtgctgtagcggcatcaagtgtgactctttcggtgtattgctgggctcattttgattgagcacataccaggagggattgttttcacccaactggagctagtgaacattaggggcaaatgatctttttgaacccacttctccgtatagatcatctttacttaatggtgtacagatcacacgggagatgctggaaccatgagtttgagatttggcttgaaagctgctgcaggctcaagtccaggaagtaccattcacattgttgttaatgaaatgtacagccttaggtagaggtcctgtctagctccctatcacacatgcatgtccttagttaaagcatttaccctctctgagccttggagtttctaatatgcaaaataatgatgccgactttatggggttatttcaaggatcaaatgagataacacaatggaagtactttcatattctaaattactgtagaaatagtagctattattaaaatactatagtagaagcaaatttgttttcaatttatgatcctttttaatcaaccatagaatgggtttaagtaaaaaaggaaaaaatttcacatctagcctcaagctgaatgaagtttccttacatcatgagctttcttggaagcctaagacagttcagtgtttggaaggtggtgcttaatctggagccttgttgatataaatttatctgaacttcagggcttggttggaaccacccaaataagaaactccttagcacttgatactctaatgggctagtggaatgcattgatgagtcccagtgttagacatcattactataattattactgacattaatcgatgatcatttttaattaatgataactatcacttattgcatatctactgattgagtactttgtaaacattgtttcattttatttaagccatacaacaatcccatgagacaggaacctccatgactagctccttgctgtttaggaaggaggaaaataggcttaagcaagttaagtggtgtgccctgggtcatagttaaatccagcagagttgaggttagggggcacatcagcctgactccaaagtctgtttactgtgccactgcttccctaagcctcagttcttagatgtactgtttttccccaggcaaatcttaaaaaggttatacatgaaccccaggaaagtgctctgtgtttgaaatattaaaaccattcttggatgtgaccttctgcgatcttatcttccaaatctcttggaaggaaaaaaccaataatcccaacttctactttctcaccactcactctttgcttttcgtaaactgctagactcagtgttctgccttcagcattttattgaaaccactttcatgaagtgatctaatacgggctaactgcagtggcattttctctgggaaggagtcattccttcttgctgtttacacctgctgcctccttggctccccctccctctctctggaattccttgcagcatgaccttgatccctatgactataatgaaatagctttcacaaggatcatcagtgacttcagacaaacaaggtcacggcctctgctcttgcctcatccttctttttttgtctgtggcatttaaaactgctgaccttcctcctggggaaattctcttcccttggttttggtcttgctatgtgtttcaggctctcctccagcctctctgatcatgccttccctttaccttgtttttgccatgtttctcctgctccccttacatgtacttggttctcgtcctcagttctctttgcactctctctctctctttacagatatatgaagtcaacttgccctcttctgatgccaccaatacttccagtgctaacctctcatgttaagtctgagaccctctgttctaactgctccctaccttctccacctgcgggtctcattcaaccttcatttcaaaggttctaaaatggaactcattaatttcctactaaacttgtccctttgccagagcccttgggacctagctaatatcctctgccactccaggtcttgttggacccacgttccatcaaccagtcatttgttgtctgcttagtcctgatgtttatattgccttaattcttctcacatccatctccctccttcccatcctcatctcttacctaagccattaattaccatgtttatcccacctgcaaagtcctccattcattctattctaagcaaggttaagagttcaaatcatcctcctattcagaagtctttaacagctctgcatggcctgtgtattagtccgttttcacattgctataaagaactacctgagactgcgtaatttataaagaaaagaggtttaattgactcacggttctacatggctagggaggcctcaggaaacttataatcaaggtggaaggcaaagggggagcaaggcacatcttatatggtggcaggagagagaaagagagtgagggggggatgtgccatacttctaaaccatcagatcttgtgataactcacttactgtcacaagaatagcatggaggaaactgtccccatgatccagtcacctcccacaaggtcccttccttgacacgtggggattacaattagagatgagatttgggtggggacacagaaccaaaccatatcagcctgtttaaaagaggaaaaaaaaaaaaaactcagtcaatattctccatgtttatacccagccttttctctttccatcagctgcctcattctccctatattctagcctaactggaatgagcatctctctcctcatccttttgcctttgttcatgttatgtcccctttccttcatctccacatgcccaggtactacctgtctttcaaagccacttgcaaattccttcatttctgtgatgcaacagtgatctcccgagatgtgagtcaactcttcctctgaaatccctcaatgctgtgccctacctctcttaagaacatgtagttcagtctactgacyccataatattaccaggagggagctctttaggagcagggtttttgttatttttttattctgaacaatgaatataaggctgcttccttcctagagtagatgtcctgtaaatgtaaaatgaaaatttgttgtgtcctgtaaatagtcatggtagtaaagtagtaaatcaagatttgaatgcttttctgactccagagccccactgtcttctggccacgctactaacaacagataatggactcatgggcatttgtttgattgtttgagcactcactcatcttagtgtgtgttgctgtaatctcccctaacaacctgagagctcttgaaatatgagatctgattatctttgtatctatcaggtatctaacatacaggaataccttggagatgttgcgggtttggttccagaccacctcagtaaagcaaatattgcaatataaaagtcatacaaatcttttggtttcccagtacacataaaagtcatgtttacactatactgtagtttactaagtatacaatagcattatgtctaaaaaatgtacatatcttaattaaaaaatgatttattgctaaaaaatgctaatgattatctgagctttcagtgactcataatctctttgctaatgaaggatgtttgccttgatgttggtggctgctgactgatcagggtggtggttgctgaggattgggagtagctgtgtcagtttcttaaagtaaaacaacaatgaagtttgccacattgattgactcttcctttcacaaaagttttatctgcagcatgcagtgctgttgcagtgctatttgatagcattttacccacagtagaacttccttcaaaattagagtcaatattctcaaaccctgccactactttatcagctaagtttatgaaatatgctaaatcctttgttgtcatttcaacagtgttcgcaacatcttcatcaaaagtagtcttcacctcaagaaaccactttctttgttcctctataaaaagcaactccttatctttgcaagttttatcatgagattttatcatgagaatcagtcacctctccaggctctacttctaattctggttctcttggtgtttgtaccacacctgcagttacttccttcaccacagtcttaaacccctcaaagtcatccatgagagttggaatcaacttcttcgacactcctgctaatgttgatattttgacgtcctcccatgaatcacagatgttcttaatgtcatctagaatggtgattcctttcgaaaagtgttttattttactttgcctaagtcagaagaattcatcggaagaatcactatctatggcaactgaatccttattacctgtatttcttaaatagtaactcttgaaatggaaattactccttgatccatgggctacagagtggatattgtgttagcaggcatgaaaacaacattaatctccttgtatatcttcatcagagctctagggtgatgaagttcattgccaatgagtagtaacattttgaaaggaatcttttttatctgagtwgtaagtcccaacagtgagcttcaaatatttagtaaaccatgctgtaaacagatgtgctatcatccaggctttgttgttccatttatagagcacagagtacaattagcataattttaaaggattttttgaatgggaaaagcactgctgtcaacataaagtcaccagctgcattagtctgtaccaagagtgtcagcctgtccttcggagctttgaagccagttattaacttccccttagctgtgaaagtcctagatggaatcttcttccaataaaagtctgtggggcctacattgaaaatctgttgcttagtggagccagcttcatcccttctcttagctatatcttctggataatctgctgcagcttctacgtcagcacttgctgcttcaccttgcacttttctgctttgaagacagcttcttttctgaaaccttataaaccaacctctgctagcttcagacatttcttctccagctctgtcacctctcttagccttcatagaattgaagataatgagggccttgctttggattaggctttggcttaagagaatgtcgtggctgatttgatcttctatccaggctactacaactttctccataatcagcaataaggatgttttgttttcttattattcatgtgttcactggagtagcacttttaattttcctcaagaacttttcctttgcattcacaacttgactaactgtttggcacaagaggcctggttttcatcgtgtctcagctttcagcatgccttcctcactaagcttaatcattcctagcttttgatttaaggcgagagacgtgtgactttttctttcacttgaacacttagaggccattctactagggttagtcattggcctaatttcaatattgtcgtggctcagggaatagggaggtccaaggagagggaagcagatgggggaaatggctggtcggtagagcagtcagaacacacacatttattgattaagtttgcatcttacataggcatggttcatgacaccacaaaacagttaaaatattaacatcaaagatcacacatcaccgtaacagaaattataataacatttgaaatattacagaatattgcatgacacggacacaggaaatgagtacctgttgctggaaaaatggtgtcaatagacttattcaagttaaaccttcaacttggaaaaaatgtaatattttgtagtgcaataaagcatatgcctgtatagtacatataatatatatcatgagtaatccaaccatttataaaaagctaagacatccagaagaatattgcatcactttgcaaaataatattttgatcacagtgttgtctaaatgaatctaagaaatatgtattaagcgtctgagttgacaaatggatgttaaaactaagagtaaaatgcagatctagaaatattttggatgttgctgagagtgtgtattcaggaaatagagcaaagggtggctgatgattacacactgtggtttgcagcacatggataaagcacttggtcacctgttctacattattattaatttttgcacatgaagggttggtagggagcagagaaggtagcctactaagttcctttctttccttcccataggtagagccatagtccatttgagatgtgaatgtactgagttcaatagaaacagttagatgaacagttcagatgaacaattctaacctgctagtaaaatcccgagaagaaaagatggtgttttctacttaacaaaacaaaatgtggaatcgtggggtgctgatgatattccatcatcactagggaatgtgctgccagttggtttttctcacagtgggaatgcatttctaccaagcctcctttcccatctgagaggtcaggactgtgggtacaatttacagacacagtaaaggtaaaactgggaggccactatctcacctgctccctgcttaaagcccttccgtggctgtctacgttgccttcagaataaattctgagcttagcatggaaagctgttcattgggccctgcatttctcactgggatcattcctcaccacttcttcccttgcactgtagctacactgaataccctgtctttaaaagggtcctactatctcacactttagcccttgctattccttcttcctggaatccctttctccacttattttctcttcaaattattttgtagatctatagtgggaagaaagcacctctcagcacagagcctaagatttctcaaaatgagtagtaagcaaacacccctaaagagtaacccatacttagctgtgccagaagttcctaaggaagctgagatgcccttatcaatcatgaaataaaatccaaacatccatgcacactaagaaattcgcgataacattcctcgtgggtagcagggagaaccagacagtcaaccaayacatccactgtagatgacgtggcaagaagtgctatcaagagaaagaaagccatggtgaagggtagaaaggatgggagttggagtgtcaggtaaggtggttggggagggcatcattgatgacaggaatgattgaggccaagcctatcaattggatgccaagaaccttgctcaaagctgcaggtaatcttgaagaatattgaaaaggaaatagaccccagaatcattgccaggaaagcctgtccagtttgggaattgaatttgccctgagatgactttttgaagcaagttgatttgtgaccattccatgtgcattgttaactaayaaaataggagtgaatcattctgtctgtggtattactcaggttgagccctgcctttgagctgaatccaagtcccacaatcaatcccctccccactcagccatctccccctacaaaatcactggacaagttgctgccataagtagcagtgcatttggctgtgccagaactggtcagtcaaaaagtagcctccaagcagctactatgtgcctagagctgggatgaatactacatattttacagctgtgtcagagatccctgttccacttgattctgcagtccagtaaaggagtccaaatgcttccatccatagaacacactccataaacacttacttggtgcagaattgatataatgcagacttcattgctgtggaactgaggcccttggaagcactcactatgtgccagtcactggacttcacacattggtcttatataatctccagagcaccctatgaagttgccaatgttatcttctccacttgacaaatgaggacacagaggtgtgttgggttaaaagttgctgcagacctagaaggaggctcctcaacatactctgggagctgaaaagttgtctgttttccagttgttgctgggttttgccatctatataatgggaagtaataattctcataaggtcatggtgaagggcaacaagagactttacaaaaaacatctgacacagatgctagacagagctggctaagacagtgaaaggtgaacctggatctcactacctgatccctccagcttcttggaaatttaataccctacacctgaatccagcatcactgggcagcatttctgtggggtgagtttggagtgggtggaggagctatcctaagggaacaacctactgctttaayggtgattaaaaatatagcttaacctagagcgaggattttcttacactgcatggaaataggtgaaaataaaagaaaaaaagggttaagaaacccactgggtttgttggctcagagactcccgctcggggacaattttagaagagctctgtgctttgaaatgtggctgctcattcttgttcttgatcaaccatagcctttctcacctgatttccgtgtagcatcacttagagctctacgtgtatctaaatatatatatgcttatacccagatgtgctctttcctcttgattatcgaatcttttaagaaatctccacagttgttccctccgggctctcacagcactgttcatagcaagccatcaattgtgaccaactccttgaagtcagtaggcatcttccctccagtcaggtcttgaggaggaagcactgtggccttgcccacggcctgtgagctctaaataccatctgaggttgctcacaagctctctacggttgaggccaagtcatttatataaagaggcttttgtgctcaacactttttgttggattttttcagtgtggtaaagacatctatatgatctaaacgaacagcaggaaaccttacttcctcatcacacaattcaaaagagtcacaggtgaattatgcaytcggtattgtgagagcttctcaattaacaatggcagatgccacccagagtttcctccaaaaaacattagaaaaaggatccttcaccacacattcatttccctacaagtttcctgcctgtttcaaggagggtttttaagaacacacactttgaattacaaatatcatttaatgaagaaggaatagctacagtggcagaaaaaacaaacacacacatttttgggactgggcattcaggatccccaagttatgcttctgtttcttcattggttacctgggcaacataaacccatatctgcttttctgagccactacaagtctttaggcaaaatggatagtctgtatgctacatatctgggatgagtgcatttctaatggaggaaaataggtaaaacagtgtatacagkgaaaatatagttctaaacacctgaaggtaatccatgaataccttctcacagattgcaaagggctctatttgtatggtctcaggtgttgattgtttatcaaaaagctatgatgtatttaaatacatggtacccattacacctgagcatctcacaaacatcgatgcctactgatgggtgaaaaaaatgagggatagagagctgcatactgaataatctcaagtggcttccagatgtgctgatagcatgtgttttgagttttggcttatagctgatttaggggcaagactagaaattaatgcctttggtttcttgagacagccatggattctgaattacattgcattcaagttcttaaatgttcagaagccattgtccgtgtaattaaaaaagacccaggcttatttcagcaaacatggttcagtgtttcagtgggaagactcttaaacctcagtatccaaagagagagtagcatttggtcagttgcattttctttttaaatctgggttttccagaacagtattttcagtttgtactctttttttttttggatgtttgtagcatgtttgttgagcacttgctttaggccagccactggactaagttctggggtacatcgacttaaaacaattatagatagatggatggatgcacacatggatacatgaatggatagatggatggatggcctaatttcaaagagatcatagtctggtaggggtaaaataaattaaccttaatacagcatgatatgtagtagtaggggagtctaaggggggaatttaatatgtgtatctagaagggtcaaggaaaatcttcgtggtgatggcagatttggactgagttcagttttgaaagatgagtaagagtttgtcagactgaaaagtataagaaggatattgcaagaatatacaacaatgcagggggaaaaggcataaaaagtgaatattagaagccttgtatgtgactggcattaagcacagcatggaaacagtgtgggcaagggagtgaggatcggcctggaaagatgaaggagagtgtgagccccatggttcagagtttgggcttttttctgtaagaaagtgagtgtcatgatcacatttgcattttagaaaagaaaggaatcatagggggagaagaaactggaaaatggaatgccagttaggaacatgttgcagtagaagttcacacagcaaccacgagggcctgaacaaaagccatggcagtgggctagtgagtggatcacagagatagagtttctcaggaggctgaaccaacagagcttttgactcattgaatgtgtggaatgaaagagagaaatgaatcaaggatttattctgatttcattgactgggtgaatgaatggtgatgtcattgacaaaaaatatagaaagacaaatgaatatgttcccaagtatacgatctagtgaattgaaaagtccaggaatcctccttggcctcaggtcagacctgcctggattcctcaaaaatataaagaaaaaacatgaggcttcacacaaaataaggtctttgagaaaccttttcagtgaatgtaagtatgatgggaaactagatctcaaaaaagagaaagcttgcccattttttgccatgtttgtatcattttgcaggctaatattttgttttgttttgttttctcaatctattccctgatcatatttcaaggttttgtttttactcatcagaatgacaggaagttttcagtgtgtgtttccttcaagtttggcctcaaccttattttcaggattaggcgtttgtttttccgtttgcctccatgacaacggagtccagaattcctatatatagtcatccagcatccattgtccccctggccattgtatcataatcttgtgcgtccaggccagagagctccactgatgacagtagacaaggaggtgccagagtccttggcctggagattttcaaggcrtaatcaaaagaaggaaataaaataatgtgactgcctttagaggcgtatgttcccccttagacactatggaatggaaatggtttgtattctaaagcttagtttcgaatataattttcttttggaatagcccatagataaagaacatttttgaggctcttcagaggaaatacttggaaagttgcattggtgatttgtggtttttattgtttctctggataccaaattctgctcagtgttaacagcacttgagaaacaggtattttgagaatgggaattaaatcaaggtacaaaggaattcggatagaaccgagaacaattttttaaatcagcagacttcttgagtctgagaatcatcttgatagctctgtgttacacactgttttaataacttaaaacaatatatatgtatctggacttaacaaagttgtccacaagtttaatccaggaaacattttcttaagtacctttccaggcacttctaagcaattgagatacatcagcgaaaaagacagcatgaacccttgctcctgtggagctgacattacctgcttggttgtcatttcagattgacaggaacaatgccttgtgtgcctgtatagcacggctgtccacaaattcaatctaatggatattttcttaagtaccatcattaagtatttatggtgataattaaagtttatgaagtttgtaaggaacctaacagatgatcttgtctaaaggcacctaaaaaaattactgcagtaaaaaccatataacatgggaatttaccctcttaacaaatttctaagtatataggatagtattgttaactgtatacacattgttatacagcagatctctagaactctttcatcttacacgactgaaactctatatccatagaacaacaactctccacttccttctacccacagcccctggcaaccaccattctactgtctgtctgtatgggtttgactgctctaggtgcctcatggaagtggcatcgtgcagtatttgtccctctgtgactggctttagcatataacaagatttccttcttttttaaggctaaataatattcgtgtgtgtgtgtgtgtgtgtgtgtgtgtgtgtgttatacaccacattttctctcattcacatgttgatgaacacttaggttgcttctacctcctggctattgtaactaatgctgtagtgaacatgggagtacatatctcttcaagatcttaatttcagttcttttggataaatatccagtagtgggattgcttgatcatacgatagttctgtttttaattttttgaggaaattctatgctattttccgtgagactgtaccattttgcattccaaacagcagcacacaagggttccagtttctccacagccttgccagcacttaytttctttttttgataatcaccatcctaactagggaatccttttcaaaatgccttaagcattttaatttcatttaaaatgtaaatacatgtattcaccagtattgtgatacagggtaaagcctatgtatttgaatctcgttcctttgattgaagttccctgttttctcccttgtgtaaaccacactcacctacactgcgttgtgtgttacttccagtttccatttctttgaagtggaatgagaacttagacatttgtgaaacagtcttagagcagagtccttctagatttttatgttctcaatcttttatagttggtcttgccaaaatgtaacttaacagtaatttttttttagcaacttgactttatcaagtcttttcaaagcattcaacatagctttcatagaaataacacttttatacctatattttatcttatagaatattaattaaattgaatgagctcagtagcaaatataactggtacaaaaaagttttaggagcaaatgaaactgatgattcttgttagcattaggtccagtgctagaagcagaaatggatggacctgctaaaggatggtgtacagcatcagcctagataccactgttgccatggttcttctttggttagaatgttttaaggtcagagacattgatctagccaagtttgcttaaggaggacttgtaaatgtaatatgaggtataatgagatcagggcaagaatcacaatgtgtatgtattggcaaagcatagaggaaagcaaagagttctgttcggattgctgggaaaaatcttcacagagggtgtgacatttcagctgagttttgaaggatgggtaagaatttgccagggaaaaagaagagaaagcacactggtggcgttgattaaggatccccaaggatgcaatacgtagaatttgcaagaaattggaagctagctggaagtgaggctggagacatgggctgagacgagactgaagagctttactcttgagcaatagggcacactcatatcataatcatatatgagtaatgwtatgtatgctggctgaactggaattgatcttagaagaagaaacaccaggtaggagacttcaagagttgcccatatgtaataggaggacctcaatgaacaaggggtagggaaggcaggactgaggaggaaaatgaatggaggcaggtcatgaggcatgtctctgatgcgttatacctgtttaaatgtgctgccacagggaagggagaaatctgaacctttgaaggaagaatctcacaatttgagctcaaacaaagtggtgggccatttaccaacattcagaacgcagaaggagatgtttagggaaagatggtgtcagttctcaatgtggtgagtttcaggagtccatcagacacaaagcttgaatagtctttcagctttagatgaagactcagatgatcacaaagctcattaggtttcccattgcagarttctgtttctggtcwctacagattcctggatcactgtcgcatacatgaaaatactgaaactatttttgtcctttgcctaagtttattagcagttgtataatagaagttgcatggcatcccaaaagtttcctggctattaaataaagtacatttttagctgccctcttacctttgtttgtgtacctttctcaaattttcttcactagaaataatggtctatacgtctagcttatttgggttctccctcaacctcctcactttgggcatttacaatatcttaagttatccacagataatattctgtttctaatggcccatgctaccaaccattagttgctaaatagtctgcttttcagaagaaaattacaatccatgtattattttgaacttcctatgctattttagaacttggcgattttaaattgtcccttacacaacctaccccaccctctgatgtacatgtttttctgttcagactcatcatttctttaccctagggaaattaagtcattttttttcattgtgataataatgtagttgttgaatttctgtttagtttctccaaaatgtacgacttaaggtggaggtgtagtgagttgaacgtttaggtagctgcgtgtctagtgttgatttcattaattagcacactaattaatactagttatatttattaatggacactcatagttctcttgacatcccctctccatctctctcactcccacattctgtgaggcacaaagtgctgctgatttttccttccttcccctgcctgtttataaatacctctattaaaacattttgtttgcattgtatcacgatcaattatttacatctttgtctgagaaagtgagttgcttgaggtcaaggctcaagtcttactgtcccagaacagggtctcctatttacttaaatgctcagtaaatatttgctgaatgaatgggtgtaattgaatcatttgccccttggccacctctaaaatttgcttgcctaaaattccttgtcttttattttttcttggtacttgattcacactgaccaacaagcctgtcttccaagtctgcacaaaaatctagctcaaatataattaaatgtactcgctggcaccaaggtacttctgttccctttcaccttcactcatattctctatgcagggctgcagaaaattgagaattgatcctctggtatagcttcctctttgtatcacttagagcatgcaagggggctgtcctctgcggctcctacaatttgctgcccaattgactcttattcttccttgtgtcttccttaaacttacaatagctgaactctcctgttactgttcatttgttctctttgcctcttttattccttcaatcagtggagtaagtttactagacatggagaggcctgtattttcataagtcaactgctcaactgtctcccctaataaatatgagtttctagaaggcatctctcatgtcttctttgactttggatccccagagccagcacgtgacctggcactagcacaatgttaactaaatgttgtggaattggaactgtgaatactcaagaaagtctcattctctcaggcttatggtccatttatttgtcgtttgcctttataaagtcaaatttcttgtgattgtttcatttttttctctaagttttggagaaaaaaaggaaaaaaatcaaaacaactcaaactgttattctagagagctggaattagcaaaaaaaaaagtccaatttctccaggaacatgaaaaatgagagggttaggacatcccatttagaattcagcccttacctggtttgaaatcctgagctgttcaagagccacgaaaaagcacccatctctcatttgcatttgtgtatctttcttttcccagccaaaccccacttgaggaatgttagagtgttattatttgaggacaatttatcaagcatctaactaaagcatgacatttagacagataggtttccagttctgggtatttgcagggcttatcttcacaacatgcttctagaaatgtctcctgtgtggtcccttattttgtttatataagcattttgaaatttcagrtattctttctctttttgagtcttgctttattttttttcataatgcttcaaaatgttagtgttttcttccctattcattttagtgttattttctgtctattctattatcatttgcatctgttctaatgttattttcttaactatttcaacctttctatcactttctctctttcctctctactatgtgtttattgctgaagcaacgttcatgttctttttggctcctctgatttgtatcacagaaccctagaggtcaccattgagaacagatgcctaagacacaagactcagactttataatcagacaggtctttgttcaaatcctacctctgcttcttcgtgtctatgtgacccgtcatcctcagcttcagctacctcactggtaaaattgagatgtaaacccaattagaccgcacaccatagttgtgagaattaattgctggcttctgaataaattctaaatcctataggcactgtgaccatcattgctaaaattctaatttgatcctgattttaattcatttcttatgatagcttacaaactggagaactccatataacttaattaaatttattttataactacaattatacattataatttcatttctaaaacttcacatataattaaagtcacaagtcagagaataaaactcttttctcagactgtatgtgtcagggttggttggttggttggttggttggttgggaatgtatggtgatgctaagccatgacctgcttttaaaggtggaccaccttagtctttgcygttggttccattgtagataccactggccatacaggtgttaaagatctaacttgtgtgagccgcagttgggtgcagaacttcccactgaattcacatccatgtgattcagctgctgtatttccccatgaccagaagtctgactctcccaacacaaggatatttttaacctttctttccttaagctcaaaatgaaagaaaatagtcttaatgatgatttttaacttatgtgacatgcccttcgcagctaacaatctgtttgcctttctaacctgggcacagaacgacctccttcctgctcttcaggccatgcttcatgaacaaacaggaattttatgtagcttagcaagtgggctttttaaagatcggtggaatgatacacactcatgtctttatcactttagtgcccaaagtgctaaaatcctacattattcacaaattccacgtgagcgagagcgaaattgagaatgttggcagcagaaaggaaagtaaagccctaagaaaatccaaaaagttgtaacctgggcattattacaaatgtgtcctaaatgatgggatttgcttgtttttgtcaataaacctgtccatctgattttaaccaggaggaaaaaaaaaattttatgacayggacgcattagctgttccttttgcactgccatttgagaagggcaatgagcctctgtttcttggaatgcttttcccgtgacttcttgcatttttatttcttcaggttttccatactgtataaataccagagttaaaatatagaatttgttttttgagatggatgaaataatatgcaataggccctagagacaagataaaaatgtgttaactaaaagagattggggtccttggagggggtctgcctgacagatcagtgcatgtgttgagttgggggtggatgggaggtctgggagtgcattcatctggcttatcatctggctaggagccgttcatttctttatagttttgctagaaagggactggagatgtcaggtacctggtatctgagatgactaccagcattcatactaatctgggagatccagggatgtgccttgttatggaggggactgtgactcctttaagacctagaccatcacttgggagatttgttttggtctctgggtggattgtggatggtagacagatcacaggccagcaggacctggctttggccttgctggttatagaatttctattctgcagagctaagagtgcaaactaggaccaacattaccaagaggacagaagctatctggggatcctggctggcagtgctcaacttacagctcaagcctgtgataacaggagaggtggagtgtgttttgtgcttcattgtgcatgtgtttcaagcagaaactagacttgagggcttaaatagaaaacatctcaaacaatccatgaaatggtaaacaaacctgctattgaatgagaagaatgaaaagttgacaattgcattattgtgatccagagtgggttcatcagctagggtagaggaataaagaaaaaggagataaaagaactgggtaaaatgaattcagttgtcattcctttcttcctttgtcttccatttacacctggtaatgaacctatggaggcttggagacattgttcaggtttccttttgttttatttttgtgtgtgtggcaggtttgtttacaatttccaaaggggtttttctcaatcttgaggaatatgaattgaggaggcggggaggagaacaagaaggggaagatatttgagtgttttgcagacaggcggtggcccagcaatcagggaggctgctctgcttttgttttcctgttcgaagaggctgacgggatggatggtgctggtttcatcaaatatgggttttagagaattcctccatgtcctgccttagggaattatgctttggaaaattaagtgtccatcaaatcaggaggaggcttgtacagtttctatcccctttcccccctgctttttgaaaggcttaagaaaagagccctttgttttcttttcaaggaaagttacactgaaattcatctgtgtggtattcatggacttcatttgtgtcattcataggcagctgtaggttatataggacaatgtttttgaatttctaacctccacattgcaagcagcatgttgggaaaaggttcaagaccttttacttttcctctcccccaacccctttatttatttatttttacttttttttctcttctytttttttaattcaaagaagaaacgctgagatttcccctcctccctcctagatcagatttctccaccgcatgccattgaagcttctcggggttaagatttgtgcctgtcatttccgacattttcctcagaatcgcaaactttaaaatacctttcagggaaacttgtttggaatttcattttaatgggatttatgaataaatctccatcttaatgctgactaagctttaaacatccattccaggagaacgctattggatttttatattttaaaatttaaatcacttgagtgtgaaggcataaaacatttttatatttgtgtgagtgccttgtgcttgagcatttctgttaaagactgattttttttttwaatttggttgcttgaataaatctgggctgcaaaggaggagatgttgcatcatgtcctttcctttctcgtgtagacgcctgtgtacattatgcaggtttattttctcacctacagggaagggtattctgtggcaacctgttgccatgctgcgatttcctttaaaaaaaaaaacaacaacaacaaaataaaacaaaaaaacggtttactttcttcctacactttgaaacctttaacctcaaaattttatttttaaatrccatgagccctcaaagtcagattaaaagaggtgatagttcctcccggcatgcattccccaaatctgtgttgtagaatgtaaatgaagataaaagatggaatcataatcatccctcttaaaaaaaaaaaaaaaagaactctcaaaactaacattggtcaaaagatgcaaacattccgttataaaattagtaagttctagggatccaatgtgcagcatagtgactataatttataatacttgaaatttgtgtggtgtacttgaaatttgctgggggagtaggtcttaggtgtgttccctgcacattacaaatggtaactgtgaggtgatggatacgttcattaaattgattgtggtcatcatttcacaacagatacatatatcaaatcatcatcttgtacaccttaagtataaacaatttccgtttgtcaattataccttagtaaagctggagggtaaaaagaaacctgatgtcaggggttttcaagcatcgatcacctactgtgttctctgtgccccgtgtcatttttcccgtctcttcacagactcatcatattcagagcccccagatgttcagcagcagttgaaccactatcagtcagctgccctggcaaggaacaacagccgtgttagccctgtgcctctttctggggctgctgctggcactgagcagaaaactgaagccgtgcttcactgcgaattctgtgaattctcctccggctacatccagagcatcaggcgtcattaccgggacaagcatggtgggaagaagcttttcaagtgcaaagactgctccttttacacaggctttaagtaagtgacgtaatgaacagctatggaaaacaaggcggccgcccctgctccacccctcactgcaggcttcccttacactttcctacttggagcttatgggaggccctgcccatgtgatgatgtaggggttgggtccaggcttcatggaaggagggtagtttcagaagactgctttgggatttgggaagggatgaagagctatatcagaacaaatgagttttaaaattggagcaaatgggctctcaagtagtgtaagattgaagcaaatgatttcctcccatgcgtggagtggtgtttcccttcagagaactgtctcctctcctttttttagctttggaaaaaaaagtatgttcttggaagcaaagtcaaagtcaagagaaaacatccggcagtagtgtcttccctgctcccctgatagaaaattctttaattcttaagatcgtagtattgaaagacacatagagaatcaagaccctggcacttccaacactacacttgagcaatcatagggagattgctccagtctagaaaaagagaatccatagtcacccttgcccctgtggatgacagaattgatggactcaattattaagaatggaatgcttcctatgatgtaatctaagcttctgcatttgaatctcatcctgtgagatagcgtttaggttagtggttacaagtgtagagtgtggagcctgactacctgggtgattctggacaagtcactaagacactatctgtgtccctattttgttaacctataaaataaagataataatagtacctacatcatagggctcttgtgagcaataaatgaaccagtgtatcttgaagtacttagaatagtgcctggcacaaagcaaacactaataagtgtaataatatcatagatagaaagctattataataatatgacattagatatcatagataaaaagctattattttctgttcctattgtaatcaggatctgagccttagactacttcaatacatgcttcacaccgagaggctgtggaaattaggcttcatgtccaaagaaaaagaagaattggaagaagaagtctctttcccaccagcatcgtagtagctgggatttgatggaacgtgtgttctatctctattaatttgctccagttacttttcagataaatacatttgtgatttggtgctgagagaaggctagaggaccccagagggcaagggccgacagacaggcagacactttctccagagagcaacactcgggttcacaagaaagggtccctgcccattaaagtcttggctttatcgattttaatgagacatttaaggctttgcaaattttgaagatttgaaaaggatggaggaagaggcagcagtaccattccacctttaagctggtacaacaccacttagtttacctaatcatcaatcatgatgattgacttcctggacaacttgtcctcccccccttacctgtgaagaattatacaggcagtttctaagtcaacctagctttaaaatagtctctctcctcccaagcatgatgaaaaatagttccttttttgggattttgttttgatactcttaacagacaatttttaagaataaggtgtttggggaatttgtttcttttcaaactaagctctgaacccagcccagggcacagtttccagaaagaagttactaccatttgacagtgttcagattcggttgagtgaccaagtttctgggtggtcaacaaacatgatgaacagatttttttttagccccacaagcaggagagccgcacttggacatatataacgggtttgccagcaggaaatgtgaaaatgcaatgatccctggttacacgcatcacctctcctcccaaactctctcctagatctgcttttactatgcacgtggaagctgggcactcagcagttcccgaggagggccccaaagatcttcgctgtcctctctgcctctatcacaccaaatacaagcgcaacatgattgaccacatcgtgctgcaccgaggtaacctttctaacttggttttcttggatgcagcggggggcaggcagcagagatggccttctagggatgctctctcagagtggcagtagcacctgtgccttgttcctcaccttatcttcaggcaagaaaccacagtgataaccacagtgacagccaaaagggcaaaaacaccttcctgctgggagtatttcctccacctggagggaggcaaaggtgatggattctgcagtgaacatttccgtagggcttcccagcatgggggatttgtacattctgacaattctgccacccacagccttgcgtagactgcatagaaggaatgaacaagaaacaaaatgggtgggtgaaagcaaatgtgaaatgtggagagctctatggctgtgagagattctttcaagaagaccaaaatgatttccaaagcagaacatggaacttcccttgaaatggttgaagggagagagaattctttaaaataatgtatattatacattctaataatagtctctattatatattctaataataattagaaaatccatgggctttggatttaaattctggttttagagcccactgtgtttaacctctccatccattaaaagagatgattgtacctatgagataatgggtaaagtgtccagtggtttttcataatggatgcataatgactgctcaataaatgttggttcctgctgataaacagtgatacttcttttaagtccacttcggtctttctttgagttgcatttacccttggccaattaaaacactgttaaacaacagccttcctctgcattggaaggaaaaatatgtagaatctgtttcgtcctgaaaagattcaagctacaggtggatagaaaaagattactggagtactcattgccagtcttgattggtgtttctactgatctttccatctacttcattctttctctccatcccttcttttcatcctcttccctcctatcttcattccttcgcctctgaccttagaaagccttccaatatttgtcacatatgcctcaaaagcaatgagtgtcatctgttgtcttgctgggatgtcactcactctgaaatgctgagtatttgggggccattggcaacacacctcacattgcccctgagccattgcctttggccaatacatttgtgacatactcacccatgttcatgcaaactcaatggaaggctggacatttaacatgcacagatttccctcctcccccttgcactctaatgagacatgagatcgttgctggctaggatgtccacctgcaagctgggagaagtatcataggaacatttaggcaggaattcttggcccgagtggtcccgcctggtgttccgcctcagtcacctggcttccggtcccccagcccatgtgttgcggtggctctgtgccctatcacagcttggtaaggggccatcagcagggctgctgccgagcagacatggcgagtcttcactttctgtggttggttcccttcttttcccatattgctgcctggcaggaacagagctttgatgcctaacaagctcaatgactttccctccctgagctgagaacacaagaaagggggaagcaaagagagattaaacactacgaccacaaatactcccatagcattctaccctcaacaaagtgccgcttacacgcacagtcacttcatcttccagcaacattgtgaaggatactattactctattcccgttgtatgcctgtgaaacttgagagtgagacaaactatttttaaaataatttaatgtacttatttgccatctacttcatttcacaaaggttttaagatatcttaaagacgtgtgtgccgaactataggtttaaaaacaaataaggaaattggggtaaatgcaaaataagaagaaactagtggaaagttcacctctaagtatgaaaaagctagctgagagtttggatacccagtggataccatgaggtgccatgcccttgttcacagtgggctgcagatttcgccctgagattccttgcctaccatggtagaaaagaaacccacagaagcaaccagatttcaactgcttgttagacttttttgaactgtcattcaggaaattttcaggaatcctagacactgaaacctagaggaatttgtctagcaggttttcctgaagggcacagtgtgtgacgtagtgcatattgtgcccatcataaatacaatagtaagttttgcagggcacatgagagctggaatcactcactcaaagtcacccaactggtaagcagtcaatcgcagtcctttgatcccatgtctcatcacattacctgtcactggttatttgtggtctcttctgtttacttgtaaggatcattttcagagtccttatcaaggtcagaaaacatccatctgaaatgaacatgagcatttgaggattaatagtaataataacaacattaacaataataacaacaatggttactgttgccggttgcttgcctagcaggtactgtgctaagtgctttacagtatgtcattttatagaattctcacaaaatcctatgtggtggatgactgttatcccccatgatgaggaaataaatggattcagaaaggctaacaacttgacgaacatgaaatgtctagtaagtaatccagctgggatttaaacccaggcttgtctgacccacagctcttgcctttacccaccaggcgtcactctctcaccctgagagaggtagtatcaccctgttgagtgttctagtagctgtggcggctgagttcaaagacagaattatcagaggaggtcagaggggaagtccacggatccacaggcagcagagtgcctcaggacagccatgtataccatctgtgtcccggcctggctttggtgtccatctctactcaaaatggcagctcagtaggaagctgaccttgacaagtcgagagacagagctgcatgtctgccttgcaattttgagttggggctgatctcaaagtaacaagacatggctccttctgcacctgtcctcttcctgctctatccatgacatccttggtctctcaggtccacagtacaagatctttctgaggtcttagttaattaaagtatgtgggatgaaaagcaagaaaaccaacttctgaactggcccagagacagaactactgctggcagaaatagagtttccattgctttttgtctgtataaattgatatatttaagtagagagagaatctacttcgctcatgggaaatctgaatatgaactaatcagggatttatgttggccacagcaaaagagagtatgatgtttactcatgtgttcagcaaacattcattatttgcttgttacgtgccacgctatgcttggttctttgggcaaaatggggaacataagacccagcacccactctcctcagagatgagcatgtgcgtagtatagacaagacagtgagtgatgggtatctaggtatatttctgtttgtagtagagaggggtggctttcaaactgagccatgataacatttcaacaggcagagaagacttaaggcagggcatattagtttgcaaggactattgtaacaagtgaccaccaaatgtgtagattaaaacaatagaaatgtattctctcacagttctggaagctagaactctgaaatcaaggtgttgacagagctgtgtttcctctgaaggcacaagagaaggatccttatttgcctcttcctagcttctgacagctcccagcgttccttgacgctacttggcttatagctgcatcactctcatgtttgtctccatcttcatatgggctttttctctatgtgtatctctttgtgccctcttttcttcttataagaacactagtcattgggtttagggcacaccctaatctagtctggccttaactgattgccatctgcaaagaacctatgtcccaataaagtctggggttccaggtagacttaagtttatgggggacactcttcaacccactacacgagggaagagacaatttaataaaccactgaggtcggtggaagcaagacatgtttgcagaatgttattagacatttccggggtcctgaagagaataggaagcataccagagaagtatgttctggccaaagtatgaagcgcctggatactaatatagaagttggaactttagtcagtagacagatgggaagccaggacaaattctgatcaggttactgatgagacacttattgaatactaatttagcaaaggttgaagcaaaggattggtagacccatctcattcaggaactgtgaacttaggtcagatcaacgtttggtgagattgaccatgatttgatgagtttaactagggaaaaattaagccctgaacttctctttcaaggatgaagtcagtggtaggacttttggtaggttttcattcatgcaacaaatatttattgaacacccactatatgccagccttattttgtttttggctttttgaaggagactttttattatttttatatacagaaaactgaacagtgtacatttaacccagtttagtggcaagtcttttagcttctgcctcttacagcttggcaacacaagccacagattttggaccaaggaccttgcctcctcagtgatgtgggatctcatcatatctgtcattataattggtcctgatggcttctaccagcttagccaaagygcctttgtcttccaagttaatgtgtgtgaaggcaacagtagtgcagatctccctgtggactagacaccccaatttggccatctccttgatmatacaataggggactcccttcttaggactcagggcaagcgggaagacagccagctccatgggatccacatcatgtgcagtcaccatcggctgagctttcttgttctctactgaggtggtaagagtattaactcctgctggaaggacaggtggcctcttcgtggggacattccctttgctggcagctttcttctcaatgcaggccaacaatcttcttctcttgctttgtctctagccagtttaagcagttgagtagctgttaggggtccaagtcatgggtgaattggttaatcacaggagtcattctgagctgcttatagggtagccctttactactatagccagaagtagtgggaatatttgacaaaaggactaaggtccctttggggctggaggtcctgtcttatgccaacattcttaagccttttctcgaacaggggattcaccaccctcttggcctcctactttttaatgacagcaggagccaaggccgtcttcttccccttggcctttttttcttttgacatcttgggcagctggaggagaaagctctagcattgttttaagctgtagggatacagccatgaagagtcaggcaaggtttctgcactgaaggaatttgaacttgaacgagaagagagactaaaaaacaggtgaataatagttttatgagggtattcctattgagttgatcaccattggaagcacaatgtttcatgcttagctttgcccatgtatatgtatcttgcacatccatagtgagccttaaaaactggccacagattttagggatgaaacacagttttgccacatatttacattgtaattttggaaccatgtaatcactgctatgggtctttaattggcatattaacttaaagtttctgtttcccaatacatagacaaatgccgcatttaactgaaccttgcaagtgggagccttgggaacggaaataatctcccctaatttatctgatcagtgtcatttttcttgagaataaagtctacagtgagattgccaatctttaattttattcagtgaaattacatgtttcctttcaacttctccaaatacctttgcctgatagaattagaggtgccatttccagttccttctagcttgaggatggcagcctggctaacatcaaaacctcatacttcctaccaggaactgttttgcttgtgtttatgtttgtctatttatggctatgttttgggatgatttatataaaaataatgttattttcttcatagctttctctaatactcagactttgtcacttctttgctttggtgcaaagagggactcagtcctctagagtggcaatttgcacgcaaagttttggtggagtgaagaacttccaatctcattgcttcatgtagacttggcatgttctgggaaggaaacccacctatgttgtggtgtgcctttcaggaaggatttttgctagttgaatctgggctctgcagtggtgtggtttctcgccaatttgagcagaagtgaaccctctgtattgcagctgtgcagaattttccactgacctccatggaggcttgaaagcatgctattctcagctcttgttgcaccttagtacacatgtgcttcaatgtgacattactctcgggcccaacctcttcggttttatgtcctgctgcagcaccaagcatcttttgagtaggaggagatgagagacacaatccatcttgtagttgaactggtgaagtcataatatttttgcagccagtgctagaagctgagtcacaatgagtgtgattcaggccttgagttttcacccaaggtaattttgagaggtgtgaagtcaaaaagacccacagttgtcactgcccccatagaaaaagccctgagcactgagcttctgtaaccaaggcagagcccagtctatacctggaaccattccagtttttaacttttatgtctttcatttgcctcaagaatgaatgacctcattcagaaaacrctgtcagtcatttgcccaccttttaaagtctgtctttttttatttttatcttggtcatgttaaccatgtttttagaaaggggaaaaagctaactttttttctaaaattaatatctcagtaaaaactcacataattaagakatttggtagactggcattgtcttagtttggaaatgggaagttctagatttcagatttaagttcagcagggatttgaccctttcctcaaatgtagaaggtgcttgaaagacattcagatataaagggttaccttagaaatctgtagcttttgcattttttaaatattatgaatgaaaggcttataagcacacacatacagactggagagttcttatcaggggtccaagaggagggccctggcagagatcagaagacctgtgttcccaggtcacagctttgtgctgaaccagaggtgtgactttgaggaagtagcttaattgatcagttctcggtttccacatcaacaaactgaagaaaatagaactgactttgcagggtgttatgagaacaaaaagttatgtcaagggtagaacacctaacggtgcttgaaccgtagcgagcacttaatagtctgcagtggtgttcacatgaataattacttgaacttcagggtgttattctgactattcatgactttgtgtaaaattcacttagacacacatagtgaaattggaaactgcaaagaaaaccaacctaagtggtagaggaattgaaaaggaggctcataaaaaagtttgaaagaactgattattaattgtggagaagtgaagactggagagtcactgaatgactatctttgaggcgtgtgggacatcattatatgaaaaatgataccgggctgttcttcttcaccgtagaggtcaacggaaccaaggcaggcaggacagggcaaagccaaagaatgaaagtagaaacagtagagatgataacatataaatgaggaactaaaatgtagagagagcaagggggatgcagtcccaaggaagatgccagtaaagttcatgtcaacacttcccatgaactcctaaggtctaaaggcatatccccagcatgggggcagttccccgtggttcagcctgcatgccccatctcttgctgttgacactagcttgttcatgggttctgtccatgagtgccttacccagcgtagttgcagttaatgcctggcactttgcttagagcagtgattctcagctgaggtcaatttgcctccccagagtgtgttagtctgcaggcatttttggttgtcacagctggagagaagggggtgcttttgacacctagtgggtagaggccacagttattgctaaacatcctgcaatgcacaggctggccccccacaacaaggaattatcctgtcccaaaatttcaataatgctactttttagaaaccttgagttacaagaatagaatatcctagcatgagctccttaagatttactagtttatgccaaagcatttttttttctccgtttacaccaaaccatacaactgaatggttagaggacttaaacagttgctattctaaaaaaatgtgtggattacattataatcatgtgtttcttagctgtctgctatacttgggtttaaaaatatttatatttctaaataagcaactgattctttgtatagggaaaataacatgcattagagctccagggrgtatgttgcagataccaccttccacgcttcctctgcccagcattttgcgggccgattaatcgctgccttcaaggactcccaaggcagtgactgccctacaatcagagtgttgtggttgagactaaggcatgacattgggtggggaaaattccctagagcctgcacactggccagcaacaaagggaggactctaaagagtgagtcgcatcggtgtacaacgtaccgatgccctggaaacrttgctattcagtgactctgggaataaatcatgctttcttgacttaataatacattgctgtttctaaataatataagtatatgttgtgtgcgtccatttgtaaactttctgagtcttctgaaatccagacacagcatgaaaacacatgctatatttgattcttgcataaatagcacagattttaattttatcccagttatggatatctggcgtgtgcgctgatactctgggcagactggtgtgaaatttaatttgagcagttaaacacaagggtgagagagtgcaaaataaacaagcacacgcatttccagccctacagcatttggtatgttaacgggaaaagcacccaaatcctctctctcttttattttttccctctgacaatcagattacagactgtctaaaaagacacaaatcctccctgtctcctgcgcaaccccacctcccccgattgttgcctgcagtcatttcatttgtgagctcttcatagttggagttttagtgaatgaaagtgtacaggtttgctttcagacttgatattagatgagaaatccccttagtttcaaaaggagggaagagtctctttgagaataccttagaaggggaaatgagaatggaattggaaatagtgagaaataatagatttacagttaagcagacctggtttcacatctctgctttgccaactgcaatgtctatgacctttggagagttacttaaagactctgttgcccatttgtacttatttgtaaaaatgagagtaactccagcctcataaagttgctgatagaaaggtaccagaacataggtgcctggtgaatgtcagtttctttccccattaaagacatctgtaagtccagcctcagttgcacttgctgaggaaggaaggcatgctaatggttgttgtcagtaatcattaatgttggtaaaaattgcagctacttctattcctcccccttgccttaatcacctccattcaggaattagcaagcacctactagcccaccccacctctatttataggtcattctgggtattaagtacacaaagagcttttggtcttaaaaacacccactcattcctgaggaatatgttgtttgggggttaggggaggggcagggtgcatgtgtgtcagttcaaggaaccagatccacgaggagcagcaagattgggtgagtttcttcttgtattccaaagaaagaacttctgttttgccatcagtaaaaattcccatctttccattcaatttgtttccacagaagagcgtgttgtccccattgaagtttgccggtccaaactgtccaaatacttgcagggagtagttttccgctgtgataagtgtaccttcacctgctccagtgatgagagcctccagcaacatatagaaaagcacaatgaactgaaaccttacaaatgccagctctgctactatgagaccaagcacacggaggaactggacagccaccttcgggatgagcataaggtacttaccaggacttcctgctcccgcctcagcacacttgtggggaggggccaagggggagacaccactgcatttagtcacgaccactgtgtaccagatggagatgtggactcaaagagcttttaaagtgaggtctagtttcttctattagaaacgtaaggtcatttttaaaaattgcgaaacacaggttgggtggaagggaaatcacccataattctaccacactagtccaaatgctgaacatttctggtctgttctctagacccactttcatttgttttacgtaattgtgattatactatacataaaacatgataccttacattttttaaagcttattctaaaagaagtattttgctatgttatttgaaatgttaatacattttaaatgacagggtttggcagtttctataaaggaccggagagcaaatattttagcctttgcaggcctaaaatgtagtctttgtggcaattaagaaagcagccatgctggagttcaagaccagcctgggcaacatggcgaaaccccatctctacaaaaaatacaaaagattagccaggcatggtggtgtgcacctgtggtcccaactacttgggaggctgaggagggaggatcacttgagcctgggaggtggaggttgcagtgaagtgagatagcaccactgcactggagcgtgggcgacaaaaaaagaaagaaagcagccatagacaatacataaatgagccaacatgactatgttccagtaaaagtttatttacaaagacaggcaacaggctgtgggcccacagttgccaacccctgttctgatagaattacctctgtgttcctcaatcgtgtaggtggtttccaatattttgctaactacaaagatttgtcaaggcattacccagtatgtctgaacattataaggattgtaaaatatatgttttgggaggaaggagactcgagaatgaatacattagtacaggacataaaatagaggatttgtgaaaaaaaattctcttccagaggtttgccgatcagagggtagaaatcacacaggacaacttcctcactctgcacagggctcatctggcatctcatgaactgagatgatcatttctggtattgcccagagtacagaaggagctataattagtatttgtttaatgacaagagcctatcaaaatgctttttaattagccaacaagtccaaaatatctattgagtatttactgaaggcacaaggagaagcacttttgatattgtttgctttttccttgctctgtatcctcatgagtggaaatatagtccttcttttctggccttacaaacccacattataaagaatttagtctgaatcatctgcacccatgggttagaattgttctgtggggtgttgagagagaaggctgagctttgtcacctgtccacaatggaccagtttaatggtaacttctctgctttggaatgcacttattttccaatgtgtctgcccgagaaaatgaagcaaagaggaaaagcctgaattacctcacttaaaatttttcatatcctttctttttcaaacttcctgggcatttcttccccaaacttaagggtaaattactcatctttttcaaacaaagctttctataattattcacatgtatcttatttacgtaactacctcagacctttttattacagtgtttaagcctccrggctgatattttcagacagaacaaatcagaaagaagattcttctctagttgttgcacggtagcttgcaaatcactgaggaaatccagaaaatgttagaaaccatagaaccagagggttcctcagcagtgggcggaaggctgaggctttgaggtatggatcatggaaatgagttgctcaggaacatagggcccaattaagagcttttgaaccaaaaagatctgggttttaatcttgtctccaccatttactgtgcatatttcaacaaattacttaaatttctgggtctgttttccagttcgtaaatgggaattgttatacctttctcagaagttttgtaagattaaatgaagtcctgtatctcctccactttgagacccaatacattccttagagtatttgttaattgaattgtgttcaaatataataatagatgtacctatcataatggcagctgtgttcccaaagacctaaaacatattacaaaaccactaattatactttgcatcttagacacggtcttttttaaaaattatttttccattgagtattgcgatacaagtggcatttggttacatgagtaatttctttagtggtgatttgtgagattttggtgcacccatcaccccagcagtatacactgcaccctatttgtagtcttttatcccttgcccccctccacccttcctcccaagtccccaaagtccattgtattattcttaggctttttttcctgatagcttagctcccacatatcagtgagaacataccatgtttggttttccatccctgagttacttcacttagaatactagtctccagtttcatccaggtcgctgcacatgccattaatacattcctttttatggctgagtagtattccatcatagatagatagatagatagatagatagatagatagatagatagatagatagatagatagatatcacagtttctttatccacttgttgactgatgggcatttgggttggttccatgattttgcaattgtgaattgtgctgctataaacatgcatatgcaagtatctttttcgaatagtgacttttcctctgggtagatacccagtagtggaattggtggatcaaatggcagttctacttttagttctttaaggaatcaccacactgttttccatagtggctgtactagtttatatcccaccagcagtgtagaagtgttcgctcttcgttgcatccatgccagtatctactggattttttaaattttttttattatgtccatttttgcagaagtaaggtggtattgcattgtggtttcgatttgcatttccctgatcattagtgatgctgagcatttttccatatgtctgttggccatctgtatctcttcttttgagaactgtctattcatgtccttagcccactttttcatgagattgtttttttcttactgatttgtttgatttcattgtagattctgatattagtcctttgtcagttgtatagattgtgaagattttctcccactctgtgggttgtctgtttactctgctaactattctttctgccatgcaaaagctctttagtttaagtaagtcccaactatttatctttgtatttattgcatttggttttgggttcttggtcatgaagtccttgcctaagccagtgtctagaagggtttttccaatgttatcttctagaatttttatagtttctcctcttagatttaagtccttaatccatcttgagttgatttttgtataaagtgagagatgaggatccagtttcattmtcctacatgtggctagccaattatcccagcaccatttgttgaaaagggtgtcctttccccacttcatgttttgtttgctttgccaaagatcaattggctataagtatttgggtatatttctgggttctctattctgttccattggtatatatgcctatttttataccagtactatgctgttttggtgaggaacagcatagtacagtttgaaatcagatagtgtgattgtagtagtctgttttcacactactgataaagacgtacctgagactgggcaatttacaaaagcaagaggtttaattggacttatagttccaggtggctggggaagcctcacaatcatggcagaaggcaaggaggagaaagtcctgttttacatggatggcaacaggcaaaaagagaaggaggaagacacaaaagcggaaacccctggtaaaccattagatctcatgagacattcactaccacaagaacagtatgggggaaactgcccacgtgattcaattatctcccaccagacccctcccacagtacatgggaattatgggagtacaattcaagatgagatttgggtggggacacagagctgaaccatatcagtgatgtcctcagagttattatttttgcttagtcttgctttagctatctgggctcttttttggttccatttgaactttagaattgttctttctaattctgtgaagcatgatggtggtattttgatgcagattgcattaaatttgtagattgcttttggcagtatggtcattttcacaatgttgattcttcccatccatgagcatgggatgtgtttccatttgtttgtgtcgtctacgatttctttcagcagtgttttgtagttttccttgtagaggtcttttgcctcctttgttaggtatattcctaagtactttatttttttgyggctattttaaaaggggttgggttcttgatttgattctccactggtcgctgttgatgtatggaagagctactgatctgtgtacattaatcttgtatctggaaactttgctgaattcctttatcggttctaggagatttctggaggagtccttagggtttttgaagtaaatgatcatatcatcagcaaacaatgatggtttgactccctctttgccagttttggataacctttatttctttctcttctctgattgttttggcaaggacttccagtactatgttgaagaggagtggtgagagtgggcatccttgtcttgttccagttctcagagggacagctttcaacttttccccattcagtattacgttggctgtgggtttgtcataggtggcttttattacattaaggtatgtcctttgtatgccaattttgctgggagttttaatcttaaagcaatcctggatattgtccaatgctttttctgcatctattgagatgagcatgcgatttctgtttcaaattctgtttatgtggtgtatcacatttattgactcgtgtacgttaaactatccctgcatccctggtatgaaacccacttgatcatggtggattatctttttgatatgttgttgagtttggttagctagtattttgttaaggattttagtgtctgtgttcatgaggggtatcagtctgtagttttcttttttggttatgtcctttgctggttttggtattagggtgatgctggcttcccagaatgaattagggagggttccctctttctctatcttgtgggatagtgtcaaaagtaatgctaccaatcctttgagtaccaattctggtagaattctgctgtgaatacatctggtcctggactttttttgttggtaatttttaaattaccatttcaatctcgctacttgtcattggtctgttcagggtatctaattcttcctgatttaggctacgagggttgtatttttccaggaatttatccatctctgccaggttttctagtttatgtgcgtaaaggtgttcatagtagccttgaatgatcttttgtatttctgtggtgtcagttgtaatatctgccatttcatttcttaatgaggttatttggattttctctcttcttttcttggttaatcttgctaatggtctatcaattttatttatcttttcaaagaaccactcttgttttatttatcttttgtattgttttttgtttgtttgtttcaatttcatttagttctgctctgatcttggtgatttcccttaacactgcctttgctgtatcccagaggttttgataggtgatgtcattattgtcgtttggttcaaagaatttttaaattttcatcttgatatcatttttgacccaatgctcattcaggagccagttatttaatttccatgtatttgcatagttttgaagattcctttttagagttgatttccggttttattccactctggtctgagagactgcttgatacaatttcaattttcttaatttattgaggctcattctatggctcgtcatagtctaccttggagaaagttccctgcactgttgaatagaatgtgtattctgtggttgttggatggaatgttctgtatgtatctgttaagcccattttttccaaggtatagtttaaatccattgttcttttgttgactttctgtcttgatgacctgtctagtgctgttagtggagtattgaagtcccccactattattgtattgctgtctgtctcatttcttagtttagacacagtctttaacgtaatattttcactatgccatattatgttctttaatttttttctcttcctcatggttgaccagcttattaagtccagtgagcacctaattgaagctaaagaattgcgacttcctgcatgcctaatgattctcatgtttgtctcaattgttaggtttatgagactcatgcttattactgagatagcagtactttttttctcattttctaatcttttttccctacatgatgagtacaaaatgcaatttgaatttttgaaataattctccaaagacttttgtaagtaaagatggcagtgctattgaaactgaatttttggctgacagccagtggaattatgtgctggctaaaaatggtcatttgttagggggaaagatatacaaacacctgatttcagggttcatgagagaggaataggggtatcagtgtacaatgtactgaacagaattatgctgaaaattcaaatataaaagtcaaggaccataatgctaaaacaagaaattaaaggcatgagaattggaaaggaagaaacacaactttttatttatagacaatttgatttttatagggagaaaatccgcagaatctacaaaaaaaagctactagaacatgaatgagcttagcaagattgcaagatataaaatcaatatacaaaaatcagttatgtttctgtatactagtaatggacaactggaaaatgaaattttaagaagatcagtttcatgtacaataacatcaaaaagaataaaagtcttaagaatacatttaacatgagaactatacactgaaaactacagtgttgctgagagaaatttataaaactaaattaatgcaatatataccatgtttattaattaggagacccaatattggtaattcttttcataatcatgtacagattcaacataatctctatcaaaatcccagtaggctttttgggggtagaaagtgacaaactggccctaaaatttatatggaaatgcaaatgacctatagaatatcctagtgtggagaaacaacaaaatcagaggattcacccatcttgatttcaaaactcactgtaaattgacgtaagatagatgcatagatcagtagtgcagaagcaaaagtcaagaaataaaccctcatatatgtggtcagttgattttcataaaaggtgttaaggtaatagggaaaggatgattttttttttaaatggtgctgaaacaattagatttgtgtatgcagattatgacccttgacctttacagcactctctacacacacacacacacacacacacacacacacacacacacacaacaatcaaaatggaccgtaagcttaaatgtgtgagctaaaactataaaactttcagaagaataatagaagattatatcatcttgggttagggaaaaaaatttttatatatgatgcaaaagttatggacaactaaaagaaaaaagaagacaccattaagaaaatgaaaaggcaagcaacagactagaagcaaatatttgcaaagtaattatctaacaaagggctttaaccaaaatatttaaagaaatcttacaactcaacaataagaagataagcaattcagttaaaaatgagcacaagatttgaatagacaccttaccaaagaagatatacaaatggcaaataagcacatgaaaaaatgttcagcttgattcaccacttgggaaatataaattaagacaataataagattttactccccaaccactagctagcatggctaaaattaagaaggctgatagtatcaaagtgttggcaagtatgtagacaaactggaatctcatacattgctgattggaatgtaaaataccatagccacttcggagcagtttggcatttgtttataagttaaacgtacacttgccatctgacctatcctaccttcacataaaatggatggataaataaaatacggcgtatccatgcaatggagtactattcagcgatgaaaaagaatgagctattgatacatttaacagcattgaggaatccaaaaaatgttacgtggacagaagctagacacaagagactacgtattttatgattctgtttatatgaaatttctagaaaaggcaacatgatagagacaggaagcagctaagaggttacttgggcctggaagatgggagcagggattgattacaaaggatatgaaggagcttctcagagtgatgagagtgttcttaaacatcattgagwtgtttacttataatagataaattttatggtaggtaaattatacctcaatacctaaaacagatgcaagtttcccataacccaacacacagtaggtcttcaataaatgttaatttcctgtagtctttttatgacgttcatcctgagaacagttatatcaacaagatactcaagatccggattaatgtggaatagacttagcaattggttccaaacagggattcactttttttcccagtaaaacagtgcattgctcattatattcttctacaaatagcattaggtgatttgtgtggtggggagaatctacagaataaactataagacacgtagaatgtattttcagttaaaggatttcattaaaaagaactgaacattcaaaactggacttctgaattctgcctgcaaaggttataaacctcaggaacatctgtaaagatgtcagactatatcatccacggactggacagaatcctggtaccagcaagaaaggtccttaaagtcaaatataccattccttttaagaaccaaaatctccagtgcagtcgatttaggctgcatgtttatcctcagaagccagagtgcaaaagggataaccatcagaaccctcattttataggtgataaacacaatctttcctcctagatctttatctttgttactagtgagcgaggcatcacttgtaatctcttaggatctaaaggaaacagtgcaggttatttgaaattttatttttttatcctgtgactccctgtctgtttttaatctcagtgggtcctctagaaggttgactagtgtagtctctccctcctctccccctcccctttacttccctctcccttccttcactccctgcattctctgtcccccaacattctaccccccaacacacatartgaattatttatcagtaatgccctttattagcaatactgttgaaagatgaagacaacattttttcttttttgagtcagggtcttgctctgttgcccaggctgaggtgcaatggcgcaatcatagctcactgcatcttcaaactcctaggctcaagcaatcctcccaccttggcttcccaaagtacaggaattgcaggtgtgagccactgtgcccagcctaagacaacatctttaggaaccttaaagtcatgaagaaaaacaaaccttgcacttctcacatttaaaaaatacacacactgtttttaaaagaaagtttatatgcaataccttgttagtgttctttatggttctgaactctctttgctagtttaaggaacataaaaatatattatctctaacttggtccgctcgtaaaattgtcatgttcagtatattaaatttagaaggatagtctattcaggcaatacacattcactaattgaatttactttgaaatgtttttaattttttatataaatggagccttaagcagttgaactcttaagaaactcatatcttactttttgccagtttggggaaaacagcaaaacattaagctcagaaggaatcatcaactttttagttattctaataaaattgctgagttttttggactagtgaaatccacagtggccaaaaaagtcacttaggacatttgtttccagaaaaggaaatgagaaataaacgaagaatctttctccaaagattcttcccaaataaatcataagaagaatttttcccaaatcataaaacacacctttggccacatttttttttggattgctttttatttctgaactaaatgctagcagctttagctttatcaacagcaatgatttctgcaagctgaargcttctctagaagactatgccatttcgtttctgctttccctcatgcagttctgcttcttggtttgttaactatagctctgtctcttccgtgtgttgtagaagacagagaaaccagaattagatgagcaagaggtgtgaccgtttttcagaggggtgtgtctggcaaaaccttaaacagtatttctcaaatagacatttgaagatgttctttacctgtgccttcgaaaccatccactaaactccccagtcaaaattctttgtcccagattcaaagcttccatagaacttttctctttcctttcttaaggcagatttatttatctcacctttctttcaaaatctaacctagtgcccagcatacagtaaagcctcaggaattgtttgttaaataaatcaataaatgaaatcaacttttcaaatatgaaattttaagtatcctgttcaaataagcaaaatgtggtagcatccattagcatcttttccctctgtattttgggtccaggagattgacagctgcttaactggccagccacaaagctctgagcctttcttaattatgtctttcacctagcttccttgagtacttgtgtctgaagttatgctgagtgtctccaaataagtgattttgtctggacttttgctaagttaggtatgatggaaatatgttttctgattgtgacacagtgattgcaaaagaaagtagataccttccttgacttctgtgctctatatccttctgggtactctatgattctttgtttttaatattcttaggcttttattttgaaaaaaattcggaaaggatgctactgttctatcccatcacattttgcaacataacgttattgttaatactttttctttctcattcctgtgttcagccagtatagccatggtagttttgacatattttgtgagtaattttgcatttctgcagatgatttgcattataatgggaaaagcttgagctgtgtcatgtggagatctgagtcctaactaatcctggcttcatcacctacctgttttgtgatcttcatctacaaatatagaaggcaacacatttactgcacaatggtcgtaagggataagtgatacatgtaaaaactactgggggcatttttagcacttaatagttacttggtaagtattgaaacaaaatcatttagaaagtgcctacttttattctctcattaacaagcaactttatttcatgggatgcaaatcttatggcaatttttttattattattatactttaagttctagggtacatgtgcacaacgtgcaggtttgtcacataggtatgcatgtgccatgttggtgtgctgcacccattaactcgtcatttacattaggtatatctcctaatgctatcccttccctctacccccaccccatgacaggccccagtgtgtgatgttccccaccctgtgtccaagtggtctcattgttcaattcccacctatgagtgagaacatgcagtgtttggttttctgtccttgtgatagtttgctcagaatgatggtttccagcttcatccatgtccctacaaaggacatgaactcatccttttttatggctgcatagtattccatggtgtatatgtgccacattttcttaatccagtctatyattgatggacatttgggttggttccaagtctttgctgttgtgaatagtgccacaataaacatacgtgtgcatgtgtctttatagcagcatgatttgtaatcctttgggtatatacccagtaatgggatgggtgggtcaaatggtacttctagttctagatccttgaggaatcaccacagtcttccacaatggttgaagtagtttacagtcccaccaacagtgtaaaagtgttcctatttctccacaacctctccagcacctgttgtttcctgactttttaatgatcgccattctaactggtgtgagatggtatctcattgtggttttgatttgcatttctctgatggccagtgatgatgagcattttttcatgtgtctgttggctgcataaatgtcttcttttgagaagtgtctgttcatatcctttgcccactttttgatggggttgtttgatttttttcttgtaaatttgtttaagttctttgtagattctggatattaaccctttgtcagatgggtagattgtaaaaattttctcctgttctataggttgatcttatggcaatattatgaagtctttataccttatgatctctcatgggttttcatgttactggtaaattcaaatagcatttattgtgtgtcaagtgtatgactctgcactgagcctataaagctaagtaagaaatggttgctaccctggaagagtttataagcaactaggtgagacaagtttaaacaaagaagcacaattcagcatgttacttgcttgataagaggtagttttaaaattggagaggagcacagtgcacaacaaatatagtttcatggctcaggttccatagaacttcaatactgcctaactggtttgtttggctgaatatcttttctttctttccccccccagctttattgaggtataattgataaatgaaattgtacatatgtaaggtgtacaatgtgatggtttgatatatgtgaagaaaaggggaacccttgtgcactgttgataggaatgtaaattgggagagccattagagaaaacagcacgaaagctcctcagaaaattaaagatagaactaccatatgatacagcaatcccacttctggatatttaactaaaggaaacaaaatcagtgtctcaaagagctactgcactcccatgttccctgcaacagtattcacaatagaatagccaagacatggaagcagcctaactatccattgatggatgaattttttaaaaagtggtacataaacacacaatggaatattattcagccatggaaaacagacattctaccatttgggactgtatggacaaactttgaatatccttccttgaagcttttacaagaactctaattgaggtgctcttatctgagaattcaagatttttttacctgcacttttgaccatcttgctgtaagaaatcgtagagacaatactttgctgaatctttgtcccactgttttctttccctcattcccattctgatttttaaggacaggcaaagaagatctgtctgttgagtagaccacttggtacgttaggggttggcaaactatgatgcatggaccaaatctagtccacctccttttttatatggtccactctctaaggatggtcttgacatgttttagtgattgaaaaagtatcaaaaaaattgtaatgtgaaatatgaaattcagatttcactttccctaaataaagctttattggaatacagccatggtcatccattgacttattgtttatgggttgcttctgagctacaacagcagttgaatagttgtaacaaagactatagagtccagaaagcctaaaaatatttacttatctggccctttacacaaaaagtttaccagcctgtgttataagtcattcaaaatcttcacagcgctgcacattctttttaacatcaacatgcagtattaggtaatatgagcatcctggttgggtgcctctttttgaagctacaaatgttaagtaagaggggcaaccttagagttaaaaattctggaaacattaagtggactttctcaatctcagtctgtcctatttgatgcctgcaatgtaatctgaagacaagggttccagttccattctatcattagcaagcacattcatatcagtcttctatcagactgggtttgctatcctagtacaatatgaaaatgcatattcaacttgataatatttgtaaatcacatataattattatcaccttagaatatgccagaagtatggaaatacatgctaagaccagatctaaaccattttgctgaatagttaaaagccaacaaatagacaagtgtggaagtggttttgcagtgtcctcacttcattgttaaaggataaaacatttgacacctcatctcacttttatttttatttatttatttattttttgagatggagtcttgctctgtcacccaggctggagtgcagtggcatgatcttggctcactgcaacctccacttcccaggtttaagcaattctcctgcctcagcctcccaagtagctgggattacaggtacccgcccaccacacctggctaatttttgtatttttagtagagacggggtttcaccatgttggccaggctggtctcaaactcctgacctcaagtgatcgactcatctcagcctcccaaagtgctgggattacaggcgtgagtcaccgcacccagccctcatctcacattctcattagacagatgacttcaccaaactctgggttagtggccttcacaggggaccttgagtgaatgggcattcacagatagctttcacaggaataaagatctgcatataggtttctagtctgaattattatgtatctgaacaatccacccttcaagaacatatacggcttcttttgcctgcagaaagagcctggaaggagcygggttctaaatctcaaactcttaagcttgctccttctccctttgttgtgggcctttggggaaatgataataaactgcttctcatctttagaggaaacaagtgtgtttctctcaatatgtcatctgcatcatcaaggagttattcaaatacccaccaatctccgggcccaaaaagtagtgtaatcagttcaaaatatatgggaacttttataaagtctataccctttgactttgaccctgtaatttcacatctggaaatttagcctataaaattaaaactaagcatgaaagaaaggcttaaatacaataaggtttattactttttgtgacaaacatgtttaatagtggaaagccagaaatcatctaccgtaaattcatacgggaatgaatagtcaagtaaactatcatatgcctacttgatgaaatgctatgtagtgattaaaaattatgtttattcagagaatgatgtgtacactatgccaggcatgaagaagttggatatacacttgtttgttttaaaatgataacagcaatgtaaataatctacagatagagaacaggaatacagaaatacattaattcattaacagttattatgtataggtagttggactttaaatgagtttttcttattttcatamattttttgtgaatgtttatataaaagaaactattttaaatgaaaatgaagatatccagtagccaggaggcgagaataacaccctctcttaatctagacactgtgctggccagtgggggttcagctgtaagtaagactcacagcaagtctgtcctcatagtttgtagttggactggggaggggcaggccataaacaattcattactgaatggggtgagctcttgaaggcggggtgcagaatgctgtgaacacatggaacaaggatatcgaacacaggaggagtttagggaaggtctcccagaagaagtgacagaagcagggctaggagattaaggactcaacacatgaagccggcaggcatgagagagtgtcagacaggtgagatggtggaggcatagactcctcgagggcctgacatattccaggacctcagtaagttcagggtggtgggagcaagggggagcctagagaagatgggccagaataacatgagagcccgccatgtaaacgacagttaagaaatttgtatttcatcctcagggcaagcagagactgacatgaagagacttacattttgttaaagattgctttgaccacactaaagaatcaggtacaagaagggacaagagtaggtgctaggagaccaacatgggaggggaaggggctggcagtaatccaggtaaaagatgataatgggctcaggaatgtggaaaagagtcttccttttgtgttaggattaatatttggatagatggcttggggatttcaaataccgtcataacccaaaacaataaagagtttttattttaaaatcttctaattacatagcaaaaattttagttctcatttttaaatcttttaattgcctagcaaagattttagaaatcttcaggaccaaataaatcctgggttagcctgggatgaacatcatactgtgaaaatgtcatgtactattttaaaatcatgcagaatttaaaatgttaacagttttccagtgaagggatgatggtgctgggaaaatggacaaatacagtcttcaaaaaaacccagaatgagggggaaaaaaataacatttggtttggtgacagatctccttctgtcaccaagagctccaaaagaagcaggggttccagtgtggaccccagaggctggcacacagcaagccagccctccaggaatccttgatgaatgaatgaatgaatgaattaaaacaactggattaaagcagatgtttgaggattcttctttggtctccttggtttcattgtttttgtttcctggtgacagcccacccctcatgtcctttacacgtatttatagtttccctgattcctaatggtgagaagtgcaggagaaagtggcccaggaaaggctgccttttatgtgctagtcacttaaaaatacttctcttcaaatatgtttaaaaattaggcaaattggaaccttgcccacttttcctgaaaaactagcaagccagaaaactttttattcaaatatttatcatgaatgctatttggctaaaatgtagactttgtggctaaacataacttcgtaaatatgcatttacaatgcttgttgtaagcattcccaagagccaaaactagaaaaggctcacattcccagaaaggggaaggaaattacattttgggggactgttgtgtctcaagcactatgctgacctccttttacaaatgaagatatcaaggacatatactgagtgatttatccagaatctagtggttaatggcaaatcctaaacttgaactcgggtctgtctgacttcaaagagcattttcttatgctatccctttttgctcttatgtcataaaaggaaatcaatgaaaatgtaaaagccctagttagtaaggtgctacaagcaaaagtcctttggaaaccgttactgtggacttagaggggaagaaagagaaatcaggattcataattgacctctttctcctcttgccttagtcccttaatttttatagcttttttaattgagaaaaacaagaagttgccttccctgcttgttaagcgttggcattgttgtctgcgtcttgtccacccccatgttgagttgttttcaaagttaactaatttcatggatttcattgttatagatagatcagtgtattgtttctcctgttttaaaagaggtttttccctgagttcttctcctcctgaatgctacctatctcttacaggatgttgttgggacattattcagtctcagtgtctaaggcctggtacgctgaggctctttacatttgtcacagtcgataatgatgttcccatctgccaggcacatggaattggtggcattcagcaaatctttgttccagtctggtcccaaagactattttggaattgtcttgtaaattatctctttcctctcctgtgtcctcatcatctagctgtgtcctcatcatctagctgtgccctactgtggcagctagggaagtcggcctcggaatctaattaatgatgtctgtcttccctcttcaactcaactgtgagcctctggaggccagaaccaggtctcattcatcttgtatgtcccctccccaggcctccaacaaggggagcataacaccttacatagaaggcgtagcccatggcaattttttgactttagccctgcaccagcttgtcatgcctgaacattctatgcatgcaactggagaggttctgaaaatcgattcatgatgaaggtaaattttgtgctgccattgatctgagaacccaaaatggaaaaatcattaaagacttttcttagtgtagatttttgttcccctccaatgatactttgaagaaagcttggattcccacattattctgaccacattttacatgaataaaaaccagccatagttaacacttttaaagagcttttaggggttagtcatctaggtttttctcagataatcccagccttgatacataggctgtggtcagcttcaaaaacagtagtaacactaacagtaataatattatcttccatttaaactagagttaaggatcagatggctgtcatctggcctaagccgggacagcctgcaacaccctggttgatgggatcgtggcaaagaaggttgtattgtgtctcactgctagtggtcggcatgcttgcagaacttcttcacctgcagaagtatttgaaacttgggttgttatragagttacacctttgaattcaactacaaaaaaaatgtgttttggatatttactctatactctagccttcattttacttttggtctcctgcgtactatagctcatgtttcttcacaagtttggtaatgaaggtccggtgtacaaaagttccggtgaaaatgatggaatgtgggagcaaagggctgctccatctccaaaagagtcaaaacgaagaaaaagacctcttaggccccggagttgtttggtcctggttgcaaaaccacagtcacaggaaaatgatgttagaaagatctctccatcagggagaaccccatttggtctgcggtttattattccatcatttgtttgggcctttttcaggtaagccgtaactttgagctggttggacgggttaacttggatcagctggaacagatgaaggagaaaatggagagctccagcagcgatgatgaggacaaggaagaagaaatgaacagcaaggctgaagacagaggttagtctcatcctgccctcccaatcccagatggcatctggcatgtccgtagtgagacagaagggaggcaggaggttgttgtaggagtaacagaaggaatgatccttcttagttaagtagcagaacagactgacttagaaaacacatcaagagctgtgtctttgtaaactattaccagctatagaaacgccaaggaaaacagacattttctccctaattatagatatatgtttgttgaaaaatagatggcagtgatttgtttttaataaggaaaactggtatctagggaatcttcagaataaggacaagcagacagcaagatggatgacactgtagagctctagaggaatgagaatgaacttccagttgaatgcatatttaaaattgctgctggggcacacactgctggaactgtaggggacggtggtgcaaagaacttgagcccctaccccctgatgtccctctgcgtggcccttttcttaaccccctttgtgctctgacttgctttgtaaggagagagaaagagagaccacctctttcattcaactatgtatttacagaatacactggggaaggttttgtgggactttggtactatttttctaacttcctgtgagtctataattatttcaaaatgaaaaagttttcaaaagtatatttagttgtggatatacatttatgtgattcagagttggttttctatattgttcaacgtagaatattgtgaaaaaccccagactatacatacaagaatataggttgagatatgttactttagttattgcagatttatcagaagcacgtggataacataaacatcagaaatcaacattgcakatattgacccagagatgagaatagtactagttgccattactgagcatcattatgtgctagcctcagtgctggtcgtttttatataacatttttctttaatctcatgactagagaggactgtacatttagcctgcttgaatttggtttccagttctgctacttactgtctagatggcttggggtaaattattgtatttccttgtacattcatcatctgtgaaataatcacaatcgtaataatgagaataatatcacctccctcctaagattgttgtaaagattttttttaactttaaaacttcagattttggactttttaaatttacttttttaaattattttaataaaaattgtatatatttatgatgtacaacatgtttcaaaatacatatacattgtggaaaattaaatcaagctaattaacatatgcattacctcacatacttgtcattttttatggtgagaacacttaaaatctactctcttagcaattgtcaggtatacaatatgttgttattaactgtagccactgtgttgtacaatagatctcttgagcttatttttcctatctgactgaaattttgtatcctttgaacaatatctccccaaaccccgagcccctggtaaccaccattctactatctgcttgtatgactttgacttttctagtttccccacataagtgagatcatgcagtatttgtgcctgcctctgtgtgcctgtctcatttcacttaatgtaatgttctacaagtttatctatgttgtcacaaatgacaggatttcatattttttaatggtgaatagtatttcatgtgtgtatataccacattttctttatccattcatttattgatggacacctagcttgattacttatcttggttattatgaataaccctgcagtgaacgtgagagtgcagatatttcttcaatatcctgctttcatttcctttggatatacctaggagtgggattgctagatcaatgtggtagttctacttttaactgattgaggaacctccatgctgtttccataacgggtgtactaatttgcagtcccaccaacaatgcaacaggagttcgcttatctccacattctctctagcatgttatcttcactctttttgataatagcctcgtaacaggtgtgaagtgatagctcattgtggtttaatttgcatttccctgatgattagtgatgttgaacattttttcatatgcctgctggccatttgtatgtcttcttttgagaaatgtctactcagatagatgattttctgttgagttgcttgattttctaatacagcatgggtattaattccttatcagatgtatggtttgcaaatattttcactcattccataggttgtctattactgtgttgattgtttccttggctgtgcagaagctgtttagtttgatgtaattctgtttatctgtttttgcttttgttgcccatgcttttgaggtcatatccaaaaaatcattgcccagaccaatgtcatggagcttttcccctttgtttttgtctagtagttttatagtttcaggtcttatattcaagtttttaattcattttgagacgatttttgtatctggtgtgagataaggatctaatttcattcttctgcatgtggatatccacctgttccaataccatttattgaagagactgccctttccccattatgtgttcttggcacctttgttgaaaaccgatggactgtgaatgtgtggatttatttctgggctctctattctgttctgttggtctgtgtatctgttttttatgccagtaccatgctgttttgattactatagttttgtagtcaactttgaagtcgggtagggtggtgcctccaacttcgttctgtttgtttaagatttctttggctatccagggtgtggttccatgggttgttgtaaagattaaatgagataacacagaagaccttcacccagttcctagaatataacaatcacctaataaatgataagcctgcaatgtaggtgttatttttgtgatttcacaaatgggaaaataaggacccaggaaatttaagagcatgttcaaagtaaaaaacaaaacaaacaaacaaacaacaacaaaaaatataaaccctggagaccaaattcaattcaaatttacatcttctggctccaaaggcaagccctcttcttaccctgcacaccactttcccagtgcttcgagtagtgtaatcttcactgaaggggacctgaccctgaaatctgtggattcagtggcccttgggaccttgctgtaaggagcagttttgcagaatttctttgtgttttctgcttgttctgtctgcaaacattaaggaagcctattggtgggctacttccctccaaggtgttccctgttccttttcctgacttgcactcaccctcctaccatgatgccagggctaaagactatgggtttgcgaagggggccccagtttggctcttgaacccctgaccaagacagtcagcaggaaatgacagccaaggtacactaccctttcaaaaaccctgtgcctgtattaacctgaaaaatacatggacaaataaaacatccttaccatataggttgattgttcttataaagttattatttttattagtagaggctgtattaatccatttcttacaaggaaaacggttgtgatcggagaagcatggcttctttcttttttctttttcaaaccatttcatgagtatgttctttacaatgatttcttaacatctctgcactgttaccggagttttctgggagaggatacttttgacagaaagactcctttttcttcatgacgctctgtggccttgccttttctcctctggaaataaactgtttctcattggatattattatggctttttaatctctaaagctgagcatgtgtgatttcaaaggttataagcattataaaggcaaaatacccttctaggcttctgctcccctatgactccttataaaaaagaaaaggaaagaaagaaaactcgaatttaaaacatggtggttgagatgtgtgtggtataccaggcagacctccttattttaccctacttggcagcccccttttacttggcactgtggcattacactggagtggtttggctggaaagaacttcagggtctcctcttctcactggaaaaagtatagtgtccacattcgtgagctttaccacatgggggaacaaaaagccctcagggtggagaagcacgtattcctctcagagggtgggggatttacatgagtaacttccagtcacattaatgggaattacaagcctaaaccttcccttccccctcgccgatccttgaaagagcagcctcctttgtcccatctctcctttgaatagaccaagaatcaactttccaccatctaggtgtattcttggcaggaaaaagaaatacacacaatagcctcgggtgtttctgctagacatcccagcttctaggagcagagggcaggaggtggcttgcgtgcagctctcaggctggtggagagctcttggaagtgtggccagtgcccagtggcctcctcctttgaggatggaacttagtatgtgccattggaaaggacagatgactggtttcctatttacagattaagggtaaagaaacaagtgtaccaggaacattattcctcttgttggcaatttagacttttatcagacaccctcagtttagggggttcacagcctcgcagccaccccactccctacctcctttctaaatgcaagtgccggactgaatatggacacgctgcaggtcctgcctaggaagctcagggaagatttgaaagagaagaatccaggcatgaagaaatcaaaattaacccaagcagaatcctccccacccccctctcattatgcagttggggaggagtcaggaaggcattctgttgatttcttgcccaagataatccctgctaaggaattaatgcgcagagcagatggtgctgtctcatttccaatgaaaagaatcaaggaagatagtctgtgcaattatttttaatggcttgtgtggtgatcttcttaatttgtgagaaaatgtttcatcttttgttaaatctggccccagtcacatagctgtttgtgctgaagattaaggcatcacagagccccccatcctgttaacatcgtcctgagaatcttattagatggggcatttcaaccaggaggcatcttcctgtaatgtcttgtatgtgtggaccagagtgatcagagtgtaaagatgatcaacacttccctgtgcgatgccctcactttgcaacacggctgcagaactggcaaggtcctgctgtttattacctacatgaagacttggccctctgtggtataatgaaacacatatgggctaggaactcgggctaacacaatggccatataatctcttatctttgagtttgccaggagacgtggcctgaaaacagttaaacagccaatccacatttatcagacttctaccatgtgcctagtaccatggaggaaacaaaacaactaagtcaatatttgatgtttacaacagaccgtccagaaatgtctgcatatccccgtattcatgaataccaccaattgaggggtaggtgccaggcagctggccaggatctctcaatagcaggggacatgtgttcacatactggttcccactcatccagataaatgttcatggtagattcttcgcttgcagatctcattcagtgcacataaccgccctgtaaggtattgattataatgtctatgatggatgaccacaagtcatgagccttcagccttacttggaacaagtagaaaccctgaggtccacaacacataacctggtccagggctttcggtagcctatgttcttttcagtgaacaaagataaacctgtgtcaaaaaggaaatgaatagatgctagcctgtgaggcactgatataaatcatcacacaagggagagaataaatcggaaaaaataatgctcagattcctttggaatctcgggcaagcggctcttcagtcaagaaagacccagattttgtgatagaagcattggggaggtgaggcgaaatgaggtcttggggcccaagaaccagaaacagttctcgaatgctattcaaggaatgccctaagggggaaacctaagaaaaagtgaggaatctggaaattgctttcaccacatggctttatcagtgaaggtaggagagagggtatcctaatgaatgctgacttacctattctgctgattcccacagcacacaggtaacacttctgctttctctttgcagagctgatgagattttctgaccacggggctgctcttaacactgagaagcgttttccatgtgaattttgtggacgggcgttttcacagggctctgagtgggaaagacatgtgctgagacacggcatgtaagttgggccacttcaaggatgcctttgtccaaagcaagaggtagggagggagggaggggctcttgttttggttcccctgacagtatgtacacccctctgtgtcacatttctgggccgtgggaggagaggcaatggtgaggaaccaagtttctccttttctgttgttttttaaaatggtcacccagccgcaagtcaaatagggaaaaaaatcgtctttatgaatgatcagtcctgctcaagcctgtgtgcagaagtatagtgttttctccagccaatatccctttagtcttcattagcgtgacattctataatagaacgtgaatcgaggtcaaaagatctggcttctgttcctgcctctctgactgatcattccctgagtggccctgaacattcccatgtactgcctcggggacagagccagcttctgcctgcctcccaggtaggtgagagcatacttgtaaaatacttatgagatccctgaacataaaatcagcccctcaacaaggcacgttagtccaccagatgcagagagaacctaggatgtggtcttttcaggaggaaacatggcttgtgtggtgataggaagcctgaagcttggtccctgaagcctcaagggtctagacctcagagaatataaccaagcttcccgagacatgggttccatcttcaggtttttgtttttagtttgttttcgtgatttgtttcgggacctgacaaataaatctttagtacctgagttactcttttagacttcataaatataaccaatctccaagcttctgggttcagccgatgactctgagcataagacaattcttgctgttaccacttatgacccagtagagaaagtgacataaaatgattatgcttatctagaaagaaaacatgggataatcaatatatagtataataatggatacttctgtaagttcaaatctttaagatacagaaatatatgacttaagcaaaacatagcagggatgcatcacttggtattttgtcatacacccatggcatttgttcaaaggaaaccccaaggctttttgaggatcaggaaaataaagacactcgagggtttttattatttttttgtttaaaaagagaaatatatatactatactcatctgtctcttcgataaatgtttttccagggcattgaatgacaccaagcaggtgagcagagaagaaatccwcccaaaagagatcatggagaacagtgttaaaatgccctccatagaggaaaaggaagatgacgaggccattgggatagacttttccctaaagaatgaaacagtagccatctgtgtagtaactgccgacaaatctctcctggagaatgcagaggccaaaaaagaatgagcgtttggtgaaattcttaatcaaaccttacttgaacagtgatgaaaaagtgggagggctggcttgggctgagaagggagggacagaaaagagaagacagaacaaagctgctttttaggactgaacaatctattttcaaagcactggtacctgtgtgagtgagtatgtaaattaaagttatttaaatggttggaatatgtggctccttttccatcactacatcttttcttccggatcttcatcatggaagtttcatttgttgcggaatatggaagcacctcccaatggtacggtgcaccctgtggtggtcttggacagtatgtggaaacagaagctccatgacggtagaagacttctcattggggagcaactttttgacgcacaacttttggtgcgtttttctagttttaataccttaagctttttcaagacctaactgcagccgctttgggaaaaaaaaacaaaaaacaaaaaacagaaaacaaaaaaaaaaaaactgctttgcataaaacagtcacctgtttcctagtacctcaaacttaaccaagggaactctctgcatttgtcagtactacctgtcgtcgttgtggttaaatgtagagagaactgctgggcaagatggtgaatggagaaaaaaaaagagttttaaagaaaggaacacaaattgtgcttaaaatccccatgtgggttttatttcttaaaatactgtgatttttttaattattttagtaaaaaacaaaacaaaaaaaagaaacagactttaattattagataactgtttgtgaattgtcatcctttattccaggtaagctgtttattagtgttcaactataatttagaatttggtagattcatgtgagctaattttaaggtgattgtggagttttgtttgccacatgtttattttctatcaatttgagtgttacaaacacagcacaattcagtttttcatatgaattgtttttcgtgtgtgtgttgttattgttgttttaatttcggggcaagggagatttagttttttgtgaataggaatgtttttattttaaacatggaaataacaaagaagttaactttcttttttttttttttttttttttttaatttaactaaagaaccaaactttcggcacagctatgcagcttgtgggccagacgaggaggtcctcctcacccttttgttgcctgtcaaattcacgcattatccgtctcataaataatttctgttaggattggctggcttttgtgtgtgattttaaaatctgtgttttgtttctgctggcattgtgttttgttgggggttttcatttatttaggggacgaggggatgtactagaatcccatccctttcgtgagagtggacaagaaataacatatcctacaaggagcctggagaactactttctttctttctttttttttttttttttttttttttaaatctagctgccagctgctctgtcccccatatcagctttttcaggagggagcagcttagactaaatctaagcctacatttataatatgttctgattgtgaacaaagggtttcgttccaaaaaatagaaaaraacttttcttgaagcctaggttttagaagcccgtgtgtgtgtgtgcttggatgtgtgtgtgcgtgtatgagtgtgtgtgtgcatgtgtgcacgtgtgaatcctttggttttcatgtttttttttttttttttttacttggaagggttgtgggagggtgggagggaagaaagggaaggggaattgctgagatgacagtgtcccacacagcttcaaataaaatccatggaaagatgttgcatttgtggaataagtgcktacttgaaaagcatgttcttcttttattttcttactgttaagaatttttatttgtaggatgtttgttttaatttaatttttttaagggatgggggccatcatgtggaaaccagaaaatggggaaagtgtgaactatccagacaaagattcattttgtgtctatatttgtttttaattggcctcatttcaaatgtattaaacagttccatacctggattgggtgtttgtaatggttaccaaaaaacaaacaaaaaaagaaagaaaaaggaaaaaaaaaaagaaaataattgtgacatgcttttatcactactttatttttcaaataacatgtaaatattgtaatccattggattttgttttgctaacctgttaataaaaatatgggaccattatccttttaacaaggctagaatgtcatttttttctttttcaaacatatacctgatattttgtggccgcacattttggatgcattattataattctgttgactgtaatgacatagaatttacaacattttttgttgttgtttaatttatacagaggacatttttttcagagcttgagagaagaaaataaatagcaaaatgataacctattgactccagtaatcagtgtttcccaatacttcataagagatagggagaccctgagtccttgaagccaagggtttaaaaacaaaacaaaaacaaaaaaaaccacaagtaggttattcaagttgtttgcaacatacattttgtaatgaaatgtgagaaattaataaagaatttttttcacatgtgtctatgtgcatctgttgtaaatcatttacagatatgactacagatatgaaatctagaaatattatagcactacctttcaatgcttgtacacgagatattttaagtcattgaatctacacaggtatggaaagcaaaggtaaagctgaggtgaggttgaggttgagctgggattttcaaatgttaatatttctgcatcaggtattcatcaccaactgagggagttttagggaaggaatattttccatcaaaaatgtgaatcaaagtgatgtgtgaacttcagaaggaggaagcacccgtgattaaacatcatctgggaccctgaatccacaagcacagtcattttaagctaactgccaagtcacacccactgcacaggatctatttcaatgttgccgtccttgcttatgaaagcctgcgccacaaactatcttactgaacatcctgcagccataattatcaccattaacttattctttgagctaccctgttataaatcaatggaaaaattaatagtcctgaaacctagaagaaaagtaaattaaaaccaacagcattaattattaactcaaagctgagttacactatctgcctctaccagtgttagaagtatggttcctgaatcatttgttcagtgttcattctaaaaacttggttctaacccttcctcctccccatccctatcaatcaataagatcgcattctgagtacattttatattcgaatactcaagagatactcaaccttttctaaggactgcaggttgagaagtttatcctgtatgttttcagaaaggagagaaagtgacttaatggacttcactgcgatacagctgttctctcatggtctccatgaaatattttatgaacagtgcttttactgagttcatgtctaatccatattctcactttgtttatgtaaaagaaatggaatttattgctatataagtcatggtagggggtgcaacaaggcaaatcctgaaatctctggcttaacaccatagagatttgattcttacacacattccctgtgaatgtctgtgaggtgtcctagacctgttgactcgggagtctgggttgctccatctggtgatgctgtcatctcaacacatgaatctcaaggtcaacgctgagagcttggaagtgtttcacccactcaaatgcctgatccaggaagtagcacacatcactttcagcctctttttatgggctggatctggtcacattgttccacctgtccacaaagggactgggaagtgtgtgagcttccagtgtgcttaggaagagcacgtgaccaagcagcctccaccatagtcaggaactggtagagaaagaaactctgttctttagaaggtaaaggatgctgatcccaccgcattgctcatgcacttaaccaagatttctgagcaaatatttggtgctagctatagcaagaaacaggacagacgtgagatgtgtcttctgacagctcatgaatggtgagcatagatatgcaacatttggagacgtgccttccactggagatgcttggggcttgctggacccattagcttcctggtgtgaggctttgactgtacctctgcattgatagtggcaacccttgggaaacatggtcttgatagtaaatgtgttttttctgtccatccaaaagaacatatttgacttagagaggcataaaagaaattggttactcacatacattcgttgagtcttttagtcctaagtttaacaaaaattactatatgttttttccttgcaactatccttattgattcactatttgccaccattatggcatagctctcagaggaataagtttagcaaaacaaaactatctctcacttcctttcacttgtacacttgtgtatacactccactcgtgccaacaggtggagctttaaggattggagaagtctttaccttcagaatttaaaaatttatgtttacaattattaatgtgatgatattagaggagacatcaaaataaagtcactttcctgcctcccacatccatatccaggaatgctttctaccagtttcattcctgagcactttttacatgtctctaatcaattttaaaacatgcttttttccacttaatagtatattttccatgttgctgtagagtcttcacaactaaaaatgttcagaacgacataacatattgaatggaaacacataactgtgtaactcatgagttattgaacatttagatttttagattttgcaatattataaataatgatgtagttgatatcttgcccatggcatccccagccacacttttggataattccattaaaataaattttcaaaggtacaattagcattcaaaagggtattattaatttgcaccaacaccagccatgaatggaagtaataacttaatcatgcccttggatatacaaaagagagggagataccatgatcatgaatgtaggttctaaagtcagcccacctggattcaaatcccagctgacccacttaattgtgtgatttcaggcaagctacttaaaccacgttatgtcttagtttccttatttgtaaaatgaagataacaatattcaaccatgcatcttgcatgcttttattgcaatttaaaaatttctagatattttagcatagccaagatattcacagttgagaggctagactttcagatttgggttatctgtaaaataatgttaagacttaattagaaagagaagaattcttattcagttttgtatggcccaagacccactgaaaactatgatgccaacgctgatggcaggcaccaatgatattgtttatgtttccttcatttggggcttacagggacaattcacaaaacagtatgataaaggtcatttagaaacaaggaggagggaggaactggctgcctgagggatggggagtggttgacactggaaaggctagaccattgaacagagtcttaagtgactagtctgggatgtatgccaggaagaaaacgtgatggagagaggacattccaggtgcaaaaggaggcatttatgcaatcatagaggtgaaaagtgctgagcctggtgttctggggatggcaggtggtactggatgccctggtgaggaatgccaagagaggagaaagctagaaaggttgatcagagaattcatgacggcgttcaataccatgccaaagagtttcaacataaagaagtggagatgcctgtaagaattgtgagctcgataaagatttttaagcaagggattgacacaatcagatttaagtttaacaaagactatgttcaactaacaaaggcaatggtggttggttagttgcctgcccaatagctatcactcccatttttcttacttagttgaagcctaattttaattggaatggtaatgtacccagctttaaaaaatatatttctcagcttcccttgcagctaggaacaccatatgtcacatttctggccaatgaaatgtaagctgaaactttctgggaaacttttgttttccaattatagatatcacctctttctccacactgcattcttttccccttctacatccccttttacatcccctcatcctttttcttctttctggaatatggagcagccaagttacaaccatgagaccacaggagtgtgaaagtgtgatgctttctaaagtatgacctactggtgccccagaaagttgaaggaggctgggttcctaaatgcattgtgattatgctgtagaagcctaaatggactcatcctgaatttcttgtgagatggagtagggagggggaaagacatttgtttaaaccactgttatttaggctttttgttatttataactggaagcagtttctactgctgtaaagtgatagccagttgaagtcaagacaagttcactgcaattgcattcttaaactgaacttcctgagtgaaaaaattccaaaagcaatggtaagatagaagcctccatgttctatattgactgagcttcggctggtgatttcttgtagcccttcggaagggaaaatttgactccagcagtcacattatgtcacagagctatgagggggctatttaaggccgaattgtaggtgggaaatatgaggaatcacatcagcctctcccatctcactgtcttctctattagcctcaggtagggaar

SEQ ID NO: 6754 - DNA, 13045 bp, Homo sapiens
ttaaaatcattgacctaaaaaaaatccagttagttctttcttagtatccttacatcaaaagtatattaagaatcattttaataatttattctcatctactgcattcagtaaaaaaagaaccttactcttgaattcaaaaatttctatatctagatattaaaactttctttgaaagatgaattattcattcatttaacaaataattgttcagcatctactatatactcaacactgttactatttcatctagataaaaagtcactttttttaatatcaggaatgcatattattaactctgataattcaagccacatgaaactgcattttaaaaattagattgtggaagaaaaacccaggaagtttttggtaaaattaggtatcacaaactgttataaaagtgcacttgcaaaatatatgcattttattaaaaaatagaaataattgcttttgtctttttgagatcaatgaattgaagtgagggtaaagatacatagacttagagttagcctaacttggctgtagataatatttacatagtcatagaagtggaaatgtggctattgggtttcaactttagcatttatggaagaatcaatgtttgaaaaacttggttatggttgcaggaaataaataaatattctagcaacgtgaatgatagaaaatagaagagggaaggaatacatttactaatagaaagaagaatagatgaaagtactaaaacccttattttctaatatgaagacatggtgagttaagagacactgtcataagttaatgggataattaattttttaattaagataggaaggtaatctacacaaaactaaacatagtacactattgactatgggagtatatcacaggaaaatagggcttagtatgatgcaggcttttctctatctttaattgttgagcattaatatatgtttttctaaatttgataaattcagaaataaagatgttaacacatgatgaagaattatgtggaaatcaccagatatattaaagtgacagaagtggaatgagttgctactaggagtgaaattggaggtgccttaacgtggaccgtgatatttgattagacaccatctgtttgtattactttttgtttcagatactatttttaaaataaaaaaggaaaaaaccaacaaatattaacatcaaagaaaagtaaaagtaaaatttacataattttacttttcttaaattttctttcctcaaagtttcccaacccttccttccaaccaatgtaaacatgcagtgcaaatctattgtatgattattagttagaaataatgtcaacaaacttcaagccatcattcaaattctcttttatgctaactaaagtcaatactgtagacttatttgaagtgattatagtaatattcaaagagaaggagaaactgatctgcctcaattatttctctagagagctgcattttatttaagtatttgctaacactttcttctgggtaagcaagaaagcactttcttctgggtaagcttctgggtaagcttccttttggcaagcacactaattcaagcgttttgaaatataatgtttttagttatttggtgatattttcacaggattaagaatcaactgatttgcactgtgtttttatgtggcaaacatagaaagaaaacatattttattggtcctaacttataactgattataagatgcactaagcaaaaacagaaacactaaaagagaaaagaaaaggccccaagtaaattatgacctgcacacactactatttaatagaaaatagaagttaaaatataacttagaatatagtgttacaaaatactgtatgtagaaaaatgcttttttttcacagacataaagcatgcctcctcatagagatacagtactctacaatttctagctacatgcataattctaaattttcatagtagtcattatttaaaaagtagaaaaaatgagtgaaattaattatatttcatgtaaccccatatattcaaaatattatcatttcagcatgcattctatgtaaaaatatattaatgctatatattttaattttgcactaagtttttgaaatataatctgtagtttatattacgatacattctgattaagaatagccatattttaagtgtgtcataaccatatgtggccagtagctaacctattggacagcacagatacagatccgttctatcttcacagaatattctattgaagagtgctgacctggaggggaagtgaaaataaaatagacattaataataaagtgtgataaatggtgtacagagcagaggcaacaaattcagccttggatgttaggaaatactcctagaaatgacatcyccttwttctccatacatgatatatctgcaggaaacctctgattaattttgaaattttgatatttatgttcactggggtaaaagttcttacttccaattattattagcaaagataatttctatttatgaatctaattaatttcctaatataaattagtcaaatctagcattaaggcactagaaaagcaaatcatatatgagcaaaacatttcaatgtttcaaagatggtttcattcaaaatgtgcagagaaagccagctatggtatgattaagtttgttgatattatctggccaggtgcagtggctcacacctgtaatcccagcaccttgggaaaccaaggtgggaggttgacttgagcccaggagttcaataccagcctgggcaacatagtgagacttcatctctacaaattaaattaattaatttaaaaagattgtccatattttcaatctgaaatatgagaaaattatataatatttatgacatttctcataagagagttttcacagtgcagtattccccccttatttgtgatttcacttcccttggttttagttacccacagtcaatcacagcctaaaaataggtgagtaagtataataagacattttgagagagaaagagatcacattcatataacttttgcttatggtatattgctataattattccgtttcattaattattgttgttaacctcttactgtgcctaatttatacattaaactttttattgtagatatttatgtatatgaaaaatatacacaggtttccatgcatgtaggaaaaaaaacagagtttagtgctgtccactggaaatcttgaagcatgtaatccatagataagggggactactgttatgtttgtgaacatatacagtatgttcagttaagggaggtcctgtttaatcaggcttctgaaattatttgaaaacattacatctataatagatagcagaaattcaatgatgtagtactcttgtatgtatttttctccaggcaaaaagccacattacacgtgtgtgtgaaaacgtgtgtgtctgtgcgtgtgtgtgtgtttgtgtgtgtgtaacctaacaaatagattctagaaaccagtcttgaaagcaaagagaagatggggacttggtaatgaactgacctgtggtgattattatagttcaccaaactgtacaatgctggaaaagccagtttctatagtgtttttttaaaagtgtgtttgtccaaattactttgatgattgccaaatataatgatttttcctaatgtatattaaagcaaagtgcttaaatagaaagtggcatatctcccttactttccctaagaaaatgaccattattgcatataacaatgaataaaattttactgaatttttaatcttcatattcaaattatatctgagtctttgaatttcaaaaataggatagatgattctactttcaaaatctttacttgcaatatcttgagattacaggagcagaattgctaaacacctggcaagtcttacttttctctggctggaaagctccacacttcctgtcccttacaggaaggtgaaaaaacatatgaatggttaagaaaaggggatgaatgagaagataaggaagaagaggagaggcgagaaaggagagaaagaagaaaggtcagcacaacttttaaatggggtggcccttgaaggtagaggattaaaggaatcctgacttccttgactccttcagtccttaaggtctcagcagtacctagaggatggcttatctcgtggttagaatattccagaaacagacactagaggagggattttatggctttagcctgtgagtaaaaggaatgctgctgtcagttttctatccagcactatttctaacctcttattcaataacttgttaccttagtcattaatttctcatatgtaacatggctttttgcctgaagaaaattacaggagtactacatcattgaatttctatcatctattataggtgtaatattttcaaataatttcagaagtctggttaaacatgacctcccttaactgaagcagcagtgagtgtttgtcataaaatttttcttactatgaagaatttccacagtatcactttagtagtttccattcttcttcctactcctctaattatatttactcatcatatttttacataaaattataattggcagagattgatgaagaaaaagatgaaaaatataaaagacatgagatgttgacagtatttctaatcatttcttacactgaattaaaaacacagagaaaactgcataaaatctaaacgtgcagctaaaaagttattatatagttaacacccctataaccactttcaaggtcaagatgtgaaataatatgagctccctgcacacccattcaaatcacaaactggtccatttcttctaaaggcaatcactatcctcaatgtaaaggtaataaccactcactttctttgtagtattactacctaaagaatgataactcaatggaatcattctgttttgcctatttttgagcattatataaatggaataatacattatacataaatgtgggtctgaattctcttgctcaatgttatacttgtgagatcagttgaaagtagtgtgtgtagttgtagttccattttcctgtgattgttgtaaagcatttcagttgatgaatatatccacaatttatacaacagttttcctgttaatggacatttggatagtttccagtttagggcttttatgatgaatgctgtgaatattcttacacgtttctgagttcatatataaatacattcctgttgtctatatacctatgaggaaatagttgcgtttttcatatttttaaattactagataatatcacactgttttccaaagcgatagcatgaatttatatcccctaaaagaaatagtatgagtttttctacgttcatacaaacamtgggaatttaattttatcttcttttttgggtgcaatttattgaaactttaatattcttttccttgatgactaatgaaattgaacaactttttttcaattgttttactgtacatgccaatttcctctttattcacattttttacccttttttgtttgtttatatttttctaattgatttgtaattctttaggttttctgattatgtgtcttttatttagaattttcaaatatggtttcagactttaactttttttgtgatcaaatctttatgaccaaagcttacatttaaaatttatgatcaggccaggtgcagtggctcacgcctgtcatccagcactttgggaggccgaggtgggtggaccactgaggtcaggagttcgagaccagcctggccaacatggtgaaactccatctctactagaaatacaaaaaattagctgggcgtggtggccagcatctgtagtcccagctactcaggaggctgaggcaggagaatcacttgaacccgggaggcagaggttgcagtgagccgagatcatgccattccactccagcctgggcaacaagagtgaaagtctatcttaaagaaaataataataatagtaataataaaaataaaaataaaaaataaacttaatgatcagtgctttttgtgttctgttgaaaatttttggctcagcatctggggacgctctcagctctcagtgcctggcccagcttccttcaaaatgtatactatttacgaaatcctgtgcaagctcagcttggagggtcatcactctacaccctcaggtgcatatgggtcagtcaaagcctacaccaactttgatgctgagggggatgctttgaacattgaaaggaccatcaggacaaaaggtgtgggtaagttcaccattgtcaacattttgaccarcagcaggaatgctcggagagaggatgttgcctttgcctagcagagaaggaccacaaaggaacttacatcagcactgaagtcagccttactggccacctggagacagtcattttgggcctattgaagacacctgctcagtatgatgcttctgagctaaaagcttccatgaaggggctgggaactgaggaggactccctcgttgagatcatctgctcaacaaccaaccaggagctccaggaaattaacagagtctacaaagaaatgtacaaaactgatctggagaaggacattatttcggacacatatggtgacttctgcaagctgatgtttgccctggcaaatgttagaagaccagaggatggctctgtcgttgattatgaactgattgaccaagatgcccgggatttctgtgatgctggagtgaagaggaaaagaactgatgttcccaagtggatcagcatgatgaccgagtagagcatgtcccacctccagaaagtatttgataggtacaagagctacagcccatcaagagagagcatcaagaaagaggttaaaggagacctggaaaatgctttcctgaacctggtccagtgcattcagaacaagcccctgtattttgctgattggctgtactactccatgaagggccagggggctcgagataaggtcctgatcagaatcatcgtctcccgcagtgaagtggacatgttgaaaattaggtctgaattcaagagaaagtatggcatgtccccgtactattacatccagcaagacactaagaacgactacccaraaagcactgctgtacctgtgtggtggagatgactgaagcccaacatagcttgagcttccagaaacggtrctccccacgcttccagctaacaggtctagaaaaccagcttgtggctaacagtccctgtggccgtccctgtgaagatgacattagcattgcccccaacctcattttagttgcgtaagcatagcctggctttcctgtctagtctctcctgtaagccaaagaaatgtacattccaagcagttggaagtgaaatctatgatgtgaaacactttgcctcctgtgtactgtgtcataaacagatgaataaactgaatttgtactttagaaacaaaaaaaggaaaatgtttatataccttgaagttatgaatatatttatctatattaacttttggatcgtttagtattttgctttttgtattttattctatattgacatgactcacatttgagtcttttttttccaaataagcctatctaattttctcattaccatttactaaaacgattgtatgtatactaaatattgtaactttatattacaaaattgtatctgtagaacaagtcatgccacattgttgttcttcaaggaaaccttgacaaattctatcctttcaatgttcaaaaggaaattaaataagcttggctaggatttacaaatctattataattttgaactgtaatcaatatgggtaaaattgtcattgttacaaatgaatcttataatcctgatgataacataatactttattaattcagatattttaaaatttctctagtgatattttatagtttgtccaaataggttgtttgttatatttgtttgatttatttgtagatctcttatattttaataacatttaaattgcattttaatatgtaattgttaattgttaattattgcaatagacatacaatatatgtckgtttactcttgctcattaccttataaaaagttacacaaatttgaaaattacataagtgttctttttatgcacttctttttatggattttatgcacaatcatattattttacaaaagtgaaattttatttattccttttaaatatgtatatctctttttttctcctgacttacttcactatctagaacctccagcattatatagaatatataatactcaaaaactggcagggtactaaaggtccacttctgtcagcacaggctcctagaactgtaagtttgcattagcaccaattcacgtgttgttgcatttctccaattaattgtaaattccatttggaagagcaaatggaaatatgtgactgaatccaggctgaggatttacagaaaagagctgatgaattaagaattctggcaagggagtcttttgggtggtcactcatgtaatgctggctccacaggaaagtaagttttctctttctaaagaacatcagctgactccaagtaaaagaagactcagaggatgtcttgatggtgataaatggcttgttgttagttttagagtaagaaattttgaagaagatgggttgtgttcagaaggaatgttattgaagtacactaggtttaagaagtagaagacttctgaataatttatggttaatataaaatcttttgaattttaatatgagtcaagttctagttctttgcatacaattaaggaattgagtcaataatgattttagaatccaatcttcattattaaggcaataataactttgcttctgactaagaaagaatagcttgctgtagtccaatgtttctacaagtggaaaagccaaataacatttaaaacaaagcagaacaaaacaaaagttatttcaaggcaatacaaaagtaatacaggaataatatgagagaccaagattccagagtcatatatcttggaaagatgagctaatagctggttacatttcttcatggaacatgcaaatgctcattacaaggtaatggactatgattccaggcaaagagctgagctggagggccataaaggtaggtaggaggcaggaaaactaaaaggctaaaaagttgggttcttggaaagaaggtaggagcagagaacagaactggtgctgttctggttgctattactgcatgataaaaatcctcaaaacataacaccatcaaacaatgaacccttttattttgctcatgatgttacatgtttggaattcaagaaagctttagctgggcagcttgaagtgtctcacctggttgtagtcgttgtcagctgggccagtcatctgatatttggagttaaatatgcatctaatagggctcattctcatggccattaatgctagggttcaccaaggaattcagcttaatctggtgaccaacgaggctacacaagtcctctccatcatagcaacctcttggcattcagatattttacataatggctggattcccaggagaaccaaactaaagttctccaatatgtcacaaaattcagtgagtgcctggaaggtaaaagctttttttgttgttgtttgctggttttttgtttttgtttttttttttataagactcctaatcctctattaccttcttccaagtcttcagctcctgtttcaaattgtttttgacattcttgaacacacaccaataataatgataataataataatactattagtagtagtaataataacagctaaaacagataggaagacatgatttaggtgctattaggagcgctttactctattaacttccttaatcctcaccacaatcctattaggtaggaatgattgttatccgtctttcacagttgaagaaactgagtcacacagaggttaaaaaacttgccaaaaatcacaaagctagtaacttgcaaagtctggatttgaatacaagcaatgtgactggagactccacgctctttaacactgtactctactcatacacactttggactcattagggcagtttgaaaaccagacgctgataggcattaggatctagacagaggggatattattttgcttgattttcaaatagtagtctgatgaggaactatttaaatgatttttagggatcttactgagaataaagaatggagtcaggctttaaacacgggttttcatacaggactagagcactctctatgaaccaaattatgagtctagaaaaattattccatgctactaagacaagttgggtgacgttggaaactttaaaatctgctcttgaggggataaatgtatccctgtcctaatctcacacccatgtacacttcccctactgtccaaacaaagccaaaactcctttaagttatttgggtcataaaagcaagtttgttttattgtttctctttctattttcatcttgaaacttcttctcttgctgtatgcttgtgatataaattataaatttaattataaatttaaattataaattataatcctgagaaaggttaactgacttgttagaaaggctatagaagctgagatacttactgtccccttgcgcttgttcatgcagcaacagtagtcagctggagagcgcctcatgtatcccagcctctctctctctctcaggtagtggtgatgaatttgaactaccatttctatactgaggtaaaagctgtctgcttattacagcagcgagaggacccccatgggtgcaatgaatggcacttacatcatatattttccttgggtgtagcagaacttgttcagagtggatgctcttggtacatgtagcatgactgatagttttatgctcagcctttataggtccacaaagtcatataaataaataattctattaactgccaggacttccttggaaatcactgggtatgtttctatgggtctttacaaattcctccatgactatataagaatctatatacactggaataacttagggaaaaggtaaataaccctaatttgctttctgtggcttgatttttttaatcctcttcttctttctttccctatccttctttttctataatttgctaccgttgaaacataatacgtaaagggagtaccacatctttagaacatgaagcaaggaagtgaagatactttgccgatcaaaaactaattattaaaaaatggttaagaaatagaactaaagaaaaatattcaaacaatgaaggtcctaaattaaaatagacacaaaaagcttactttatagacttcagcattttatggttggtacacagcttacacataaaattaattttctggaacgttgctcattaacatttttattgtttkccatattttaaaataatatcgttatgtaccactggataaaactaatagtgcattaaaatggtctcaccttaaatcagagacagtttgctgtaacaagaattttcaattctctaatgacttttttctctgctatgaaaagaaaaagcttctatattaaaatgatgtacacrggcaaaasgaaatttatgatctaaacttgctgcaaatcatttgtattgatctgttttgtttccattctgctgaagctaatggaaatcatttgtcacctgacttgtcccagctgatttgaaaaaaacactggaccatttatcaggccagctgaaggtctgatacaagtgtgcttatgtctgcaatcrccaagatacattgagtttctaggcaagtagtgaatatattaggctatattggtcataggcttaaacaaataaattaaatatgaatgcatacataatgcattgtaataaaacactaaataggaaacttatattagccagtagaatactctacttacaagtaagattttaacagtttttattttgtaagagctaaaattaaaatataattatttaatattaattctggtaatagtgtatactggaaacaaaagtaaaacatcattacaacgcattaaagtcgataaacaagctgcttttctgacacagacattcttttgaggtagacttttccctttgaagaacatttttggtgagtcaaacatttaatccatgtaatttcataaatgataaatccctttgttttaaattcatttacataaaaataaaaggtgtgtttctctgcttgtgtgtatgtaagagattttaaagagttgatcttgagaagtcaattacgttctgtgtaattttcaaattctcataaacacactaccccatttatcccaacccacatacttcagctgaaggtgaaaagaaaatatctctcacaaatcttttgtgatattctttcaggctattaaagagcaaaaatctttgtaagaataatgtattcaaactttgtcattatggtatttcatgtttaaaatgtatctcacattaggacaaatttacccatgagttaaactcatatataaaacaacattatagagcccagtaaagagtgaactactttccagagttgcactgtatacttaatatatgtaatgagcattcatttgtatttattttccaatgtactatttttttctatatctcctgcattccttctctggtaattgtgcactatcaatttgaacagcgtttcagaatttgcatttaaatgctaaaattgaagaggatagtatggctcattcattcactcttcatttatttaacaagtgtttatcaaatacttctaggaagcaggaattctgatagatatggggatacaatggtgtgaaaaaagaatatattcatgttcttttagaacataaataggaactgagtaagaggatataattcatttcatacgctgtccttgtttgatgacaagttcatgacataaagttatttgataaaatataggaacatgtgagctaactcaggctgttcttgatatttgtttcttttagtaatccaattgttaaacagtatattttgatcaaaattttttacaggctaattacaattttctgaacatctagaaaattatgaaacattgaggacaagtattttaagtttttcatattaaaaaaatctgtcagatatccactttatatttgttgaatacgtgagttagttaattaataataaatgctgtcatctgttcccttatggtttagtattttctttgtactctaaaattagagggggctaaaaatatcagtcatatttataaatttgactctccagctct

SEQ ID NO: 6755 - DNA, 22536 bp, Homo sapiens
acaggtgaaattttttgcaggcaactcctttggggtaaagctccttaactaaccattccaaactcctcagggtatcactttttccctgatagcggttctaaatactctagcctaccctggtggccaattctgggtaatgcaatctcaagaggaggctttccagatttcctcccaagcgttatgctggtcagagagatcctgcaccattagagggaagaaatgtagaagctgagggttttcttgccttctaccagtggaagcccaggaaaagatggaggaggggacaagaaaattcaccttgcagtttttccaccaatacttcctctttagcttggcagcactgctctcaaattgtgatgctcctgcctgcaaggcatcagctcggtcatccagctctgacagcttctggtccctctccaggaccttgtccacgttcacacgtatgatgtccaccacctgaggagggcacagaaacaaagctgctaagcttcctgccagagacagaggaaaggacaacaaccagagaatcacaagtctggccctgtgcaactctaaagggtgctttgcctctcagggcctttgactattctcctacgaaaaaaggagaaaagataagaagttcccttttgtttccaaactcctagatttggaaactttcagagaaacagctatctacctacctcctccacttgtgcctgggtttgctgtagtcgtctgttactggtcatgttaggaggagggccagggggacccccacctggggcagtcccttctgtcccttcagcaggtggctgagctggagcagacctgtggaaagacatgtgcagagtacacaaagtgaccaagacaagaaaggagctgggcgtggtagcacacacctgtagtcccagctactcaagaggctgaagtgggaggagcgcttgagcccaggagttcgaggccagcctgggcatcatagcgagaccccatctctaaaaaaacagacaaaaagaaaggactcacatgcatcctcaccccaaaccacttaaacaattatgattaggctatacaaaactagaatggattcttgctccttggcaatctgaagtagggagacaaaccatagaggcaagaagtaaaagatgaaagactctgcaacaacatttggatggggttcagggacatccaggatggcatcaagacatctcatctggggctatcctttgactcaactcaaacaagtcctctgccatgatggctacagggacatatggcctagccttgtcctaaatggcatttccccgctgatatggtttggctgtgtccccacccaaatctcaacttcaattgtatcacccagaattcccacatgttgtgggagggactcaggggaggtaactgaatcatggggcccatctttccggtgctattctggtgatagtgacgaagtctcatgagatctgatgggtttatcagtggtttctgcttttgcttcttccacattttctcttgctgctgccatgtaagaagtgcctttcacctgccgccatgattctgaggccttcccagccatgtggaactgtaagtccaattaaacctctttttcttcccagtcttgggtatgtctttatcagcagcatgaaaacagactaatacagtaaattggtaccagtagagtggggtgttgctgaaaagatacccaaaaatgtggaagcgactttggaactgggttaacagggagaggatggaacagtttggagggctcagaagaagacaggaaaatgcgggaaagtttggaacctcctagagacttgttgaatggctttgacaaaaatgctgttagtgatatgaacaataaggtccaggctgaggtggtctcagatggagatgaggaacttgttgggaactgaagcaaaggtgactcttgttatgttttggcaaaaagactggcagcattttgcccctgccctagaaatttgtggaactttgaacttgagagagataatttagggtatctggcagaagaaaagacgcagtactaaagaaaaaaaccatttttttgagaagaaattcaaggcagctgcagaaatttgcataagtagcaaggaacctagtgttagcccctaagaccatggggaaaatgtctccaggccatgtcagaagccttcatagcagcccctcccatcacaggcctggaggcccaggaggaaaaagttattttgtgggccaggcccagggtccccatgctgtgtgcagcctagggacttagtgccctgtgtcccagccgctcccactgtggctgagaggggccaatgcagggctcgggccgtggcttcagagggtggaagccccaagccttggcagcttccacatggtgttgagcctgcagatgcacagaaggcaagaactgaggttcgggaacctccgtctagacttcagaagatgtatggaaacgcctggatgtccaggcaaaagtttgctgcaagggcagggccctcatggagaacctctgctagtgtagtacagaagggacatgtggggttggagcccccacacagagtccccactggaacactgcctagtggagctatgagaaaaaggtcaccattctccagaccccagaatggtagatccactggtagcttgcaccgtgcgcctggaaaagccacagacactcaatgccagtccgtgaagggagccaggagggaggctgtacactgtaatgtctgtcagctcacccctttttatattcaagttattggttatggttattggtttatatgcccagttattggttatgcttcacacaagatgaggaaatcagggctgccataagggcagcttggaaaatcaccaaaggcaaagtctatgtaggtggagtgagtcaggactgtttgtttgctttgtttttggcagagaaaatgggggtttcacttagatagaatctggggcccaaagcaattacattagttatggaaactgttccaagagcatagacaggaagcaaaaatgctagaaattgtcctcaatgtgcatgcattatagacattctgtcccttccttttctggatttgacagtctcagatgactcccttggttacttacatcccaaagagagatcttggtttactgtactatacacacagagaatgttctctcattctgtaccactcaaagttagtgtgtggtcttcaagacaaactcctctccatgtcccaaaacatggaggctaaactcacctcctaaagaattcccagaagtataacctaagtcatgagatgttctcggccaaggaagcacccacaggcaggggggagatctctcaaatttgatggagaatagaaattacagtaagaactcctcaaacagaagcagaatctcaccaaacatacttcacaggagcagtccaagagtaaatgcaacaaaaatgaaaccacaaagtcacctaaaaggaaattatttgactaattacaatagaactaatacccagaagctcattctccttgattaagtgaatttcttttagtctaaaaagatagagaataactcctcagagaggctatggtagcagattacacctgactcattccccatttgaagaatcacttttccatttccctctaaggtgcaaaggaggtaaagcaaagatagacacaaagtcatgggagccacaagactcttgtcctgccactgagctagctaagcaatctagctctcgacttaaggcagaaaattcaatgagtaggtagcagccagtgttggaagcagtccaggatggtagcaccaatgacaagattaaggtcagagacctcgtgatgccccgctagccaccacgatttttctgttgccttctgttcatcccacgtagatactatctggaagccccctccccaaaatgaaaacaactggaattctacggcttgcccaaaatgcatagaacactcatatctggttaaaaccatagaaatcaaaaagaaaaagtgaaatggctatgaagtatttgcaaggccaatttcacttactacttgttgggagttggaaacactcaacagtaaaatatctagggataattacaacccttatgtaacacaagtaaatctttcccttttttgtcacttagagaagcaacataaatacatctaggaccaggccagggtagtaatcagaaagaaaaatctgtattagacatattgaggtcttgacagagaagtacttcgtttgtttagccgtagttttccctcaagatcatgcgaagggggtgatgttgaagactgctggagactaaactgtgtgtgttggaggaaagggggaaagctcagctctccctatttctcctccaactatttggtaagactcggtgatagaaaaacatctcctatacgaatggccttggtatgaacagccgcttgggatgacaggccactatcccactaccccttgagtctttctgagctgctcacctggtgccagagaactggcagataagtttctgcagctttgctcactgccatgaggggggctagacatcacactttgggtgaggggtaaacaaatccagagattgtagggcaacataagttaccaactggcagttgcacccatgactgtctttcctgaggcgctgagtagtgatttagccagatgacagaaatacctttcgagtcccctgcccagttgtctccatccaccacccccagcccccgccctctccgagtctccactataccaaaaccagaatgaggcgccactcagacgagaggagagggtgcaatgattgtgggacccctgcgcccctgccccgcccgtggggtgctagctgtggctggtgcgagaatggggtgctggcccccctccctgggggtggcccggtccggaggcggcgcgcggtggtagttccccgcgttgctgcagctgctgcattgcgccattttccgtcccgcagaatcgggagcttggggcgagagttgtcaaggaggtgccgagcccccacaccagagtcaactcacatttttctgacagagagagtgagggtctgttcctctccggaggctgcggcgagacacccggcgagggacgctgcggctgaagtggacggaactgccaagctccgcctcgcgccgactaccccgcggtctagctgcgctggaacttactgcagctgccgcgccggcctccgcctttattagtgctgaccacgcctcccggataacggtgacaaccccgcggcccaatccatgcccaggacggtcgcccagcgctacaggcctagcccgccccgcccctgccaattgccagtcacaactctcctctcatccgactccggaaaggagcggttgctgtgaggatccttcagtgatcaatgcgaccatagtttgcgctccagtctggcggagggacggggcggggtggagatgaggtctgtcccttcggagggcgcttcagcagtttgttaggcatttgtggtgcctcccaaccaatcgctaggcagttactgaagaccgtgcccgcccctgccccaccccgcgccgggactcgcgcattcagctggaggcggcggcttcctggtgcgcgcccagccctggtgccctgctctggccctcgctccgcaccaccgccccgcctctaactaacgctctgagagggtgcaggagcctcgagacacagccacaagctcctggtgccagataccggatgcggggttccgtcccaccaaagcaagcacgaagctttcgttcattcgtttctttcaacatagccttcctaaattgaactccctcccaaacctgctccagtcgaggttaccacatcgactcagttgcccagaccagaaacgtggaaaccatcctagatttcctccccttcacctttacctctcccccagtaatctgccaaatcgagttgatttttccttcttggcattccagtgattatctcccctctgctcactattatccctttcctggactccatcagttggaaaattcaccattattttatgtcccgctaagaaaaaaggttacaaggccgggcgcagtggctcacacctgtaatcccagcactttgggaggccgagtcaggcagattacctgagatcaggagttcgagaccagcctggccaacatggcgaaacctctgtctctactaaaaatacaaaacagccaggcatggtggcgggcgcctgtaatcccagctactcgtgaggctgagataagagaatcgcttgaagccgggagccgacggttgcagtgagcygagatcacgccactgcactccagcctgggcaacagagcaagaccctgtttcaaaaaaaaaaagaaaaaaggttgcaaattatctgtgacaaatgctttccttaccacttagcatttttgttttacatgtattgaaaatatgggtttatatacataccgatttctatatttcactcttgtgcatgcataaaaagggaaatagaaaacaataacatggtaactatccctaaaacttcacagagactgattgttaatgattcacttttttgactcagtcttggatgtccackaatttccacgcaatgtagtcctctgtgcatttcataagggctttggtgatgcagcatttcctaagagtgttcctctccaggctctagagttttcttccaagcctcagacacccatttggcaagctttgatgctcatgagcaggtatgacaaatatagtttgactgctgtctgactaatagctaaagtgaaacatcccaattagaagatattgaaatgcaaaaaaacaaacaaacaagcacacacaaaaaacccaagtgcctcctaagatcaatgatacatcattctgcttccagtcttgccatcctttacatctattctctaaaaagtccaccaaagttatctatccaaatgtcacaagtcttcttaaggaaacaattgcacttggaaacataatgcattcatcatatgtgtttatcccattctcctcctgaaaccacatcaaaatggcaagttagggggaaaaatgacaatttgggaaaatttgcaaaaaattataagcccccaaagacaaaaagaatggggccgggcgtggtggctcactcccgtagtcccagctatttggggggctgaggcrgaaggacagcttgagcccagatgttccggttgcagtgagccgagatcacgccactgcactcccacctgggtgacaaaatgagaccctatctccaaaagaaaagaaaaagggccaggcgcagtaactcacacctgtaatcccagcaatgtgggaggccaaggagggcggatcacttgaagccaggagttcaagaccaacctggctaacgcagcaaaatcccgtctctactaaaaatacaaaaattagctgggcatggacgcctgtagtcccagctactcgggagactgaggcaggaggatcacttgaacccgggaggcggaggctgcagtaagccgagatcttgccactgcactccaacctgggcaacagaatgagactgtctcaaaaaaaaaaaaaaaaagaaagaaagaaagaaaaagaaaagaaaaaagaatgggaggaaatatttctggcagcatgaatgcctatttatycccaccaactttcccctgaaaaaaaacttaaaatcattgaatggtgactcacgcctataatcccagcattttgggaggccaaagcaggaggatcacttgagcccaggagttcaagactagcctggacaacatggtgaaatcctgtctctacaagaaatagatacaaaaaaatatagctgggtattgtggcacacacctgtagttccaactacttgggaggctgaggtgggaggattacctgagcctgaggaggtcaagaaagcagtgagccatgatcacaccattgcactccaacctgggcaacagagtgagaccctgtctcaaaaaaacggggttgagggggtggcattttttaaactttttttttttttttttgagacggagtctccctctgtcgcccacgctggagtgcagtggcgcwatctcggttcactgcaagccccacctcctgggttcacgccattctcctgcctcagcctcctgagtagctgggactacaggcacccgccaccacgcccggctaattttttgtatttttagtagagacagggtttcacagtgttagccaggatggtctcgatctcctgacctcatgatccacccgcctcggcttcccaaagtgctgggattacaggcgtgagccaccgcgcccggccttaaactttttattttaaagtaattatagattcatataaggtggccaaaaaaaaaaaatacaatacagggaggttcccctaaacccctttacccagttcccccaacagtaacatcttgtataaatacagtttaaaattattaaaatattaaaaccaggaaattawcattagcaaaatccagagtttattcaaatttcaccgattttccaaactggcatgtaccaccaaacacttctttttgtgttcgtgtgtgtttgagtggttttatgcaattgtatcatgtgtagatttgtgtaaccacaaccacagttaggatacagcattttcacattactgcaaggctcccatgtgctacccctttatattccaacccaccgccatccctaaaccttagcaacactaatttgttctccatctctgtaactttatttcaagagccttatgtaaatgtartcatgcttttttctayatcacgtaacctttcaagattggcttttttcattcatccaagttattgtgtgtatcattactttttcaaccatccaagttattgtgtgtatcattagttttcaccactgattaatattccgtggtacatttaaccatttacctgctgaaggacatttggagtgatttcagcactgggctattacaaataaagttgctgtgaactttcatacaggttttgtgtgaacataaattctcatttctctgggataaatgcctgagtgcaatgcttgggcagtaaggtaattgcatctctagttttataagaaactgcctttgcctgtgttgcccaggctggtcttaaactcctgagctcaagcaattctcccacttcagcttcccaagtagctaggactataggcatcatgcccagctgtatttttcttattttaaccattctaatatgtgttcagtgctatcattgtggttttaattcttatttcactgatggctaatgatatcaaatatcttttaaagtgtttgccttgtatatattatcctatttgatgaaatgttggttcatgtcttttggccattttctttttttttttattgatcattcttgggtgtttctcgcagaggggaatttggcagggtcataggacaatagtggagggaaggtcagcagataaacaagtgaacaaaggtctctggttttcctaggcagaggaccctgcggccttccgcagtgtttgtgtccctgggtacttgagattaggaagtggtgatgactcttaaggagcatgctgccttcaagcatctgtttaacaaagcacatcttgcaccgcccttaatccatttaaccctgagtggacacagcacakgccgcagagagcacagggctgggggcaaggtcacagctcaacagcatcccaaggcagaagaacccctcccagtacagaacaaaatgaagtctcccaagtctacttctttctacacagacacagcaacaatctgatttctctatcttttccccacctttcccccttttctattccacaaaaccgccatcgtcataatggcccgttctcaatgagttgttgggtacacctcccagacggggtggtggccgggtagaggggctcctcacttcccagaaggggtggccgggcagaggcgacccccacctccctcccggacggggcggctggccgggcgggggctgaccccccacctccctcccggacggggtggctgccaggcagagacgctcctcacctcctagacggggtcacggscgggcagaggcgctccccacatctcagacgatgggcggccgggcagagacgctcctcacttcctagacgggatggcggccgggaagaggtgctcctcacttcccagactgggcagccgggcagaggggctcctcacatcccagatgatgggcggccaggcggagacgctcctcacttctcagacagggtggctgccgggcggaggggctcctcacttctcagatggggcagstgccgggcggaggggctcctcacttctcagacggggcagccaggcagagacgctcctcacctcctagacggggtcacggccaggcagaggcgctccccaaatctcagacgatgggcggccgggcagagacgctcctcacttcctagacgggatggcggccgggaagaggtgctcctcacttcccagactgggcagccgggcagaggggctcctcacatcccagacgatgggcggccaggcggagacgctcctcacttcccagacggggtggcggctgggcagaggctgcaatctcggcactttgggaggccaaggcaggcggctgggaggtggaggttgtagctagccgagatcatgccactgcactccagcctgggcaacattgagcactgagtgaacragacttggtctgcaatcccggcacctcgcgaggccttctgagtagctggtactacgggcgcctgccaccatgcctggctaatttttgtatttttagtagagacggggtttcaccatattggccaggctgatctcgaactcctgacctcagatgatctgccagcctcagcctcccaaagtgcgggattacaggmgcgagtcttgtatttcttttaaaatcaatctcacacacacccttttttctccctctccctcacatatcctgttttctctttttagacatcggactattaattagayattggactatttggcttaattttctaattatctttcttatttcctgtctccatctctgctggttcttgttcttggtgccttgttccttatttgtttggaatttttgaccacaatttatttttcttggaactgtatctgtggaaattccccgaggcctagattaaagatgagttcatccagaaaggatctgcattgcttctgctgggttcttggtggtactgtcaatccaaaaccactttaaattcttgccattttctttttaggatcaacaaagagttcaggcagaaacaccacagcctgtggttatacattctctgcaaatacttaaaagaaaaaaataaaagaactccagcaggcacctgggttccagacaaacaacattccacggagtgctctggggcagtttgggttctagtatattcgtaattcattcttagatgaggatatagtcctttggggttctgactttatggtaaggactttctattagatttccaaccttgggtaagccctgggctttatttcstgtgccacagtggtagcctgtgaggctgctacgctcatattaaactttatagcaaataccctcagagcaaaatagtctttgggactcagcaacttccctggttactggctttcacttagtttttcgtgtttaaatagtctttactctcaggccaactcataaatagattttatctatagaagaayaaagaagaataaaataggaggaataactatctcatgcttactactatatagttgcagtaatcaagacagtgtggtattggtgggaggacagacacatagatcgatggcaccgatgagagaatgcagaaatagacccctacaaatatgcgcatctgatttttttttttttttttttgagacagagtcttgctctgtcgccaggctggagtgcagtcatgcaatctcggctcactgcaacctctgcctcccaggttcaagcgattctcctgcctcagccgaccaagtagctgggactacaggcgtgcgccaccacgcccagctaattttttgtatttttagtagagacgggktttcaccgtgttggccaggatagtctggatctcttgacctcgtgattcgactgccttggcctcccaaagtgctgggattacaggcgtgaaccaccatgcctggccttctgtattttttaagattcctatctggagagcccccagctctgcggcggcttcacccgcgagtcccaaggcaagcgagcggctgggtcgcccccaccggccccatggcagcccccggggccccagctgagtacggctacatccggaccatcttgggccagcagatcctgggacaactggacagctccagcctggcgctgccctctgaggccaagctgaagctggctgggagcagcggccgcggcagccagtcaagagcctgcggatccaggagcaggtgcagcagatcctcgcccggaagggccgcagctccgtgggcaacggaaatcttcaccgaaccagcagtgttcctgagtatgtctacaacctacacttggttgaaaatgattttgttggaggccgttcccctgttcctaaaacctattacatgctaaaggctggcacaactgccacttatgaaggtcgctggggaagaggaacagcacagtacagctcccagaagtccgtggaagaaaggtatttgaggcatcctctgaggagactggagatttctcctgacagcagcccggagagggctcactacacgcacagcgattaccagtacagccagagaagccaggctgggcacaccctgcaccaccaagaaagcaggcgggccgccttcctggtgccaccgagatatgatcgttctgagatcgcgggggtccgccgtactggcaccacaagcaggcagcaccactttgacaccacaggcagtaccagcgtggctctgttagtgacaccgtttttgacagcatccctgccaacccggccctgctcacgtaccccaggccagggaccagccgcagcatgggcaacctcttggagaaagagaactacctgagggcagggctcaccgtcggccaggtcaggccgctggtgcccctgcggcccctcactcagaacagggcttccaggtcctcctggcaccggagctccttccacagcacccgcacaccgaggaaagctgggcccagtgttgccgtggattccagcgggaggagagcgcacttgaccgtcggccaggcagcggcagggggaagtgggaatcttctcacccagagaagcactgactcccagctggggaatgcagacatggagatgactctggagcgagcagggagtatgctcgatgcagaccagatgccgccgtccaggatttctgccgcagccactttcatacagcacgagtgcttccagaaatctgaagctgggaagagggttaaccagttttgtggcatccccaagcttctgcagctcctaaaagttcagaatgaagatgttcagcgagctgtgtggggggccttgagaaacttactatttgaagacaatgacaacaaattggaggtggctgaactaaatggggtaactcggctgctccaggtgctgaagcaaaccagagtcttggagactaaaaaacaactaacaggtttgctgtggaatttgtcatctaatgacaaactcaagaatctcatgataacagaagcattgcttatgctgaccgagaatataatcatctccttttctggatggcctgaaggagactacccaaaagcgaatggtttgctcgattttgacacagtctacaacccactggatgtctaagaaacatgagtgctgctggccctgrtaggagaaaagcaatgagaagatgtgaccgactcattgactcactggtccattatgtcagaggaaccattgcggattaccagccagatgacaaggccacggagaattgtgtgcacattcttcataacctctcctaccagctggaggtagagctcccagagaaatattcccagaatatctatattcaaaacccaaatgtccagactaacaacaaaagtattggatgttttggcagtcgaagcaggaaactaaaagagcaatactaggacatgccgatgccagaggaaaagagcaaccccaagggcgtggagtggctgtgacactccattgtgataaggatgtatctgtccttgatcgccaagagtgtcccaaactacacacaggaagcctccttaggcgctctccagaacctcacagccggragtggaccaatgccgacatcagtggctcagacagtcgtccagaaggaaaatggcctgcagcacacccgaaagatggtgcatgtcagtgacccaagtgtgaaaaagmcagccaacttgctgctgaggaatctgtcccagaatctttctctgcagaataaaattgccaaagaaactctccccagtttggtctccatcattcctgatacagtcccgagtactgaccttctcattgaaactacagcctctgcctgttacatgttgaacaacgtaatccaaaacagttaccagaatgcacagcgccttcygaataccgggggcatccagaaaattatgaccatcagtgcaggcgatgcctatgcctccaacaaagcaagtaaagctgcttccatcctcctgtattctctgtaggcacacacggaactccatcatgcctacaagaaggctcagtttaagaagacagattttgtcaacagctggactgtcaaagcctaccactcccttaaagactgaggaaaatgacgaagtattctcagctgcaaaaaaatcccacaggaaaacacctatttttctactacccagcccaagaaacctcaaaagcatgcctcgtttctatcattttctatttccatggtcccccgaatccagaaaacaagtayaacataatcttatgagtcttccagaagacttttgcaagcttgccaccagtagatactggtcacaggctctacaaatagtggtctttgttattagggcttatggtgcatggcctcctggaaccaaaatgtgaattcatgtggaatggactttgatccaataaataaggaaagaagttgttgcattactgggattttaaaagcttgatttacatttatattccttttctagttcccatgttttgtcactcatgtgcacattgcttcaccattgggccatgagtatattgttctgtagtgttgaaacagaatggaaatgacaagaaatatctgcagttatccaggagaaagtataatggcaaaattatttgtttctttgtttactttgtgctcgtttttatctccttaggtttttttcctctgatttttaaataaacttaagaaatttagattacagagtatgcatgactgtaagaaaaagaaattgagaggaagtgatcatagcaaattaaagaaayctttttctcccaaaacttaaagtaaaataaataaaaataaaaataaatcttttccccagagaaaggcaactgtgattataaagtttaaccttcccccaaacactgaatgaatgagatttttgctccggaaatactttacctataacaacaccattaaatccaaatctcttctaaacaatggcattccgtgtaatgcctttcctggacwtttttttttttttttttttttagacggagctcaggctggagtgcagtggtgcaatcttggctcactgcaacctccgcctccctggttcaagtgattctcctgcctcagcctcctgagtagctgggattacaggcgtgcaccaccacgcctggctaatttttttgtatttttagtagagacagggtttcaccatgttggtcaggctggtcttgaactcctgacctcatgatccgcccggctcagcctcccaaagtgctgggattataggtgtgagccaccgcaccgggccttctgtattttttaggccactgccctggactagtggaagaatggactctagtctttatctgcaagaggaactaaggccttctatcagactgyccggccagcctggggcactgaaaatacagctcattttaatgagttacattatcaaccagctttgcccagcatttaagaaatatcacagggccactaaatctcatatgatcttcttcaagccattattttaattcaagaaaactctagagaaaaaagtgaagaagtcatgttgaagaagatataagaatgtgtcaagaccatacagaaatgatatgagaaatactggtgttttaaaaggtgacatcatccagtgaaatgaatctatattaaatgttattttaactgcattatgattaaaaccattcatatagagttagtcttcacaactactattctgttatattttgttttttttttttttaaatctgacaacgtttgtcataagtaagataaggaaaaaaactcttcaactccttttggccagaaaagtgtaatagaaaataaatgttgaatatgtacttaagtctttattatatttgaaacttaaattttttttcagttttaaaagctgaatgaagatagcttaggtaactaacctagttcaaaatgaaatttagataccaatttttaaaatactggagagaatttatatgtctttttccagagttctgataataagcatttggagtgcattcattcctccagataataaatgtatgttcaagaactttttgtgttttttaagacattaatagagtcttcaataatattaaatacaaaaggagacaaaaaaaaaaaagattcctatctggactgggcacggtggctcacgcttgtaatcccagcactttggaagtccgaggtgggcagatcacgaggtcaggagttggagaccagcctgaccaacatggtgaaaccctgtctctactaaaatacaaaaaattaatcgggcgtggtggcacgcacctgtagtcccagctactcgggaggctgaggcaggggaatcacttgaacccgggaggcggaggttgcagtgagcctagatcatgtcattgcactccagcctgggggacagagtgagactccgtctaaaaaaaaaaaaaattcctgtctgttttagtcaatgacaatcaaattatctgtaaataatcacagtttgatctcttcgctttcattcctcatatctattttttttaaatagcattgagtatttccatactaaattaaattgcagcagtgatagaggccatcgtaggacaggcccagtggctcacaccggtaatctcagcaactcaggaagctgaggcaaggagaatcatttgaacctaggagttagagaacagactggaaaacctagcaagaccctgtttctacaaaaaataaattagctgggcatggtagtttgtactcatagtcccagctacttgggaggctgagacaggattgcttgagcctaggaatttgaggctgcagtgagctgtgatggtaccactgcattccagcctgagtgacagagaaagaccccatttcttaagacaagcaaaaaaaccccaaaactgaagtactactaacatatgcaacaacatggataaaccttgaaaacattatgctaaatgaaagaagccagtcacaaaagactggaatattgttccatctatatgaaatgtccaaatagacaaattcagagatgcagcctgtaatcccaacactgtgagaggcagaggtgggcggatcacttgaggtcaggagttcgagaccagcctggccaacatggcaaaacccagtctctactaaaaatacaaaaattaactgggcatggtggctcgtgcctgtaatactagctacttgggaggctgaggcaggaggcaggagaattgcttgaacccaggagacagaagttgcagtgagccaagattgcacctttgcattctagctgggcgacggagtgagactcagtctcaaaaaaaaaaaaaaaaaaaagaaagagaaaggaaatagattaattggccggacacattggctcatggctgtaatcccagcactttgggaggccaagacagtcagatcacttgaggtcaggagttcaagaccagcctggtcaacatggcgaaaccctgtccctactaaaaatacaaaaattagctggacatggtggtgtgtgcctgtaatctcagttactcaggaggctgaggcaggagaatcacttgaaccttgggggtagaagttgcagtgggcaacaaagcaagatttcatctcaacaaagaagaaaaaaaaagtacctggggatgggataagtggttgaaaagggggaatgacttgtaaggggtttcttttggggtaaggaaaatgttctggaagtggagggcgggggcaggtttggtaagatattggtcaaagggcctgggctgggcacggtggctcacatctataatcccagcactttaggaggctgaggcgggctgatcacgaggtcaggagatctagaccatcatggctaacatggtgaaagcccgtctctactaaaaatacaaaaaattagccaggcgtggtggcacacgcctgtagttccagctgctcaggagactgaggcaggagaatcacttaaacccgggaagcagaggttgcagtgagctaagatcgcaccactgcactccagcctgggtgacagattgagactctgtctcaaaaaaaaaaagacattggtccaaggatacaaagttttggttagacttgggaataagttcaagtgtctattgtacaacacagtgactatagctaataacaatgtattgtatacttgaaaattgctgagtagattttaagtgttcctatcagaaaaaatgaaaagtatgtgaggtaatgaattctttaattagtttattttagtcattctacaatgtatacatattttaaaacatcatgtataccatcaatatatgtaatttttatttaaaaatttaaaaataaataactttttaaattttttgacattaggtagtggtgatggttgcacgacctcatgaatatactaaaaaccatttgattgtatactaaatgagtgaattgtatggcatgtttatcatttcttaatttttaaaagtggagtgggaaacttgaagatttgtttctaaattacctttactttgtattaaatcaaatcaaaatgaagagaaagttatgtgacaaaaacagcaatcctcttcttcaccccagcctaccctctagactagcttcccagaatcagagactttcacttcttttagctatttttatttatttgtttgtttgtttgtagagatgggggtcgtgctgactaggctgatttcaaactcctgggctcaagtgatcctctcttctcagcctcccaaagtgctgggattataggcatgagccaccttgctaggcctagctgtttttttctggtacttatcatcataatatgaaataatattatgatttatcagtgtggtggtttttgtttttttgtttttttttttttttttttacacagagtctcactctgtcactcaagcttgagtgctgtggtgcaatcatagctcacaacagcctcaacctccctggtctcaggtgatcctcccacttcagcctctctcttttctttctcttttttttttttttgagacagagtctggctctgttgcccaggctggagtgcagtgtgcaatctcggctcactgcaacctccgcctccctggttcaagcaattctcctgcctcagcctcccaagtagctgggactacaggcacccaccaccacgcctggctaatttttttgtatttttagtagagacgaggtttcaccgtgttggccaggctggtctcaaactcctgacctcatgatctgcccacctcggcctcccaaagtgctgggattacaggtgtgagccaccgcgcccagccacacttcagcctctcgagtagctgggactagaggcgcatcccaccacactagactaattttgtattttttgtagagccagtgtttcgccatattgcccaggctggtctcaaactcctgggctcaagtgatcctcccgcctcagtctcccaaagtactagcattacaggcgtgagccaccgtgcccaaccagtttatcagatttatttatttatttatttatttatttatttatttttgagatggagtcttgctctattgcctaggctggagtacggtggcatgatctcagctcactgtaacctccgcctcctgggttcaagcaattctcctgcctcaccctcccaagtagctgggattacacgcatgcaccaccatgcccagctaatttttgtattttttagtagagatgggattttgccatgttggccaggctggtcttgaactcctgaccttgggtgatccacccgcctcagcctcccaaagtgctgggattacaggcttgagccactgtacccagccactttatcagttttatagaaatcaattagattcctgttataaaagatgaggttttagttctttttgattatctcatttgatattgtaaaaggaattttaaaaaatgcaaatctataattaaaacaaaacgaatgttaaacttggaacagaaggaaatatcttaacttggtaaaagttatatactagagattcataacaaatatttaatagacatgtattccatttaagatttagaacaagaagaggatgccttttttttttctttcttttcttttcttttcttttttttttttttttttttttttttttttttgagacagtctcactctgttgcccaggctggagtgcagtggcgcgatctcagctcactgcaacctctgcctcccggcttcaagcgattctcctgcctcagcctcctgagtagctgggattacaggcgcctgccaccacacccggctaatttttgggtttgttgttgttgttgttttgttgtttttgagatggagtctcactcttgtcacccaggctggagtgcaatggcgcaatctcggctcactgcaacctccacttcctgggttcaagcgattctcctgcctcagcctcccaagtaactggggattacaggtgcccgccaccatgcccagctaatttttgtatttttaggagagatgggctttcaccatgttggccaggctgatctcgatctcctgacctcaagtgatccgctcacctctgcctcccaaagtgctgtgattacaggtgtgagccaccacccgttgttttttttttttttttttgagacagagttttgttcttgttgctggcagggattacatgcgtgagccaccgtgcctggccctattttttttttttttttttttttttttagagagagagataggctcttgctctgtttcccaggctggagtgcactgatgtgatcatagttcactgcagccttgaactcctgggcccaagccatcctcccacctcagcctctcaagtagctaagacgacaggcactcaccagaactacaggtactcaccaacctacccagctatttttttctttttattttttagaggcagggtctcactatgttgcccaggctggtctcaaactcctggcctcaagtgatcctcccctcccgcttggcctccaaaagtgttgggattacaggtgtgagccactacgctggccagtacctcattttacagcttaataatattccattgtcagtgtgcaggaaggagtgttaaaaagaaagttaaaaaaataatattccatattctggttgggtgtggtggttcacgcctgtaatcccagcactttgggaggccaaggtaggcggatcacgaggtcaggagatcgagaccaccctggctaacacggtgaaaccccgtctgtaccaaaaatgcaaaaaattagccgggcgtggtggcgggtgcctgtagtcccagctattcaggaggctaaggcaggagaatggtgtgaacctgggaggcggagctcgcagtgagccgagatcgggccactgcactccagcctgggcgacagagcgagactctgtctcaaataataataataataatattccatattctattgtatggatagaccacattttgtgtatccattcaccagctgacggatatttggattgtttcttctttttagctattatgaataatgttgctaaggagatttgtgtacaagtgtttgtgtggacatatgttttcagttttcttgggtataaacctaggagtggaattactgggtcatgcggtaactctacacttaactttttgtggaactgccaattttccaaagtggctgcaccattttactaaaggctaaatttttttttttttgagatggagtctcactctgtcgcccaggctggagtgcggtggtgcgatctcagctcactgcaaactccgcctcctgggttcacgccattctcgcgcctcagcctcccaagtagctgggactacaggtgcccgccaccatgccaggctaattttttgtatttttagtacagatggggtttcaccgtgttagccaggatggtctcgatctcctgacctcgtgatctgcctgtctcagcctcccaaagtgctgggattacaggcgtgagccaccgtgcccggccccctaaaggctaaattttaataatcattacaatcttcaggatctgactcttgcttcccatctctttccctgtcttttaccacaagca

SEQ ID NO: 6756 - DNA, 48069 bp, Homo sapiens
aagaaaatattatagtatactatatggctctgtcatgaacactatttacacagccaaaataatgtaagcaccaaatatcaatgtaatcaaaaactgtgatatatctataatgagaggatagggagaaagggaagtattggggggcagaggagaggatctaatccatagtaagacatcaagacataacatctaaaagtaacctctaagctgggcatggtgactcacacctgtaatcccagaactttaggaggcccaggtaggaggagtgcttcaggccaggagttaaagtccaccctggcctcaagcagggtctcaacatagcaagaccctgtctctacaaaaagaaaaataaggaaaaataaaaataacatctaaaatggacaatcagaaaacagcattgtaagcaggtaacaataaatatgatagtaatatcaggagaaacagctcagtgcattagaagtaactgttgtaaacagagtaacagcagcccctcaaggatgtctatatcctaactgccatgcctggctaattctttgtattttttgcagagataaggttttactatgttggccaggctgatcttgaactcctggccttaagtgatccgccggcctcagcctcccaaactgctacgattacaggaatgagccactgcgcccaggcagcctttatatttttctagtagtattgacttttttttttttttttttttgagagggagtctggctctgttgcccaggctggagtgcagtggcacaatctcagctcgctgcaacttccgcctccctggttcaagtgattctcctgcctcagcctccagattaactgggattacaggcgcccgccaccgtgactggctaatttttgtatttttttagtagagatgggattttgccatgttggccaggctggtctcaaactcctgacctcaggtgatccgcccacctcagcctcccaaagtgctgggattacaggcgtgagccaccacacccagcctatttgtctttcaaaactctgtgcggggtgggggtgcacagtggctcaggcctgtaatcccagcacttagggaggccaagacaggcagatcacttgaggtcaggagttcgagaccagcctggccaacactgtgaaaccctgtctctactaataataaaaaaattagctgggggggtggtggtctcctgtagtcccagatactagggaggctgaggcaggagaatcgcttgaacccgggaggtagaggttgcagtgagctgagatcatgccactgcactccagcctaagcaacagagggagactctgtctcaaaacaaacaaaaaagaaactctctgtgtacacacacacacacacacacacacacgcgaaagttttatacaaattaaaatttaatttaaaaagagaagaaacacagactcactctattcccagaactcacaatatgggggaggaaacagacaagggaaccagcaatatcaacagaagtagaaagctgaacacaagaagaaaggcatctctttttttgtttgttttttttttttgagatggagtttcactcttgttacccaggctggagtgcaatggcgtgatctcggctcactgcaacctctaccttccgggttcaagtgactctcctgcctaagcctcctgagtagctgggactacaggcatgcgccaccacgcccggctaattttttgtacttttagtagagagggggtttcaccatgttggccaggctggtcgcgaactcctgacctcaggtgatccacctgcctcggcctcccaaagtgctgggattacagctaccgcgcccagctgaaaggcatctctttaagatgtgaggggagtctgaggggagaaggcatcagccaggaaacgcagaaaaaggccttctggtgagggaaccagtcctggtggggggtgcaggggggcctggcctttggggacgtggagtagggaatgacygggcatctggtggtttggcagagccagcaggaaagcatggaggggtggttctcagcaccagcaggtttgatgcctaccctatccccggcttctccagttggggtatgagactgatatgcatatttacagagggctggtacaaatgagggcccacaataaacacattttcgtagaacgtcaattgtattcaacagtaaagcaacttaaatacttttatactaaaaccagtacacatatattacagagaatacaaacctaatgtgacaagatgacttcttgtttgcaaggcccactttagatactaaagtacttgctgaccactgagcatcaagagtcaatcctctctgtaactaattagagtcagaagaaaatcataaagcggtacagcatccatccatcaaagaatccgggaactttacaccagcaactgtcggtgggtgcccaccctcccaaggtgggcagaagacataccttgggtcccactcaacactaatcagaaagttaacaagcatctcattcttttccaaaagggtctgggtcctgctacagccagttaggttagctcagcctgaggaaacagagaaaacaacgatgctaattcttcctagatatactctctaggccatagcccgccagcccctattctaagcagtaccgcagtcactgagaagagccccacctccactatcagcacccctaaccccttacagtacaggcctctgttacagaatgcattaaagacactttttccatggaaggaagtctagaaacagggtacatcccttgagagagggtgtcccttgtggtccacaatacaagggtggaaacttttttctattgttgtgaaaacaataaccgcatgacagagacctgggaacttttttttctataaaaagccactgctgaccacagaagaagtggggggataaatcaatggaaggccacacagaagtaaaaagcaatttagttggatttggttcatttgcctcttttttgttttgtgtgtaaaacacatacacattcaaaaaagactgaattcaactgattttatttatttatttatttggatggagtctcactctgtcccccaggctggagtgcagtggtacaatctcggctcactgcaacctccacctcccaggctcaagcaattctttctgcctcagcctcctgagtagctgggattacaggcacccatcaccacacccagctaatttttgtcttttttttttttttttttttttgagacggagtcttgctatgtcgcccaggctggggtgcagtggcgcgatcttggctcactgcaagctccgcctcccaggttcatgccattctcctgcctcagcttcccgagtagctgggactacaggtgcctgccaccacacccggctaaatttttgtatttttagtagagacggggtttcaccatgttgaccaggctggtcttgaactcctgacgtcaggtgatccacctgcttcagcctcccaaagtgctcggataacaggcatgagctaccttgcctggccctcgactgatttgaaatgaagaacagagaacatgaaattttaatggcaatagattaaaagaaactacaaagatatattgttgataataaagaaagaatgagggaggagggcaaggagaaagaggtaagaaaaagaaatggatagtggagggagatgtagcaaaagaagaatgggagacagcaagattcagggacgggtccacatgcctaaccgcacacaaaaagggggagccaccaaaggacccacagagacactttctagggcttgaagagttagccaaagtcagttacattgttcatggccagctgttggctgtagctccagaccttgaactattatcaccttttatccttgcctttgaatggttagtgctctggtcaaccactgttcacagctctttaattgctcattgaaacattctgaggcttagcttaggtcacaagccagaagctcccccaaatgagctacaattcagtaaatcattcatctccaagtatctcctctgaaaagggagtattcgaaacactatctcataaaacattcaaagcactgatgaaaatccaaggagaaaatgctgcttgcactgaaacgaaatccatggaaaagtgttttgagttttgcatttacaaaaaaaccgggacttcagcagaactgagtcccacctcagcatcagccagcatcaccacccgcacacctgacttcccacatgtccacattctgcatgctcccgtgaatctaaaggcctcagttggtcctgaaactaagcagcctccatgacactttgcaatctgagggtcaacaggagcaatcccaaggagattccaagacagtctcaggctgaggttgaactctcagtccacccccccaccccccatcctaggctaccaaacctcccctcacttcaccccaagggctgcagaagagctcagctgtttcagagacaatagagcctccccctttcaagctccatccttttctcctccaagcttggtttctgtgtttttcccttccccacataatctgtccccagcctcctactttctcgtctgtttctccaatctctctcttcttgtgctcctatttcctcctcatgtttcgctattccatcttagaatcatttctctcagaggaagagggggcttaacagatacatataggccgggcaccgtggctcaagcctataaccccagcatgctggaaggccaatgcaggcggatcgcttgagtccaggagtttgagaccagcctgggcaacaccgcaaaactctgtctctacaaaaagtacaaaaattagctgggtgtggtagtgcgtgcctgtggtcccagctactcgggaggctgaggtaggaggactgcctgggcccaggaggtcgaggctgcagtgagccatgattgtgccactgcactccagcctgggtgacaggtgagaccctgtctcaaaacaaccaccaccaccaaaaaacaaaaaaacccagatacatctggaaacaagatctacaatctatccccccgagttcccaccccagctccacatcttgctagttgtgcaaccttggaaaaatggccaaacctcccaacycctcaaattcctcagtttggcgggggagggggaggaacatggcaatcacagaggtcttttataactctcatcttctagataggtaaacgttcacctgtataaccatgaataaaccagcaagttaaacatccacagggaaagagaacaaattacagaaactccctttcctcagcaatctatcatcccaccctcatctcccacaaccactcactctggggtctgtgcctctcactctggaccgttctagctctgaattgtttacatacttacagtaaaacctcacaaatcacactaatcaaggaaaaggtagatgtgaatccaacagaagcctgcatcctagaatgcttcttctatgccattgtgcaatactttgaatttattatcaatttagcaaacaggaaagaacctgaaaatgccatcacaaactgtgactctaagaacagtggagttgtcaggaaccctggaagaccttctgccctatcatcctccacttcaccagcaaggacacaggcccagagagcagaagccactagcccaaagcccaaagattggtggccaggaccaaagctagctgtcctgcctctggtccagagcttctccaccaaagctttttgagaccatccatgcctttctcctagagacaggtcaaatcctaaattaccatagagtgccctctacagcaaatctatctccacatccagggaagggtctggagataagttaggatgacctgatcattatcaatgctgcacaataaaaactttctttcctggccctgccctttcattgtttacaaagaaaaccctagactctgctatctgtattgaactcttattttagagaaggggaaagagaggaacagctgaacagtgctttgttctgccaggaagaatttgctcatcctttcccataactcctacccactccccaatatgcccaatctcttycgaaaagtatacagaaactctccaactacaacaaatgaaagcaggtaggagaaggaaaaggccaacaaggcgggtatcgtccacaagatgacaataccctcccaactctttaccccacagggtagacagcagttcatttcagttgctaattccctgcagggaagtcgccaaaggagtggtctcagggccctccagctgagaaatgtgctctctgcaacccctggagaactaaccctttcctaaccatctgctccaacagtgccttgggcaaaggtgccaacagaccaacccttcccttctttcccctcaggccaagaaagagacatcagagcttggttggcaaggggctatttaaggcagcatccagagggcggggcagaaaactgctggaggcatcctcctcctccacccctccccctcacagcccaaacacacgcccctcactctgtagacagccatctgcctcatcggtgtctgaaggctgtagatatgtccatcatctgtcttctgtcattgatgctgctgacccctctgtgtccaccccacttttaatccaaccctcctctcttcgatcaccaccaagatacctttccaaccaaaaccacagaattgaatctaagcagaggagctcaaaacacaaggagagtgaagacagccaatccatcccccgcctccacttaagaggaaaaaagggcgcggggggctgggcgggggggggggtgttgaggggagagatggagtcagaggcctgacacgccagataggttccatgatgtctctagatgaacctccctcctattgacgatgaaaccaattccagcaatttcagcaggtcggccctgtgacaacaggggcatcccaacgctcagtgtttaaaacaaaaatccaaaggctcgcccagaacatgctgggaaaaaccgaggactgaacaaaacgagccatgctcagtgggatcccttctgcttttacgtagcaatgtaatagcgtaataaattcttgtctgcctggagaaagcatgcactggtgaatttcaaagccatcttacgacagcggatgcatggggatgcagaattcgacagcacattcccccatgaaggaaacataatgacttcaagcctctttcccctctatcttgaatggcgctaccacgtatcarggaagccacatcggaaagcagcgaggtggtagcaggggatgcccggggaattcggagaaaggagttgcttgctgtccatgtcggtgatgagctgcctagcaagatgctgtcagccactcggggagaagaaggggcacgggcggcacgggcaggcgcsgtgtccccggcgcatactagtccccgttcattcaggcgggtccggccaaccgcgtcgtccttgcgcccctcccgccgccctctccaggggatgctgatgaatgaacacacctgagatgcctccatcccgccgctcgctccctccgccttcctctggctgctgcagaggtgcccctcctcggtagtttcactttacagcacaaacccattcgggctttgatgtctcctccacccacccaaattgcagccaccctgagacgggcggacattctctcctagcagaggccatgatcgtactaccccacacccaccaaaaaaggaaatttaaaaacccccaaccctggaagcccccagatcctccgcaccctggggaactttccttgaaagactggggattcgccgagcaggcaggatggacggttcggccgcgagggaccaccgctttccctgtgcccatggggggatgctctgggggagggggtcccccaagtccctccaacagctggccctttaaatgcgcctcctccgagcgcggaacaaaggcgccgcccgcgggggccgagccgcgcacacccccggcgctgccgccgccgagcgggcaagcgcggccgggcgggcgagcgcgggcttaccttgctggtcgccgggcgggcgggctgcgcgcgtccgccccactcgcactacacgctgcagctggccccgctctgtttttctgggactcagcgctgacttcaccgrcactccgcggacaaccaatgggctgcggtgcccgccccctcattagcatgcctctggaaccgtccactctggcagcgcccggccagygggcggkgccgggggcggggccgggcccagccgtgacaggaaggggcgtgtgcgcggatgggaggcgaagaagtgtccggcgcccggctcctggcattgtgagcccgccggcctccgccggtaacgggcgcgcgggcctagtaaccctttccgtcctggccgggccggacgctggcctggcgcgccttctggtccttcggaagggtcgcccacggggagcttggaaggaaccttagacgtaaaataacagtgataagttatttaactcctgggcctcagtttacccatctgtaaaatggcataatagtccgacttcgtaaaatctagtgaagattaacatagttaacataggtgatgcattttgatcagttcctggccgtcgtgctacataaacgtttgctgttgtcattcgtgtgctctgtaccagccagtgtgcttaatgcttcccggatatttcctcatttgatcctcttagcctgataagagaggaacgattactaatccatatttttctagtgagaaaactgaaaataattactatttttatgcaggaaaactgaggtgtagtttaagtggcttgtccgaggtcacacagcaagtggtgcaaccaggatttgaacccaggctctgagatttcactcatgcaacacacatatatttagaggctctgtggcagtgctggaccccagtgttaactgcagagaacaagacaggcaaggccttttcccttaggaagcttccattttagtggagacaagtaaataaataagatcctctacaatgtgaaaagtagagtgcatacaatgcaacaaggtcattgcaagtggggggaaggcaccgtgttagatggggttcagagctaaccactgtgctatgccattctcctgacctcctctagtccccctcagagttacagaaaaggaaacagagacagggatcagagtggggaatctgctggcccaaggtcgcagagccagcaagtactggtctggaacttgctccctccatgcccagcttcccacatccctgaagataagacactcgccctttgggctgagcacaactgatttttgtcagctgcccttgcaagcatcttcagccagagcacattctcagtgaacaggctgtgggtggcagggtaaagactggccttgataactgcacagactgatcggaaactcatcagcaaagattcttagatgtcagggaacggtgacaagtctttggtgaccacctggtgtcctctgctgtgtattaaaaaaaaaaagaagagtcctagccatctggaagcttactctataaatgagaaaacactggggaactactcaacctagggagcccccagcccacggccttcccctatctgcacctcatcctgcagcttttcaaagaacacttccccggctctcctatttatttactccacaatctgtgtaagacagctctctctgggctataaagtaataaaacagctagtatttattgagcacgtctaggctgctatgcaccgtactatacttgtgctaagagctttacatgcgttaactcacatccaccacacgaccccaggtgggaatagtgtcgttatcctgaggttatccacagaggtgtataacaaagggtagagagactagttacttacccagcaaattcagggcaacaccattttagaatagccaaaaaaaaaaaaaatcaaaacaatccaaatatccaatttgagtgcattggttaataatagtacaaccatatgacagaatatcatatattaatagctacaaaaaatgaagaggtttattgacacataaagatgctcataataggctgggagtggtggctcacgcctgtaatcccagcactctaggaggccaaggtgggcagcggtggatcacctgagctcaggagtttgagaccagcctgggaaacatggtgaaaccccatctctactaaagaatccaaaattagctgggcatggtggcgtgcacctgtgggaggctgaggcaggagaattgcctgagcctgggaggcggaggttgcagtgagccaagatcgtgccactgcactacagcctgggcaacagaataagactccatctcaaaaaaaagaaaaaaaaaaaagatgctcagattattgaatggaaaaataggtagaaaactagttttatactgcaatcccattagaactattcttatgggattgcaagtaattatttttgctcatccatagtcttctgatttttttcttcataaacatctaccaacttgtccartgaaaataaaataattttaagatgaaaaaccagactctatcaatgaagatttcatctacactatctcaaggaatcttaagggaggcctaaggcttcaggtcatccctcaaatattgaacctctctgctgtttccagtctgtgtcactgttgcatgtctcactgtaaggcataacattgccattaggatttatgaaagaaatggtaaaatagtggaaagtcaagaaagaaggaaagtggaaaaaacagaaagaaaaatcctactggtggccaggcgcagtggctcacgccagtaatcccagcactttgggaggccgaggcaggcggatcacgaggtcaggagttcgagaccagcctggccaacatggtgaaaccccatctctactaaaaatacaaaaaattagccaggcgtggtggcacgcacctgtaatctcagctactcgggaggctgaggcaggagaatcgcttgaacccaggaggtggaggttgcagtgagccaagaccacaccactgcactccagcctggcgacagagcgagactccatctcaaaaaaagaaaagaaaagaaaaatcctactgtccttcaggactcatctcaggtgtctcctccaagaaatgttgaaagtcacggtctttcgatgggttgggtttttgtttttgtttctgtttttgaaacagggtttcactcattcctgtcacccaggctggaatgcaatggcgcaatctcggctcactgcagccttgatcttctgggctcaagggatcctcctgcctcaccctcccaagtagctgggactacagrcatgggccactgtggccagctaattttgtgtatttttggtagagacagagtttcaccattttgccaggctggtctcaaactcctggactcaagcgatctgcccccctcagcctccccaagtgctgggattacaggcgtgagccaccacacctggccagtccttcartgttttaacrctgaaagcaacccaagaaatcatcaggtgtaatcgtgtcagttcatcctatctccagtcattcatagattcatctgggcagcaggccctgagctaggtgctggctacaaggtggtgagagagatacttgctccctacttcccaaaggtgagccctagggaatcagaggcccagggaggttcgtttgggcagggccagccctgtgtggatgcaacctgtgctgaggagggccccacacttgattacatgctctgctgtcaccatcttgaaattcttcatttttgaacaaagggccctgcctttaatttttgaactgagccctgtaaattatgtaacttgtcctggggagggtgaaccttgaggccttgtcagtgcatcagtgactgacccttgagtaaaacagtaaaacttcctgttctccagtctcagtctccaccgtttctcttaaacctgggtccacagggaaacgggaggactcctgccttccagccctacagtgcttcatttcttcctttctcatggaacttgccatatttggcataaactcctgtatatttgtgtgtagtcttatccctcatttcctctccccagcagattgtaaattccatgaggtcgtgccttgtgtctgctcatctcaaacagtgcttagtcctgtgttttacacgctgtttaaaatgtgcttaagtttaatttaatcttattagtaactcctcgttttctcttcatgtgtatcagattattcccagcagtccttccgctgttggagagaatttaaaatatcaggcggagagtcatgcacacaaaccaggatcataaacatgctgtgggacgcatccccaagcakgtcataagtgtgaggaattaggaaaggagggagcaggatttttcagaggacagcccagagtcgtcagcctttacttcatcttcagagccacacagattgggagagagggaaataaactagaggccctggagctggcagtagcataacagttaaggctgcgggctccagagacacctggcagaatcctagctccagtgcctagtgtgcagacttctctcatctgtaacctggagaaaacacaaccctccataggtttacttgcaagctgaagatgagatcgtgcatggatagtgcctacacactgcctgacacacataagcatcaataagtgaatattattttaacattactaggaggcagtgttgagaaagacamcttcttagaacacgttggttttggtaagttgttttcccagttaccygaaatattgaccatagtcattttcagagatgccgtgctggagaatgccaggagaaaagaagaaaaccaaatgagagaaagagagttatgaatcaaagagttttgctgctgtatcaccaaacaccccttgatgatttttgtctaatgccttctgtagcatcttacagaaagcgaagcaagtagtggaaagagcaaaactccttaataactgattgtcttgtttcttactgattaattactgagaaaaaagtaaatctacaaacgcgtgcctcagggcacggaactgatttgaagatgatggaacgcccgagccaagaattccacattccttagaggtcaatgctggtggacaatgctttagggaagtttggtgaaatggtggaggttgatcaagagaagtctatggggccaggtagaaacccagaggagtaggagggattgctgtgcttgggaagcagggataggatgagtatgagtaaccccaggactctggtcacagggcctctgtttatcaatctataaacactggctctggctggcacactggtgcgcgcctgtaatcccagtgctttgggaggctgagttgggaggtcacttgatcctaggagtttgaggttayagtgagctatgattgcaccactgcactccagcctggataacagagcaagatgctgtatctaaaaggtaataaaaataaaaacacttgctccagtgtgtcttgtgttgttgcttgggagaaaacttgtacacataatagcaccccaaatattgtactgtatttgaccaaatatccaaggtttggcttggagattattttatgctattagatagtcaaaataaagacatttaaaatgttggcctgaccaggcacagtggctcattcctataatctcagtgctttgggaggctgaggcaggaggatcacttgaggccaggagtttgagaccagcctgggcaacatagcaagactctatctccacaaataaatttttaaaaattaactgggcaaggccaggcatggtggctcacacttataatctcagcactttgggagggtgaggcgggtgaatcacttgaggctaggagtttgagatgagaccagcctggccaacacagcgaaaccccacctctactaaaaatacaaaaattatgcaggtgttgtggcaggtgcctgtaatcccagctactcgggaggctgaggaaagagaattgcttgaacccaggaaatggaggttgcagtaagccgagatcgtgccactgcactccagcctgggcaacagagtgagactgtgtctcaaaaaaaaaaatacatagatattagctgggcatggtagtgtgtacctgtagtcctagctactcgggaggctcagacaggaggataccttgagcccagaagttccagcctccagtgagccatgatcacatcgctgcactccagcctgggcaacagagcaaaatcctttaaaaaaagaagaaaagagggagggagggagagagggagggagggagggaagaaggatggcaggcaggcaggcaggcaagcaaaatcctgtaaaaaagaagaagaaaagaaggaaggaagggagggaggggatgggaggggaggagaaaagaggggaggggagaggagaggggaggggggagcagaggggaggggacaagaagggaggagaggggaggggaggaaggaaggaaggaaagagggaaggggaaagaaggaagttgacctcaatggacctttgagagaaattacaagtacagaatacacttctgtcaacttctactgtgtcaatggaaggttggggtttgggagagggtaacacaaggtgccaatctgaaggcagctgctgagagatcagtttttttttctgactggggcaggggatttattggttagaacatgctgagtttaccttagaaggcttcctactctaaagtaattacattaatgaagtgtttacttgagaaaaccatttttaggttggaggatacagctgataactctaagagaggcattgtgattgagactgaagagatgaggagaggtgccaggaaagaggaataaggagagagagaggaggaagaagaaggtggcacagggaaattgggagagagccagagaaagtgagatcatcttgatggactgagagaaaaaaactgcagcttcagaaacagagcaactaggctcactaatataaccctaacaaggttaaaaaatcaacgacaatggtgttaacagaataactgatgttctggaagctgctggaagcttgtcagaggtgattggaacagttcactgagggaactcattacacaggaccaaatcaagtcacaggggtgccctgggaaggctaattccacttcttcagcgtttctcaagtggagatgcagagtgctggggggagtggaggagggcagaagtgaaggtggctggactgcgcattgggtatcaaccccttctccattacctcagcaagtctgtcctgtccccgaacttgctttgcctgccccctctcagcaaagcctaaaccttgagttacctcgacccactttcttgaagggcagtttagtaaccatctctggtcacctggccatgccccatagggatcttaccacctgctcacccaactgtctgaaccaagtggttcattcaagtgtacataggctgtctctcagaggaggcctgggaaagtcctctgtttccagggatgtttggaaccctctttaaatggacaaatctaagccatgcttgcatgacctacctgtttctgtggctcagtttgtaaaaaatagatattctgaaagaaccatgtcctacagccaaagggagtgagggcaactggactttgtagatgggagaatgggacagacatacctatctcctcccttaggccaaaagaaccaaggacttcttcatttgaycttgaaggagaagtagagcagaaacagagagcatgctagaaccaggtttccagaacctgttgcagcccaagctgcctcctccagagaagaagtgttattcacagtgaatcctccaacaggagcaaagtaaggactcccaaggggtcagtggcagcccctttacttgggcttggtgtggcctctattgacaaggctcaatacgttaaacaacgtggttcccccagttggtatacaaaccataggctgctgggtagatggggcctactttttgattccagaggatgttatacccggactagggctgttaactcccaaatagttctcagagggtggggagcagccagacaggtggccctgggattgtagaaagagaactctcaaactgttcagttaaccaacatcatgggcctattgtgttccaggtctcagtgttggagaaccagaaaataaggaccctatcctgaagacacaattgagtgaaaagaccaacaaatatacagtcaatcacaagacaatgtgataaacagactcttctctttctttgagatacaattcacatacatgaaatttatctttttaaagtgtataatccagcagtttttagtatagtcataagattgtgcaaccatcaccacaatgaaattctagagtatttcatcaccacatgcacaaaaagttatatctattagcagtcactccccattttccttctcccctaatccctggtgataactaatgtactttccatctctatagatttgcctattctggacatctcatataaatggaaccatactatatgtggccttttgcatctggcctcattcatttagcataatgttttcaaggttcatccttgttgtagcatgtatcagcattttgcccctttttatggctgaataatattccattgtacatatataccacaatttatttatccgttcctcagctgatagacatttggggttgtttctactttttggctgctatgaataatgctgctatgaacatttatgtacaagtttttgtatgaacatatgttttcaagtttcttgtgwgtatacctaggagtagagttgttggctcatatgcgaactctatgtttaagttttggaagaactgccagactgttttccaaagcagctgcaccattttacattcacgccagcaatgtatgagttgcaatttctccaaatccccaccaatacttgttattgtgtgtaatttttattatagtcatctcagcaggtataaagtggtatctcattctggttggtttgtatcttttttatttttcttttatttttattagagacagggtctctctatgctgcctaggttggagtgcaatagctattcacagatgtaatcatagcacattgcaatctcaaactcctggcctcaagtgatcctcccgcctcagccttcggagtagttgggactacaagcactcaccaccctgcctggcttcttattgtggttttgatttgcatttctctaatgatcaatgttgttgagcatcttttcatatacttattggccacttgtatatcttctctgaagatatgtccattcaaatcttttgcctttttagctggattattcgtcttttgactgttgagttgtatgagtctcagtggagagcatttatccaagaatgagggtagaaatgatgaataaaggggtggttgcttagggaagccttccttcctggaggagataatatctgagccaaaactagaaggataattaggaagaagtaaaacaatcattcctgtattctacaaatatttactgaatttctcctctaccgggcactgaggctagtacaaattgattcagtcttcactctcaaggaaaggatctgtgatgggtcaatgatttcacattccccacaggttctacaggaccccagcatggcctcaccctgcatcttctctgttaggctgggccttggatctcaaacctcagtttgctggccatccttgggtttcacctgatgaccccataggggaaagtgggtggacatttatccccagtggttgtggtggagctagctgactgattaggcctgtcagacttagctccttgcctgggacccagtttcagcaggacactccttatctaggatcagacttggtgtttcctgattccttccccacttttctgagccaaaccatctattctaatcaggcctctgaagaagcaagtgggcttctgaacacacagggcatccacagaggctttacccatccaagcaacattatgacagcagaaaaggcctctttattatagaataggcaactccaatattttacaatttttttaagtaggttatacaacagcatgaatcacatgatcttattttttaaataattctgcatggaaagaaatttggcaagcataaatgaaatttaatagagatgaggggctaggtgtggtggcttacacctgtaaccctagcgccttaggagactgagggtggaggattacttgaggcagggaattcaagactagcatgacaatatagcaagaccctgtgcctacaaaaaaaaaaaaaaaaaaattggccaggcatagttgcacaagcctgtagtcccaactctttgggaggctgagtgggaggattgcttgagcccaggagtgcaaggctgcagtgagctatgattgtaccactgcaccccagcctgggaaagagagcagaactctatttctaaaaatacatataatagaggccgggtgcggtggctcacacctataatcctagtactttgggaggccaaggagggcagattgtctgaactcgggagttcaagaccagcctggccaacctggtgaaacccatgtctctgctaaaaatacaaacgttagccggctgtagtggtgcatgcctgtaatcacagctacttgggaggctgaggcacaagaatcacttaaacctgggaggtggaggttgcagtgagccgagattgcaccactgcactccagcctgggtgacagagcaagattctgtctccaaaaataaaaaataaaaaaatacagatgacttaatttttttatttttgctcatcagtactttttaaattttttgcaatgatcatatcttgctagtataacatttaaggaaaaataaacttagtggcacaaaaatgataggattttaaaaatattactctatatgtgttataaatgtgaattaattgtataatacttttgtgatttgctcttttacaaagttcataatcatattatttgctaatcacattgcctaatacagaaaatggtttagaaacagaggttagtgttgtttacaaaacagaaaatctttgcttcttgcacatattggctgcccagacctcccagtcttagccatcaaatcttggcatttaccagcctctggaagcataaaaccctgagtgagggagttctcctggcctggtctacagaagcttagacaagaattgccacagaagcatcaaaacaatagaatgtgatgtcgtgggcatcccagggggaaataatgctagattgaaatgaatttttgcatcactgattttccctgctgattgagccctgtttatctcatttggcagatcagcctcaaagtgcatgaactatttgtgcctcattagtttccaatagattgattttgctaggattgcgaattggccatcttgaattgcagcctgcagaagccggctctggctcagcctcagggggacagacactcggaacaacagccgccactgcagccaccaccactgaaaaagaaaccggagagctgttctaaggctacaaggacaatagtaccttaaatcttctctggaaccagacagcataaaatacggacttctaagaaagcaaacaagggtcatctctgctttcttttctttctctctctcacgtattctccttggcaactgtctcatctttccctcaatccctccctccctccctccctctctctctcatcttagccccttcttcaaatgttaaaaaaaataaaaacagttttaagagaaaaacataaacaacttgaagactagtttataaaacagtgaatgctgaactacttacaatatagtgattagaaagaaaagcagaatataaaaccaaacatacagtacaatgacattgctttacaaaaaatatacatagaaaaaaggattaaattttaaaaagcatgccaaatgtagacagcagtaactttggctggtggggatatggatgattatcgtttttttctttaaacttttctgcactcaaaactgtctaaaattattaacagcacacttatcctcagaaaattttaataaaaatacataaagtaataaaatggcacatatgtaatcaacttaaaaagccccccccccttttttttcattcagtaaggtgtattagcctctataggatatttgctggcttggtaattaaaatgttaagggtaaatccagctttaggcaaaatctgatccagcaatccaagagccattgtcagagctctctcttttcagttctgactgcctttctttgggtgttggccctatcctctcctactgcaatccaggatacctccacctttttccacttgaaggcgaacttggtggtcccagattcatacttttccacttctgggaacccagaggtgagatgtctttccccactagcttcaatgagacaaatactgggaaaagaccagggttggatgagttgggatcatggaccatgatgagtcatccctggaataatcaatgtgacaaggggattgggtactatgaatgtctggtccaggtcacacgtcacggtgggaaatggacatggaggaggggatggataaagcacaaaagcacccaaacaaaaatgtccctaagacagcacagtctcccctgcaaggattgtatgatctagttagaaaactaagacaagcatagaaaagggtaaaacaaaaacaaggaataaacaataagtttatttaaacatggcacaaggcagaacatgattaattttccaacaatagcatagacagtaagtcctaggccaagaattcaggggtgggataacctgagcaaacttggtggaagggaaggaatgtaagctgggttctgaaagatgggaaggtttggagaacagatggaaatggcaacatcagttcaaactaagagaatggcctgagcgtagccacrgagatggtcaagtgaaagatgtgtgagaatagaaacagggtcaggaatgtgagtaattttagtcacacgctagagatattaattggggctggagtgcagtggctttgaaagctaagctcatgactttgaatttatgtggtagccggtgaggagtcaccaaggtttttaaacagggaactggtgagatgcaggtcatacataaggacaacctgcctcgtggcaggagcaggaggaactggagctgagaaagatcagaggcagaacaaccagttgagaggttgctgcaatggtccatgtgtgaagtaataagggctggaatgagggaggtgacgatgaggaatggaaaggaagagacatttcattcatcaactcattcattcatccaacaagcatttgttaatcactgacaacmaggaactctactagatcagccactaagttcatcaaggaagstgtggcacggcttgccttctgctggaataccaggtcctagctgaaggtgaccaaagaccatggtgttgctgttaagagaaatagcaaagtcaggagaaagaactagtttgggcatctaagaacaaataattccgaatctagtttgayggtacagcagggcrggcagatggaactatccagcaggcaggagaaaatgtaggacttgacctggagagggagatcaagacagaaggttgagatgtggatacctctgtgcacaggggagcgtcacctccacaggagcactgtgacttaggaaggtctgagccagcctgactgagctttatgccgagctcagagcagggacaaaaatggagatctctttgcctgtccgctctacgttaggtgcaatataaacctgatacgaacttctgcctctttcctgtgattcctgacacgatggccccatcagcatcacacatgttgagatgatttttcagaagctgattacttaaaacctctaatccaactcccgtttcacctctggattgaaaagtgctcttctccctctgtcccagctagaaaagggtgtgctgcaaccagatggtaaactgtggacagaaataaaccctgttcacatgtagcaagaatatttatatccaatcccataatatcactgcaggcataattatagccaatcctgcaattgtgctgcgggtatcaggcatcagaaaaaccaacccaaagtgccacagagagaccagggagatatgggaactgtagaggcagctgctgcccctgagagacccctgggcagaagtagggtggggctatttagagattatggaggggctctgccaatggtggtgaagagggacgtgataatttcacagattacatagctcaaactccagtttcagtagtactgcatgcttttatttgtaacttttaagaaattataaaatcaatgcttattcattgtacaaggtttaggaaatatgggaaagtgtctataatcccacaatccaaaaatagcattgttgctggtatggtggcttatacctgtaatctcggcactttgagaggccaaggtggaaggatggcttgaggccaggcattgaggaccagcccaggcagcacagtgagaccctgtctgtctctatagaagtaaataaaagtaaatagccaggcatggtgacatgcacctgcagcctcagctactcaggaggctgagatggaaggatctcttcagcccaggagttcaaggctgcagtgaaccatgctagtgccctgcactatagcctgggcaacagggcaagaccctgtataaaaaaaaaaaaaaaaaaaaaaaaaagtggccgggcacagtggcttatgcctataatcctaacactttgggagcccaaggtgactggatcacctgaggtcaggagttcgagaccagcctggccaacatggtgaaaccccgtttctactaaaaataccaaaaaattagccgagtgtggtggtgcacgccagtagtcccagctactcgcgaggctgaggcaggaggatcacttgaatctgggaggcagaggttgcagtgatccgagatcgcaccattgcactccagtctgggcaacaaaagcaaagctctgtctcaaaaaaaaaaagcattgcttgctaacattttataatttgttgttatagtattttactttgcatatatgtgttttgtgtcatactgtaaataacattctacatcttgtttatttcatttaatatcatatttcctcatattgttaagatatattccaaaacattattttactgtggtatttcaggggaagaaggtaacaaaaaaaaccacaaaacattattttaaaacctttttctgtagtatttttatgaaatggaatactatatagccgttaaaatgaataaactagagcttcatgtagcaacacaaataattgttaatataaggttaataaaaaggtaatttgcagagccaggtattaatatataattcaatgtcatttttgagaagttaaaagctctaatgccagaagcagtggctcacatctgyagtcccagcacttttcaaggccaaggcctatggatcgcttgagcccaggagtttgagatcagcctgggcaacatggcaaaactctgtctctaccaaaatataaaatttagctggtgtagtcacagctactccagaggctgaggtgggaggattgctttagcctgagagacagaggctgcagtgagccatgattgtgccactgcactccagcctgggcaaaatggcaactctatctcaaaaaaaaaaaaaatctgaaacaatattatacattgtttatgttgacttacatgtaaaaagtatagaggcctgcacagtggctcacgcctgtaatcctagcactttggaaagccaaggcrggcggatcatgaggtcaggagatcgagaccatcctgactaacacagtgaaaccctgtctctactaaaaatacaaaaatattagccgggcgtggtggcgggcgcctgtagtcctagctacttgggaggctgaggcaggagaatggcatgaacctgggaggtggagcttgcggtaagccgagattgcgccactgcactccagcctgggcgacagagcgagactctgtctcaaaaaaaaaaaaaaaaaaaaaaaagtatagaaaatgtatgggaaaaattttctgcagggaaagaggaaacaggttgaaattaaggaggagtataaaggagctttgattgtttctataatttgttttttgggtttttttttttttttgaaacaaggtctggctctatctctcaggctggagtacagtagcatgamcttggctcactgcaacctctgcctgctagtctcaagccatcctcccacctcagcttcctgagtagctggggttacaggcatgcaccaccacgccaggttaatttttgtattttttgtagagacagggtttcgccatgttgcccaggctagttttgaactcctgagttcaagagatcctccaccctggcttcccaaaatgctgggatgacaggtgtgagccactgcgcccagcctgctatttcttttaaaaggatttaaaacaaatatagcaaaaccttaaaatgtattaaatctgtgatgaataaatgtgttctttatagtctgtatttttctgcatgtttgaaatatagacatcattattttttaaattagtagtattcattttttagagaagttttaggtttacagaaaagttgagcagaaagtacagggagtttcttcttaaattcccacctcacagtttcctctattattaccatcttgcattactgtgggtcatttgttacaaccgatgagccaatactgataccttattattagctaaagtccacagttttcattaggattcactctttgtattatgcattctatggattttgacaaatgtataatgacatagatccactataagagtgtcatacagagtagtttcactgccctaaaaatcctccgtgtgccacctattcatccctccttccacccaaacacctggaaaccactgatctttccactttctccagttttgccttttccagaatgtcacatacttggaatcacacagtgtgtcttttcagataggctcctgaatcatttattttttaaatcaaaaattgaaagccaaccacaatgaagaaaacaaaaatcatcagaaacttcactatttcaagataatcactattaaccatacacacgatttacttttttcatgtaaatgggatcatagtgtgcaaaatattatattgcctttcttttccacttaacaacatagtatgaaactacgtaattcaggatttttcttctttttttttttttaaagtctacaagaatgtttcacgatgtggattaaattagtgagctaaccgatcctttactttcagactattaggctttcacctgtggcatgaagttttcctggctttgaggatcccctcttaaactagaaaaggcccttgaagtctccagagaaggggggatataaggctactggaaatacctttctagatatgtgtcacctgtatgacatgtttgacattaagtgtgagttctcrgcagtcaaggacattgtcaaccacttctccyctcattaccaaacacatgaagcaggtattgatgaacatggtggaatggatccaacttgccctgcaayaatcactttggagtcacytctaaggaaattctcaagccacacagggtgctgactccttaagagctggtaccgtacactaggaactaagaaagacaccagagtggtaagagggtgccctgttttgtggagcagagcaagacagatgctatgaagaactgggatgacagactgggtggggacagtgggcagtgggtgtgtctgctcagagaatctggagggtgggaaagtgagagcccagcactactgccctgaagcccagtagccatgaggggctggagttttatgtagatggaggaagtccacaggctcctctgagagcatttactctttttagtcagtttatcacactggttgagaacttgggatctagtatgggacttctggttcaaaaccccactcaatcactctctggctatttggctttgggcaaatggctaagccatgatggctcaaccccagaagggggaatataaaagttgttgtgatggttaagtgagattatatgtgcaaagtacttggcacttagtgagtgcttggtaaatgctagcaataataatgatgatagtgataataaagcttagcacctgttcttttgaaaagaaaagtagtcactgagagcataagatagccaagccaagaagatcagcatgagtctcacactgacgctcccacctagagaaaagcccagcacatttcaccaaggcaggcatgcctggattcaagtgggtggggcactgtaggagcagaaaataggaacaccccattagataactcaaaaggaatttgggcaactttaatgatttttgcaagctatctgccagcctatatgtatgtcctctgtgttcatgtttgttctcatgtgtaaccacctctagctcctacctttttttgggttgctgaatccagmcattgcagatggattttcaaatggatacatggcctttgaagtcacctagttctacttcccaccaatgaggggatttctgtggaaaacacctctacatgtcctcgtctaatctaggggatatcctggattcctccctttccttcggccactcccaagcaaaccttgtttctatcttcaaaaaagatcttagatctctcctctcctgctagcaccattggcactctcctagagtaagcctccttcaccccacacataggcagctagtccctaatagacttactggctattcttccccaggaaccagggtactttctaaaaatgtaaatcagatcatgactctctctctatcctaggctgggttcccagaagcagaccctgacacagaaattcatgagcaagtgttttatttaaaaagagccccaggcagaaactggtaagaaagtagggaaagctggacagggaagtggaatacatcaggcaaggaaaagtctrgaagcctggatttcaggcccagacccagcctcagcctgattcctcaggaaaactgcagaataaattgcagccagaacttgttcctcctaaacataatggggctgggctttcgtgccttcacctgactagctgagtgcttggctaaggaggctttctgtgcatgtaagcaaagagctctggtagctgaagggctacccttggaacaaagctgtatgtgcccagcccttaaaaataaaagcacacagaagctggggaaccagtacatcaaaactgcaaaagcgattcaagaaaacctcagcagagcatcaaccaacaggatcaactccagttccctcccttatttcttatctcagacccttgttcatttcctttatagaacacgtcatggtttacaagtaatttgtgtaattatttgtctctatccttgtttgtccccactaaaacctccaggaaggagtgcttgtcttgttgccttttgtaccccagtccctagaacagagataacatattgtggatcttccacaaaaatttgtaggaatgaatgaatgaatcaatgaatgaatgaatcaatgaatgaatgatgggaccttggtttggacactttcggtgatggggagcttctacagcatgtagcagctcatccattttcagaaagccttaattgaagttcagtcccaagactgaattrtaatccacttccctgtcatttgcaccaactgatctctctggaacaactcaggagattattgtttcttctatgtctgtgcttcagctatccaatgtcccaactttctctcatccagactaatcaactccagctcctccaaagtttccttacttgacatggattttgtacccattggcatccataagttgttacgtccccataaaatgcatagcaatccctcccatattaccctgaatacaccctatcttggaagagaaactgggtcaggtgcgacaagaatttggaggagggaagctgagataacccagccagagctctagagtcagcagatccaagcacaactgaatctcagctccacttgctattgaaagactgatcctgggcaaaatgcttactttctctgaaccttagtttcttcttctgtacaatgggaaaaataagggcatccatattacagagttattctaagagttaaataagacaagaaatgcaaaccacttttagcagagtgcctgccacagctttaaggactcagagcttctgcaaactttacctctaacctaaayggctctccatgcccctataagctccatttttcccagtcaaatcttcctgttggccgggtgcggtggctcacgcctgtaatcccagcactttgggaggctgaggcaggaggatcacctgaggtcaggagttcaagaccagcctggccaacatgtttctactaaaaatacaaaaattagccgggcatggtggcgggtgtctgtaatcccagctactagggaggctggggcaggagaatcactggaacccggaaggcagaggttgcagtgaacagagatcacaccattgcattccagcctgggcagcagagtcagactgtcaaaaaaaaaaaatcttcctgttaaccccccagctctgtcttggacacctccagacttttttttttttttctatacggagttttgctcttgttgcccaggctggagtgcaatggtgcaatcttggctcactgcaacttccgcctcctggattcaagcaattctcttgcctcagcctcccgaatggctgggattacaggcacccactaccatgcccagctaatttttatatgtttagcagagacggggtttcaccatattggccaggctggtctcgaactgctgacctcaggtgatccacctgcctcagcctcccaaagtgctgggattacaggtgtgagccaccgcgcctggcccacctccacactttttcagtcatgataagcttctaggtgatttcctgactatttttcttcccattttctcatttcattttccacctacctctccgctttcctcattactactcattcatgtatccaccacatagccattctccctttctcttttatgtgtctttcttgctcaattaattctctcttgcttattttctttcctctcatctttctttatagcatgaaaactctaatcagaaagatcataaaaaaaaattctccccttctattctgccttctaccttggctgcagatagctgagaggaaataatcaacatggtaacagtaaaatcagtaaatgctcattttcttttttttttttgagacagagtcttgctctgtcgcccaggctggagtgcagtggcacgatctcggctcactgcaagctctgcctcccaggttcacgccattctcctgcctcagcctcccgagtagctgggactacaggtgcctgccaccatgcccagctaattttttgtatttttagtagagacggggtttcaccatgttagccaggatggtctcgatctcctgacctcgagatctgcccacctcggcctcccaaagtgctgggattacaggcttgagccactgcgcctggctagtaaatgctcattttctcatcacttaggcatcttaagctgcaggccatttttcatctgctccttgccacagatggaaaggtaaaaatccaggttggaagggaagcagtcagcagtgaggacagagaagaaccagaaaactctctctccctttcacctatatgaatgattctgatttcttacctcttgtaatagcaaagatctccactacagttatagctgtctatcttgttctaactttaatggaaatgcctttaatcttttgccattaattatgcttttttctagattttgtaccaaacagtctttatccaattggggggagatctcttctgtgcctagttagctaagcttatataatatgtagttgtgattattaaactagagtttctaggtagaaattcgagcactgaaagtcagggcagcagggtgataagtaggttggcataggaggtatcctgggctgggaatatcagaagaaagaattgaggccaagtgggcaggctggggcatggtggagaatcctgtcctgagggactgtcatggtgctgatagtcactgctcataaactaactgagatgttgcagttcagatttcaggtgacccttgagtgtagtaatgacaaaacgaggctctagttatagttcttgcttcttcttttattaatttatataagcaactctggattttccaggagatttttggtaaaaattggagcaaataactgaaactacatcccttttcaagtgaaagcttttttggaggtggatctgatgctggttttccattccaatcagcgctgtgaaagctacttcttgtccttgctatgggcagattgagcttctttttctccctgatggaaattcaggaaggaaaccaaataattcccaacggagacaagcgttgaccacagtaccatccaaaagggcttttaaagatttcaatcttgcatgtgagaatgttggcaagtgaggttggttgctcacactaccttgtcagcttgatgagaggctgggaaggaggacatgaaaattgttctgagggagaggaggttgcaggtgaaacattaatgaggtgcacttaacactggaaacatctcagtaaaagtgtttgtgataagcatccaaaataaagcactaaacactcagatataagcatctctcagtaaaccaacctgcacatactgtgggactggtgaaaggatggacattctaacatcaaagcttcacaatgtgggctggtacaaaggtagtggggtaactcaattgattgttcagtcagttacagatcgaaatccttgttctttttttgttttttgttttttgtttttaagacgaagtcttgctcttgtaccccaggctggagtgcgatggcatgatctcggctcactgcaacttccgactcccttgttcaagggattctcctgcctcagtctcccaagtagctgagaatacaggcatgcaccaccatgcccagctaattttttgtatttttagttttagtttgctaagcttatataatatgtagttgtggttattagactagagtttctaggtgggaaatcgagcactgaaagtcagggaagcagggtgataagtaggttggcttatcagagtttcaccgtgttggccaggatggtctcgatctgctgacctcgtgatccacccacctctgcctcccaaagtgctgggattacaggtgtgagccaccacgcctggcccatactccttgttctactccttcccgaccttctcactactgcgcttcaccagtcttaaaaaaaatgttacccagtgtggcatgtactgattgctattctacccgtatcatgtagtcgcatttgttttgttttcagcatgattgatggaaaattggccatcctgccctgggataaccaggagttcactgtgcttgatttcttttctagctcccttcttcaccacagggggtgaagaaaataagtcctcagcaacccatcataaagagaaaatttaaattgacacaggcaatgtgtcagacagctttgggatagtctcagaaggtggaaagtaaagaaaatctatgaagaaaagttgggctgggcgtggtggctcacacctgtaatcccagcattttgggaggccgtggtgggaggatcacttgagcccaggagtttgagaccagcctgtacaacaaagggaaatcctgtctctacaaaaaaaaaaaaaaaaaaaatttaaaaaaaattttaaaaagaaaagttgaagaaattggcatcaatgagtcttaaaaacagaagctgacaggctaatatagtgactgtttctagtttgtaaactagatcagctacacactccaaaacaccatctgtgctcagccagtggtggtgcactggacaagcagaagagtgagttctagaactggactccagtctcacctctgccaatgcgtgtggcctgggcagtctccctgtctaggcctcaatttctgtctctgtaaaattaaaaggttgggccactttggggttcccagtctttccttaagacttcacaaaagaagaaatgtttggacacaccacaaagagtacttttaaattattacataataaatgcattggctgggcgtagtggttcattcctgtaatctcagcactttgggaggccgaggaggacagatcacttgaggccaggagtttgaaaccagcccggccagcatggagaaaccctatctctactaaaaatacaaaaattagctgggtgtggcagcatgtgcctgtaatccaagctacttgggaggctgaggcacgaraatcacttgaacctgggaggtggaggttgcagtgagtcgagatcacaccactgcactgcagcctgggcaactgagtgagactctgccttataaataaataaatacatttattaggtgatgagaatctcccaaacacaggactcatgagggaaaagaaaaataaaataggtgctcagtgataagagtttgggaaccagactgaagtcactctagagcagggatggtgatgcatcattttagaatccttaacacagtgccttcttaccacacacacccatgaagtgctcattatgtttcaaacacacacatgaaaaggacacatagtagacccccatgcatccattacccagccccaagaatcatccctcaagcccagtctagcttttctatgctcccatcagctgmcctctaaatatcccaaagaccattttgaagcaagtgccgaaattatataatttcacctacaaatatttcagtatgtcactctgagataagtaatatgtaaatatagccacaaaatcattatcagacctaaaatgttaataatacttccttaaatatcattttttatcattatgattttttttgagacagagtaagaacctatcaaacaccatggagctgggtcaagagggctcaggagcaaattaagagatccccacagtcccactggccaatggtagaagaatcaatgaggattataacttcattgatctcaaactcattaaatatattaaacccatgaatttttaatgacacttagaaaaaaaaaagcctcatttgtcatcttttgaaggatgctaggaaatcaacctattattttgaaactgacaaggaaggaaaacaaacagcattgattctgtcttttccaactgtgtgtcatgataaccaaatagttgataagaagatgattttctttatagaaacattctagctaataaattaagaagaaaagaagctaagaaatgttagcatatctagctctgtcacccaggctagagtatagtggcatgtagcctcaacctcctgggttcaagccatcctcccaactcagcctaaaggtacacaccaccctgccccagctaattttttttttctattttttgtagacagcggtgtctcactttgttgcccaggctggtcttgaattcctgggctcaagtgatcttcccacctctgcctctcaaagtcctgggattacaggcatgagccaccatgcccagcctccttaaatatcatttaatattaattgcatgttcaaatttcacagatggcgtcatacaatttttttttttttttgagacagggtctcactgtgtccacccaggctggagtgcagtggcacgatcttggctcactgcaacctctgccgctctggttcaagcgattctcctgcctcagcctcccgaatagctgggattacaggcatgcgctatcatgcctggctaatttttgtatttttagtagagacagggttttgccatgttggccagactggtctcgagctcctaacctcaagtgatccgcctgcctcagcctcccaaagtgctggggctacaggcatgagccaccgcacccggtccagctttttgtgtttccatcaggaggcacataatgcccagttatctttctttttttgatgttagcagctattgatgatcattgcctagctccattatttcattaagagttgcaaaatttcgatatgcaaaatgttgatatgctaacatttcttagcttcttttcttcttcatttattagctagaatgtttctataaagaaaatcgccttcttatcaactatttggttatcatgacacacagttggaaaagaaaagacagaatcaatgctgtttgttttccttccttgtcagtttcaaaataataggttgatttcctagcatccttcaaaagatgacaaatgaggctgtttttttttctaagtaccattaaaaattcatgggtttaatatatttaatgagtttgagatcaatgaagttataatcctcattgattcttctaccattggccagtgggactgtggggatctcttaatttgctcctgagccctcttgacccaactccatggtgtttgataggttcttactttctgtgaactcaacttctgagataatctctaaggtccttcttagtcctgccctcagatcaagtaaagaatagagcccatccttggcctcatatagtatacacattgagacacaaaggttattttcttcttgggtcttacaggaaagatttctgaaaggtaggaggaagagggtgtgtgtaaacccaactcatctcctcaggctagaggaggaggcctgaggctgtcagtgaaagtggggtgggggtggggagtagggggacagaatcacagctctgtcctgggaaatcagggagagagtggttgcttcaatttcaagtcatctcctcaaatcaacccaagtgcatgtctcaacagaactgattccctgtaactactttcctgccgaccctctcttccccactccctgctcttcagttagggtagtgtagtttggggaggcacataaaaatgcctggagatcctaagytggaaaagtaaggtgtgaggaaggtaacctggtcaccctggcaaaaaagagagcttgactgagtcagtccctatcccaagactgggtggatccagtcaccacccaagagtcctgggcctgaggccagcttctgcactgccctgccctgtccctgcataaccagggtatgacaactcaagcatccaggtggaaggaatgacacaaacagaacctgtctcctttagcttccaagactcaaagaagtgagctttgtgagagggaaaagcctggttgagaatgtcagatagaggtgggcataactcgatttatagcttttaagcacttagacatttgtcacatgggacaatatttgcacttttgcaaacaccagggcagtgttggtccttctggcttgggcatttcaagtgagtgtttggatgccccaagtgaggacgtctggttagacttcatggtccaggctagtcccctgtccagctttttcttttcctttcccagtcatggaaaggaaaacatggaaaacagaccacctttggcattactgaattctgagcatgtccagaatttggcttggggctgctgctttttgtgtaaagttaggggaaacctgcagttttggaaaagcatctgggagcaagagatacatcttgggttcttccttctttcagaaaggtcctgatagccaaggatagtccctctcaattaccacaactgtatgcccctgccccttgatcaaagctgattaacacagtgcagacaccttgcccaaatttccttatctgagagctccaaagagagagggatgttccgaggatgagaatttccgaaacttaattccttccttgcctaaatctttgctgttcatcttttccttcarttatgtgacacactccatacccttcaaaaaacacrgctttttgctcattcgagctaacttaagtcagtttctgttgtctgcatccacacacagatgaaaaacccttaactgaaattactgttcaatggtgctctggatgaagagcccaggcacctaaattcatccctttccctctgactcccccatccctgtcatcacgtctttaaatcccagactcattatcgtctgcttacagccagcaccaaggcaataaggggagataaaaatgagaaaaaaatgatgatgatgataataatacttattttttgagcaccttttataccaggaattgtgttaagtgctttacataaatcattttattgaatcaaatcctcataaacaactctgggtttgttaggaygcttttgactccatgtaagagaaatcccaaataaaaatagcttaaacgtgaggaaatgagttattttctatgtaataataagtccctaccaggggtagctttagggttggttaaattagaagcttgatgatgtcattaggcaccccagttcttgccatcttttcactctgccatccttagttggcttggatcgtcagcctgggtacccttgtgaccacaaaatggctgttacacttccaggcatcccatctggacatgacagtatttagcagagggacgatctcttccttgtatcttttttaagtacaagaaaagctttccaagaagcctctagttgatcacccctctcatctcagtrgccagaactgggtcatacatgcatgcttaatccaaccattgacccaaaagtggtattattgcaatgggcctacaccaagcataattcacccctgagttgaaagaggaagagataaaacactctgaaaaaaaaaaagaaaaatgagatctggccaggcgcagtggctcatgcctgtaatcccagcactttgggaggctgaggttggcggatcatgaggtcaggagatcaagaccatcctgaccaacatggtgaaacccctctctaccaaaaacacaaaaattagctgggcgtggcagcgcgtgcctgtaatcccagcttcttgggaggttgacgcaggagaatcgcttgaaccagggaggcggatattacagtgagccaagatcgcgccactgcactccagcctggtgacagagctagactccgctcaaaaaaaaaaaaaaaaaamaaaacaaaacaaaaacactatttttcagcaaagaaaaggggaggaacccattcggtagttaaccaacagtgtctgctgcaaaccttcgagatacacatgagcaattcagaggggtagagtgatttgcccaaggtcaaacaaccagttaattgcagatatggagtctgaatccggaactgtccatctctaaaatctactcttttaacctgtattctgggaggcagttagtccacactaaattcttttgcctttgagaaacgcaggttgctaaggctgtcctgattatttcatgaaaataactggtgtaggagctacaaattgatcatattcaggagaccaagccacacagcaaacttatctagcctcactgaatctgttccccactggctcactcaagtctcctcaaatacagtggtgaggaaacttaaaagaagctcaattcggcaaacagcaggcttcagtcttagatatctggctttyggagtgggcatcataagtgaacaaatatcctttctgtgtccttccacatctcctcttattggtattgccacctttggggaattctttctacccaatttcatttatttggttctgatagggacttccagtgacagtaccaagacatcaagtcccagctattcaggaggccraggcaggatgatcacttgagcccaggagtttgagaccagcgtgggcaacacagtaaaatctcatctcaggccaggcgcggtggctcatgcctgtaatcccagcactttggcaggctgcggcgggtggatcacgaggtcaggagatcaagaccttcctggccaacatggtgaaacccgtctctacaaaaagtacaaaaattagccgggtgtggtagtgcatgcctgtaatcccagctactcaggaggctgaggcaggagaatcgcttgaaccaaggagtcggaggttgcagtgagccgagatcacgctactgtactccagcctggtgacagagcgagactcagtctaaaaacaaaaaacaaaaaaaccctcaactctatcagtcaatcaattagtcagagatgacattaaaatcaaaatagttaaacaatgggaaagcacagacaccaaccaatcacaagggacgctgggctagccattaactcttagttgttgggccatggggaagtccagggtgtcccaaggaggtccaggatggccaggagatgaggacagggaacttaggagtcttgggtcagtaggtatttaccaacagctatggaaatatttcacttaatgcgttcttaattataaatattgcatgtttcagttctcgaaagcccatttggttctttttttatagattcgaatgctctgttgaaattctttatttttcatctattgtactattttctctatttaccatgtttataatactcattataaagtccttgtctgctaactcaaatatcagaatcagttgtgggtctgcttctattgcctgctctttctctacttttattttttttttctgaggcaggttcttgctctgttgcccaggctggtgtgtggtggtacaatcatgggtcactgcaaccttgacctcctgggcttaaacaatcctccctccttaacctcccaagtagctcggactacaggtattgtgactaagcccaggtaattttgtttgtttgtttgtttgtttgtttgtctgagacggagtctggctctgtcgccccaggctgaagtgcagtggcacaatcttggttcactgcaagctccgcctcctgggttcatgccattctcctgcctcagcctcctgagtagctgggactacaggctcccaccaccacgcccggctaattttttttgtatttttagtagagacaggggtttcactgtgttagccaggatggtcttgatctcctgacctcatgatscaaccgccttggcctcccaaagtgctgggattacaggcgtgagccactctgcccggccacccaggtaattttttaacttcttttttttttttgagacaggatctcgctctatcacccaggctggtgtgcagtggtgcgatctctactcactgcaacctctgcctcccagattcaagtgattttcccacctcagcctcccaagtagctgggactacaggcatgtgccaccacacctggctaatttttctatttttagtagagatgggattttgccatgttgcccaggctggtctcaaattctgagctcaagtgattcacccacctcagcctcccaaagtgctgggattacaggcatgagccactgcatccagcctgtttttttcctttttctttttctttctttttttttttttttgagacagagtctcactcttgtcacccaggctggagtgcaatggtgcgattttggatcactgcaacttccatctcctgggttcaagcgattctcctgcctcagcctcctgagtagctgggatgacaggtgtccacccccacgcctggctaatttttgtatttttagtagagatggggtttcgccatgttggccaggctggtctcaaactcttgacctcaggtgatccacccacctcggcctcccaaagtgctgggattacaggcatgagccaccatgcccggcccctgcttattttccttatcagtcacattttcctgctctttgcatgccttataattatataaaagaaaacagaggcaaaagatgatattattttcctccagtgatgaatctctttttcttctgttagcagatggggtgagggactgatcaccttaacctagtcaagaattcagctgggttgaggctgggttgcagtcttggttagtcccagtccacctctgagtcaccactattccttggatggagcccactcaagcttttcattggcatgtctctgtcttctcatccctgaaagcctatggaagattcagctctgttcttaggagctccagcttagctctagattctaacattacaccagataacattgatcatcaaaaactctaccagtttctctttgccccagtagagaccctatgcctgggtcaagccctatccttggcctgtgcacagatttggcaaataccccctgggaagaaaatggtcagagacaatcagcacatttagaaagggctctttccggccgggcgcagtggctcacgcctgtagtcccagcactttgggaggccaaggcgggcagatcacctgaggtcaggagtttgagaccagcctgaccaacatggtgaaaccctgtctctaataaaaatacaaaattagctgggtgtggtggcacatgcctgcaataccaactacttgggaggctgagacagaagaatcacttgaacccaggaggcggaggttgcggtgagcctagatcgtgccattacactccagcctgggcaacaagagtgaaactccgtctcaaaaaaaaaaaaaaaaaaacggaaagggctctttcctctccagaatttcagttcattagtcctcattgatggcacaactctgmggtgtcttaaaaaggtgatttctgtaacttactctgttttttctagttgcttcagcaggagtgttggattgttcctacatatacatcctatccagaagaggaagccctctgaaaccctttcaacatttaaccatagtgaggtcatccagatatatacrgctgaatcaacccagagcataccatggcccctgctccacacctctactacagtgaggacaggtggcccaaacagactagagtctttttgcagcgaaactggggaccatgagcctttttatttttacagtgggtggaaagtctgacaaagctgtgagaataagtctggaagcttccaatggctatgccccatgctcatggaagaggccagtctccagcaggaggaaatgaagcccttccacggaaaggagaggcattgggagcacccaggggatgttggagtccctgattccagtcacttgctcctgctgtggtttggttacctgagccacatacttcccttttcttcctaagctagttccagtttcttttttaaaaaatttatttgtgtatatttatggggtacatgagaaaatctgttatatgtatataatacatagtgatcaagaagcggcattcggggtgtctgtcatgtgagtacaacacatttttgttaagtttagtcatcctactctgctatggaatattgaatttattccttttattttactgtatatttgtatgttttaacacttctctttatccgcctgccccccaccactgtcccttccatctctattatctgtttttccattctttagctccatgtggtcaatttttttagctcctacatataagtgacaacatgcaatatttgtctttctgtgcctggctttttccacttaagagaataacctccaggccttgtggctctctgagcagcaccacggtggttggcaagaacaagcaccttacaaaaggcagcaaaaagggagccaagaagaaagtgatggatccattttctaagaaagattggtataatgtgaaagcatctgctatgttcaatataagaaatattggaaagacgctagttgccaggacccaaggaaccaaaattgcatccgatggcctcgagggtcgtgtgtttgaagtgagtcttgttgatttgcagaatgattaagttgcatttagaaaattcaaactgattactgaagatgttcagggcaaaaactgcctaacttccatggcatggatcttattcgtgacaaaatgtgttccatggtcaaaaaatggcagacaatgattgaagctcacgttgatgttaagactactcatggttacttgctttgtctgttctgtattggttttactaaaaaaagcaacaatcagatacggaagacctcttatgctcagcaccaacagatccgccaaatccagaagatgatggaaatcatgacccaagaggtgcagacaaatgacttgaaagaagtggtcaataaattgattctagayagcattggaaaagacatagaaaaggcttgccaatctatttaccttctccacgatgtctttgttagaaaagtaaaaatgctgaagaagctcaagtttgaattgggaaaactcatggagcttcatggtgaaggcagtagttctggaaaagccactggggacaagacaggtgctaaagtcgaatgagctgatggatatgaatgaccagtccaagaatctgtttaaagttcagacttataatagtggcaaataaaaagtcctatttgtgatgaaaaaaaataatgataatctccagttccatccatgttgctgcaaatgacatgatttcattctttttatggctaaacagtattccattgtgtatatataccacatgttctttattctaccattgatggacacttaggctgattccgtatcttagctattgtgcatagtgctgcaataaacatgcaagtttgcagatatccttttgatatattgatttcttttcctttgggtagatacccattagtaggatcgctgaatcaaatggtaattctacttttagtttttttaagaaacctctggccaggcacagtggctcatgcctgtaattccagcattttgggaggccaaggcaggtggatctcatgagatcaggagttcgggactcacctcgccaacatggtgaaaacccgtctctaataaaaatacaaaaattaaccaggcatgatggtgggtgcctgtaatccaagctactcaggaggctgaggcaggacagtcgcttgaacccgggaggcagaggttgcaatgagttgagattgcaccactgtactccagcctgggcaacagagtgagactctgtctcaaaaaaaaaagaaaaaaaaaagaaatctccatactgttttccacagtggttgtactagtttacattcccaccaacagtgtaaaagagttcccctttttccatatcctcaccaagatgctatttttttatctttttaataaaagccattctgattggagtaagatctcattgtggttttgatttttatttctctaatgattagtgatggtgaacatttttcatatacctgttggccatttacatgtcttcttttaagaaatgtctatttatgtcttttgcccactttttaatgggattatttgttttttcctttttgagatttttgagttccttttatattctggatattagtcccttgttgaatgaatagtttgcaaatattttctccctttcaacaagttgtcccttcactctgttgattgaaacaatcaactgctgttcagaagatttttagtttattatagttccgtttgtctatttttgtttttgttgcctatgcttttgaggtcttagtcataattctttgcccaggccaatgtccaagagagtttttcttagtatttttatagttttagatcttatgtttcagtctttaatccattttgaatttactttcacatatggtgagagagaaggatccagtttcattcttctacatgtggctatccaattttcccagcaccctttatggaagagggtgtcctttccccagtgtaagctcttggcacctttgttgaagatcagttgactgtgttctctagtctgttccattgatctatgtgtctatttttataccaataccatgctgttttggttactatagccttgtaatatactttgaagtcctgtaacatgacgcctctagctccagtttcttgagagtctggaccatctctattttctttgcccttgggctttataagacacccctatgtccatataatacattatccttttcttcttaggcagggcagaggtggtttatgttacctgtaattcaacgagtcttaactaagactacttctttaatggtggggcaggtttagaagggtccggtgaaatgtgtctccctcattgcacagaaggaagagaaagaggatgaatggtgatatttctgagaccacaactttggatcatgaatcctcaggccaaggagaaactgatgcctctagattctgatcactctactccaccatgggaagaaattcagacatgcctaagaagttgtctgaatctgtcatccaaagccaacctgtcttaccttaatctttgattaaagtaaactgcattcccatccccagacaatattaaaaaatggggggaatggaaacaggggagattcctgtgtttctacatttcacttactcctggggctcccgagttgcagatgagcctgaagtttacaccagagaataaataagatagctgtttggacatcacacaccactttgccagtttccgttctcttgaattatttaccatctaattgtctgcattgaaacagaatctggaaacacagagtcagagttgtagccctatttgcaagttacagaaagaaaactagagttcagtgaagtacctgaggcagaagcacttcatgagtttctgaagttctcttaccttgggagggctgtgaatgcagggggtgaaaccagcacagcagcaaagagaaacacagcctcaggctggaagggaccttagaagtcactagtccagtctcccatttgaggtcactctctccctccagtgtagaggtctggcatctagtctgtactttcccctcaactggctatgtcaccaagagcacctgaaccttgatttcttcatctgcaaaggatagaatacaaagaaggatggaatggaaaataaacctgtctataaatttaaaaaattgttatcacaaattttattttcaccattgtaccaataatttcttctttctttcttttccttttctttcttctttttctttcttttctgactctctctctccttccttccttctgtccatccttccttccttccttcctctctctctttttttctttctttcttttttttttttttttcaagacaaggtctcactctgtggcccaagctggagtgcagtggcacgatcttggcccactgcagtctcaaattcctgagctcaagcaatccttccacctcagcctccctagtagctagtagctaggatcatggatgtgcaccaccatgcttggctacttttttttttttttttgagacagagtcttgctctttcgcctaggctggggtgcagtggcgcgatctcagctcactgcaacctccacctcacgggttcaagcaattctcctgcctcagcctctcgagtagctgggactacaggtgtatgccaccatgcccggctaatttttgtatttttttaggagagacggggtttcaccatgttggccaggctagtctcagattcctgaccttgtgatctgcccgcttcagtctcccaaagtgctgggattataggcatgagccaccgcgccckgcccatcctcagctactttttgtattatttttctttttgtagagacagggtctcaccatattgcccaggctagtctcaaactcctgggctcaagcaatcctctgcctaggcttcccagtgctgggattacaggtgtgaaccaccatgcctggtctgcaccaataattcccatagaaagaaatattaatagctatgaaaattttaaaataaagtagaaaacttagaaaagtataatgacaaataaaactcacttgtctcactgctcagtagaaatcactcattagccgagcatggtggtgtgtgcctgtagttccagctactcaggaggctgaggcaggagagtcacttgaacccgggaggcagaggttgtggtgagccgagatcgcgccactacactccagcctggaaaacagagcgagagtctctctctctctctctctctctctctctctctctctctctatatatatatatatatatatatatatatatatatatacacatatatatatatatacacatatatatatatacacatatatatatatatatatacacatacatatatatatatatatatatatacacatatcttttttttttttttgagacagggtctcactctgtcacccaggctgaagtgcaatggcttgattattgctcactgtagctttgacctcctggtctcaggagaccctcccgcctcagcctcctaagtagccaggactacagatacacataacatgtctggctaagtaaaaaaacaattttgtagacatagggtcttgatatgttgcctaggtttgtcttgaacccctgtcctcaagtgatactccagcctcagcttcccaaagtgctgtgattacagttgtgagccactgtgcccagcccataatattatttgatacattgtcttccagtctttttccaactaaatatatataattgagaaattttatttatactgttttatagcttagttttttcctattcaatattttctagtgcgtctcgtctccacgtcagtaaatattcttcaaaaacaagaattttggctgggtgccgtggctcatgcctgtaatcccagcactttgggagtctgaggtaggccgatcatgaggctgggagctcaagaccaacctggccaacatagcgaaaccccgtctctactaaaaacacaaaaattagctgagcatggtggcgcgcacctgtagtcccagctacttaggaggctgagccagaagagtcgcttgaacccgggaggcagatgttgcagtgagtcgagatcgtgatactgcactccagcctgggcaagagagcgagactcagtctcaaaaaaaaataaaaaatataaaaaaattagatacagggtctcactatattgtttagactggtctcagactcctgggctcaagcgatcctcctgccttggcctcccaagatgctggaattacaggcatgagccaccactcctggccaagttatgcatttactagttagggtcaatttacaccaccaatttcaatggaaatcaatatgatttttgatatttgcaaagaaagtggtccacttcttacaaacagacttcgggatgaaaaatgaagatgaggcagacacatctacagtgaggaaacggatgatgcctcctttttcctcataggcaacttgggggaggggaaaggaggtaagtaaaggcatgtgggggaagtcagagaagcatccacacctgctcattatatcaagtgtctagagactctctaaataattcagacacagtcggctccctccaggggcaggtgttgaggagagtttccagacaagcagctcctcttgcaaaactggggcagactgaggatctgattacgtgaaaaggggtccagttagtagctatggcaacctccttcttcagccttacaacttgcctttgggataaggtacaagaagcttctgggaaaacactactgctatgccccctgtggtggtgaagagttttgaagctctgttgtcttgggttcaaatccaggttcctccgctacagtgtgatcttggggaatttactgatctttaggttctatacctgtaaaataggggtaacaattcccctactcagattattgtggcatcatgcataattcatctagcccccttactatgatgcttagtacatggtgcttagtacatagtagatctgtcctaagaatgtcctcactttatgtcctaggaattgatgcttggactttaaataaaagagaaacgtagggcctggtgcggtggcatgcacttgtaatcctaactattcaggagctgagatagaaagattgcttgagtccaggagttgagtttgagaccagtctgggtgacagagtgagacccctgtctcaaaggggaaaaaaaaaagcaatgttgaaaactaagagaaagccattccttagaatcgtaaacagtaacagccaatagttattaaaggttaaccatatgctgaataccgtgctgagtgctttacatttactctcgcaaaaccatttatggatacgtatcatcaaaattcagagaagttaagacactttccccaggtcaaacaactagtaggtgttagaatcaaggtccaaaccctattctgcctctaaactgaaaaggcctgtgctcttaccctgtaaggaagaggatctccggaagttattttactgatccagcacttcatttccaggagagcagcctgaggatcgggaggggataatttgctgggcattgaggaagagcaggccgacttccttaggtccatgggacccgactgccctctagcgttagaggaatcctggggccagatggaataaagagcaagttggttttcttaggttatggtgactcctcctgccttcagtatgggatcatagctgcctagtttggtgtttt

SEQ ID NO: 6757 - DNA, 13080 bp, Homo sapiens
gcactgactgtcctaagtctaatagaatctgtgtcctcagaaagcaggttctatatagtcctgagagggatcactctctaaatgactgattaaatggatgacaaattctctaacatgggattcaaagaccaagattttggtaacatacttggaagtgctgtctgagggagatggttctgtgttccttgctcttgataggcttgtccccatcggggacagatctcaatgtcaccacacccaagagcatctgagtggactccacctcgtgctgtgggtctggttcaatgaaccattctaggattccattttaggattaccttcagcatttctatgaatattttccacatagtgagaaactggctaatattgcaagtgatctcctggggaggggtgacatgtctgagcttcaacttagaaaactggaatgttaaggaaatatatttgccaatctagtctgtgtatttttatttctcttcctgtcaaggatccctaattgtccaggacggtgattctagcggcagcatcagtatcactagggagcttgttagaaacgcaagttctcaggccctatcccagacctaatggatcagaaactgtggtggggccctgtggctcatgcctgtaatcctagcactttggaaggctgaggagggaggggatccctcgaagctgggagtttgagatcagcctgggtgacaaagtgagatggcatctctacaaaaacttaagaaaaatctccaaaaaattaaaaaaaaaagttggctggatgtggtggcacatgcctgtagtcccagctaatcaggaggctaaggtaggaggatcacttgagcacaggaggtcaaggctgcagtgagttatgatcgagccagccctggatgttttaacaagccctccaaatgatttgatttaagttagtttgagaaccattaatttaaagctatagttttcttgccacatgtatcttcacccccataaggcatattcagtatatttttaagttaaagggtcatcctgtttaatgctgtatattatgaggagatataccatgagaggacagcgtatgcaggaattgttacttctaggctgtaaataaatgtgatattacatttcttgctggtttctaagtcagtaaaatttggtaagaaaaatagttttgaaaaaaatctaaaaaaatagaagcaatggaggctgttttttgggttttgagtctccttagcccacctcacacaaacctcactgctgagtcccactcctgggtttcctggaattccaccctggaagcggccatggctgcgagcagccaatctgtccatgctctacttgctagctctggtggccactccctcttcccatctgcttacagcctctgctcctcatctctccacttcctgtcctgattcctatctctgagtggcattctctaaactgtactcaatttcacttttagtcatcgtgggcagtttcctgctgcagggccttacccattcctaatctcttaagtctgtcctcaactccacagatattcaaactttgttctccttccaaggcacagattctgtaactccgctcttgaaatttgatatgtcatgacaggttcagccagtagcagcagcagcagcagcaggggaaatgtctggcaccatccatcactaaacacttgggaacacagatggcaggtgcaaacaatggccgatatccctgcttgctgaccagccacccctcaagcccaccctgggggactgacctttgccccagaaactcttagtgttcttgagtttcttgagctgctgatggaaagtgctgcctccccagccctcctgccagcaagccttcttgccctttgggacagggattaggtaggatgggtggggtagggatgggatattagtggatctgaaaacggatgccatggcttttccagctctttcgtgacaggcatcaacaatgtgtgcggcattttagagtttacaaaccaccttcaggtagcatcatttacaaagcctgtcagccactctaagcgggtagccaggagttaccatcatcactgttttacagatgagacagtggagaaccggaaggttgccgtctttccccgagggggctcaaacaataaaagcaaagttgggcttgtatccaggtttatgtcaacttgacctttagtttaccaactccaccttgctaagtggataaaatctcacactaatgaattccaaagggcctctcaacggctttgttcagtgaagatttgacatagtaaatgcatttatggcaatcacatttgtattcagtttacgaatagcagtcaaatccatgactttaggtaatctctacaatgaccttatgtagaagcgtttttattcttgttttacacatgagaaaactcacactcaggaaggatgaataacttgctcaagattacacagctactgagtatcacagatgagtgtcaattttcctcacaatagaacctctatccactatgtacagctcccctctgctatgaattctaaactgaaaaaaaagggagatgaacatagtgaggcaggtttcccaaacctttctgtttagaaacatagatgcttgggtttctcccgtatccttccacaaagtctcccacgctctaggagtggtagcaggtaacccaagtgatgcttctgattggctgaggctgggagcttctgattggctgaggctgggaaacgctgctataggggaaagctgcacgcagaacactgcaatttagtttcctccaaacaactcaagtttttcatatggagtgcttcctttggatgggttttttgggtaggcctttggggaggaaatcatcgggaggactgtgaccattagatcttttcaggcctgtaatcccagcactttgggaggtggaggtaggaggactgcttgagcccaggaatttgagaccagcctgggcaacagggcaagaccctgtctctacaaataataatcataaaaatagccggatgtggtggtgcccgtctgtgatcccagctactcaggaggttgaggtggggggatcatttgagcccaggagtttgaggctgcagtgagctgggttcatgccactgcactctagcctggatgacgaagaaagactctgtctcaaaaatttatttttaactttatttttagagatgaggtctcgctctctcacccaggctagactggaactcctgggctcaagtgatgctcctaccttggtcttccagttagctggggctacaggtgtgctaccrctcctgaatccttttctttattctttatgcacaatttcttattcatcagatgtttggcttccctgtatagcaacatgactctactgaaatttcatctggtgaaacactgaccttgttaagataatgttagattcaaattgcrtcctctaagggctagccacatctttcatcttgcaaattccatgtagtaccacgagttacaactgttctgaaaacagacatcacttgttaaattggttattaaatttttttgtcaaggattctcattgtcagaagactctagaatcttcaaccagcatcagcatcatctgagagcttgttagaaaggaagcagctcaggtgctgcttcaggtgtcctgaatgacaaactgcatttaacaagatccccaggtgattcacatgcacctttaacatttgggaagcagtgttttagaacaccttttcatttggttacatacagttacaacttgctatctctcaagggaggttcttaaaatttgttttaatttgaaattcagggggttacatgtgcaggttataaggatatattgcatgatgcgaggtttgggctttcgatcccatcacccataacgtgaacataatgccgaataggaagtttttcagtccttctccgacttcctccctccctctcccacttttggagttcctagtgtctattgttcccatctttatgtccctgtgtacccaatctttagctcccacttatcggtgagaacatgcatatttggttttctgttcttgtgttaattcacttaggataggccgggtgcagtggctcacgcctataattccagcactttgggaggcagaggcaggcagatctcttgagatcaggagttcaagaccaggctgcccgacatggtgaaaacccgtctctactaaaaatacaaaaattagccaggtgtgttggcgggtgcctgtaatcccagctacttgggaggctgaggcaggagaatcgtttgaacctgggaggcagaggttgcagtgagctgagatcgtgccattgcactccagcctgggcaataagagtgaaactctgtctcaaaaaacaaacaaaaaaattcacataggataatggcctccagttattatggttgtgtagtattcacagccaccatcgacaaccactcttccgccttcaatgctggggctgtgaatggtttatggtttgtagtattccatggtgtatatgtaacacattttctttatccaattcactgttgatggtcacctagattgagtccatatcttgctattgtgactagtgctgcgaaaaacaaatgagtacaggtgtctttttggtagagcaatttattttcttttgggcatatacccagcaatgggattgctgagtaaaatggtaattctacttttagttctttgagaaatctccaaactgctttctacaggggctgagctaatttacattcccacctacagtgcaaaagcattcccagagaggtactttacatttgttttatgtggtcctcacaacaacacttcagggaaagtattattatccccaatccccaaagaggaaactggttttgagagatttaatcactcgaccaattagtagttaatggctgaaatggaattaaaactagatctgtctactccttaaaacatttgccttaatacgttttctttcttttgtttctcaagcctctttattaagtcagtttccaacccccggcaatgtctccaggtctctttgaaggtggcatggtaaaaaagcaaacaataaataagaaacaaaattttatatcaaagtattgtgaataaaaattgtaatttgtttgtgggaatgtaaattggtacaactattatggaaaacagtatggaggttcctaaagtagttaaaaatagaactactgtatgattcagcaacccctctactgggtatgtatccaagggatatgaaatcagtatggtgaagagatatctgcactcccgtgttcattgcagtactattcacaatagccaagatatggaatcaacttaagtgcccatcaatggattaatggataaagaaaatgtaacatatrtaaacaatggaataccattagccttaaaaaaaaaaggaaatcctgttttttttttttttttctgtgacaactggatgaacctggaggacattatgttaagtgaaataaaccaggcatagaaagacaaatgttacattttctcacttacagtggagtgtaaaaaaggtgacttaatagaagcagagagtaaaatggtagaggcaaaggaaggcggattgaggagatgttggtcatatgacacaaaattttagttaggaggaatgaattcaagagatctaagtgcatcatgatgaaaaaagtgtattaaaattaaaaatctgaaacaaatatattttttgtgtatgcatttgtaacacatatgacaaaaatgctaacaaccctaatatataaagagtgtttatacaccaataaaagcactttcatagaaaagataaaagaccgattaacatgaagagcctcactagcaatcaaaaatataaaggagagatatctttttcgttccctaaattggcaaagatttaaaagaaaagataaaacccaatgtaggtgagaatgagggcaatagatccccaaattttctattattaaaaatggtgttttagaagaatacttaatgaaaaggaaagatgcttgccatatattagtaagaaaggcatgtagaaaatgtatacaattactctctgctcctcccgtaagacagacagctgcatcttgtcatgcagcaccagctgtatccctgagacaccayggtgaaggtgaagaccaaagtaaatggatttggccatgttgggtgtctggtcaccagggctgcttttaactttggcaaagtggatactgtcaccatcaatgaccccttcgttgacttcaactacatgatccacatggtccagtatgattccacccatggcaagttccatggcaccattaaagctgagaataggaagcttgtcatcaatggaaatcccattaccatcttctaagagcgagatcccaccaaaatcaaatggtgtgatgctggtgctgattatgttgtgtagtccactggcatcttcaataccatgagaaggctggagatgtcttagaagagggagccaaaagggtcatcatctctgccctttctgctgacacccccttgttcatgataggcatgaatcatgagaagtacaaaaacagcctcaagatcatcagcaaagcctcctgtaccaccaacttcttagcccccctggccaaggtcatccgtgacaactttggcatcatagaagaacttataaccacagtccatgccatcactgccacagaagaccctggatggctcctctgggaaactgtggcatgatggccatgtggctctccaggacatcatccctacatctactagtggtgccaaggctgtgggccaggttactcccgagctgaatgggaagctcattggcatggccttccatgtctccactgccaamktgttggtcatggacctgacttgccatctggagaaagctgccaaatatgatgacatcaagaaggtggtaaagcaggaattggaggccccctcatgggcatcctgggccacacgagcaccaggttgtctcctctgactttaacagcaacttccactcttctgccttcaatgctggggctggcattgccctcaacaatcactttgtcaacctcatttcctggtatgacaatgaatttggctacagcaacagggtggtggacctcatggcccacaaagcctccaaggagtaagaccccagaccaccagccgcagtgagagcatgagaggaagagagaggccctcagctgctagggagtccctgccacactcagttccccaccacactgagaatctcccctccccacaatttccacacagacctccctgaagaaggaggggcctgggaagcccactttgtcatgtactatcaataaagttccctgtactcaaamaattaattaactrattaatcaaaatgtattgaatactaacattatgctaaggagagtcaattcctgcttgtttttaaaaatataattcttcatcattcaacttgaaattactgcccttgaagagctaaactcaaataggagaaactggcattttcctcctcaatattttaatatgaaaaatttcaaacatacagaagagttaaaagaatttatacaccacctaaattctacaattaacatgttgccacatttactttatcacatatccacccyctatctctccatcaagccacttttttttttttactttgcagaatttccaagtaagttgcaactatctgtatacctcacccctaaatgcttcagtatgaatatcattaacatgagttcaatctttgtttatggttcttttaaatttttgggttagttgtcatatagtgaaatgcacaaatattaaatgtgtcattggagggatttttgttgttgttagagatgtgatctcactatgttggccaggctggactctgactcctaagctcaaggagatcctcctgcctcatcctcccaagtagctgtgactatttggcaccatgccaggctttggaggaattttaacaaatgtagacatcagtgtaatctaaatttctatcaagacatagaacattatgaaacattatgagaacttctctcttcttccttcccagttaatccctgtccatctgcccctctacccagaggtagcttaccactgttgactttttaaagagatacataaattatttttggctgttctagaacttaaaacaagtggaatgatacaattacaatatgtgcttctaaatataaggctttgttaatttaacataatgtttttgagattcatctatgttattttgtgtatcattagtgaattcttttttattgctgggtagtcttctgttgtgcaagtacactataggttgttcatccattttcctgttgacaatacttagtctgtttccagttttggaacattttgaataaggctatatgtatattattttctttttgtgggcacaggctttcatttttcttgggtaaacatttaggagtgaaattgctgaatcataaggtaggggctacatttaattttaaatgaaactgccagactatttcccaaagttattgtgccattttatactcccaacaagataagagacttccagtagctccctatcttcatcaacatttggtatttttggtctttttacttttagccattctaatgggtgtcttttagtatcccactgtgattttattttgcatttctctgttgacttaatgttgaatgcttttttatgtgcttatcagtcatttgtatatctttgtgaaatgtccattcaaaaccttttgcctaattaaaaaattagattatttttattattgagatgtaagttgtattactgagatgtaaatgtaagtaagtgcttttgtctgatatgtcttgtcaatatgagaaattgattttaaggtagtgaaaaagatttcaggtaatgtgggagaggagaatattgcttagaaaatcagcttttccctgaagcttagggaaaagtgatttctacagaaatcactgctgaactttgcttttacctaatcagttagtctttgtttcccaaattggtttgttacctctaatttggagataaatagtagtttttctttgatatcgaacatgccattaaacctggattgttggttgtccacctgactgattcattcagtttgcggtctctcttctggccactatagtagtgtctgcctgatctcttcatttgcctctaaatatccctcacagtctactttccatatagcaactatcatgccacattttaaaaaatgctcaaaattccccagtggccttccatagctctgagtttatttcccatcctctttggctaactcactgacttactcagcttgccgtctttggaaattccaagcatgcccctgtcccagggtctttgctgttagtccaaactgcatcattttgtaagcttcccactattttgcagaccttggtcaaagtgaaacatttcacaggggtttgggccttgagaaacatcatgcctaaccacctgaccacaaggcagacaaaggcccaaatcccaggccaggtgtggtggctcacgcctataatcccagtacttttagaggccaagatgggcggatcacctgaggtcaggagttcaagaccagcctggccaacatggcgaaaccccatctctactaaaaatacaaaaattagccagatgtggtggtgggcgcctataatcccagctacatgggaggctgaggcaggagaatcacttgaacccgggaggtggaggttgcagtgagctgaaatcatgccattgtactccagcctgggtgacaagagcgaaactctgtcaaaaaaaaaaaaaaaaagaaagaaagaaagaaagaaagaaagaaagaaacatcccaatcatagcttgctggacaaaggtccaaggaatatcacgatgacatcccacctgaacaagggccagaaccacctcatcacgagaacatcttatcagtatcctgccaggaagcaagccctactgcccagacccctccctactcatacctataaattgtcccagcttgtaagcagcaatgggctctggcattaggctggtcccccacttctgtaggttttatgctggacgtaaagtctgaatttgctgttgagctgccctcttactgtgtgcgtgtctttctttaaccctcgccttcccttcaaaacctaacatttgcactagcttttcctccacagcatgcgtctaatcccatatacaaatgtatttccatggcacacccctcacttcattcagctatcttcaaatattacctctttggagagatcttcactaactactcataaactagcaaagagaaacgttcttccaaagtctttttatctccttactctactttacttttttcatagcactcatttccatctttacctgaatattatcattgaaaaattatatttgtttatccccccaccctactagaatataagctccttgaggacagggactttgttcactttattcttcactctgtcttcagaatctagaattgtgactgacacatagtagatactctacataaatagttgttgaatgaataagaaaaaaactagatctgaatatcattcaaaccaagaattccataacttagggtatggtgggtggctttggaaatccagcattgaagacaatgaggtgctattagacaacgcacttctacctgaaggaagccccaaacttagttgccaagcaaccactattagcatataaacaaatattaaagcacacatcataaataaaatagctaacaaggcagtttttctatacccaaccaggcattttcttgttattgttcaatatacttgagtcaaaaagagagatgcaactagttatttcttgctataaaagaaaaaaaggccacaagttgtttattgccaagaagaataactcaattgcaatttagtatttggaaagtgtccatctaagcaagccagaattttcattgatttttcttttcctttttagtttttcttttaattaaagactatttttcagaactggtttaggtttacagaaagtacagagagttcccatataccccattccactttcagttccccctattatcaacatcttgcattggtgtggtacatttgttacaaatgaaaatcaatagagatatgttattattaactaaaatccatagtttacattaggatttgctctgtgtgatgtacagttctatgggttttactaagtgacaatgtaattcactgccctaaaaatctgctgtgctctaactccctttccttctgtacacccctggcaaccactgatctttttatcacctctatactgtagtttggttttcattttactaattaaaaaagtggtcctcgtaaatgggagaggagttgaagagaagtaaatgacaaaaaactgaaggcgttctgtccatgtaattctccattgtatcttctgtatctagaatagtgactcagggataactcaatataacctgtttacattttaacgtatatccttacatatgtgattacatatatgtatatatatacacacacacatatatgatcatatatattcttatatgaggggtctttaaaaaatcatggaaaatgtatattatgaaaaaaccatggatgcatttcaaaatgtttttgcactaaaataaaatcacagtaaattgttgcagtatgtctgaacagcatctagcttgaggcattaagaaggataagacattaatttgaaatgattccctatcagaacagatgatttctacaaaaattgaagcaagaacaaacgccaaatttatagtgaagcttgggtggaaaaatggtgaaattactgatgctttatgaaaaattaatgggaacaatgcccaaaacaaattattagtttacaaatggataattcattttaagaaggaatgagactgttgaagtcacgtgaagcccacgtgactgaccatccatatcaatttgtgagaaaaagattaatattgttcatgcagtaattgaagaggactgatgattaacaccagaaaatagccaataccataggcatttcaactggttcagcttaaacacttctgactcaagaattaaagttgggcaaacttccgctcaatggtgccaaaaccactgtccccagatcagctgcagacaagaacagacctttcaatggaaattttaaacaagtgggatcaagatcccgacgcatttcttcaaagaattgtaacaggagatgaaatatggctttaccagtatgatcctgaagacaaagcacaattgaaacaatggctaccaagaggtggaagttgtccagtcaaagcacaagtggatcagtcaagagcataggtcatggcagaagttttttgggatactcaaggcatttttcttgttgactttctggagggccaaagaatgataacatttgcttattatgagattgttctgagaaagccaaagacttggcagaaaaacacctggaaaggtttcaccggagagtctttctccaccatgacaatgctcttgctcatttctctcatcaaacaagggcaattttttgggagtttttgtgggaaatcattaggcatccaccttacagtactgatttgactccttctgacttatttatgttttctaatcttggaaagatctttaaagggcacccacttttcttcagttaattatttaaaaaaaaaacacattgacattgttaaattcccagttctttaaggatggactatatggctggtatcattgcttatagagtatcttaaccttgatggagcttatgttgagaaatacagtttatattttctatttttatcttttaatttcattttccactaacattttcttttcttttcttttttaagagacagggtctcactatgttgcccaggctggtctcaaatgatccacccacctctgcctctccagtagctgggattacaggtacacaccactgcacccagattccgtgaactttttggagtcccctcatgcatacagtctaatatgtatgaaaagataatccacttataccaagatttttaaaatgttaaatatattttggacatcctgctaggcacttcatacataccgttttcaaatcttcaccctgtcccctaaaccctgtcaaaactgagaaattacagttaagctcaaggtactttttaacttcctgttggaatttataatc

SEQ ID NO: 6758 - DNA, 13276 bp, Homo sapiens
attatatggcatttttggaagttagtgagactgaagaggaaaaaaatgccagtttggatgtggttgcactgactcagatataaaataattaacaccagaaggaagcagtagggaatgaagaggaggaatggattagttctcacactgctataaagaactacctgagactgggtaatttatgaagaaaagaggtttaattgattcacagttctgcaagctgttcaggaaacatagctgggaggcctcaggaatcttacaatcatggcagaaggtgaagggagggcaagcacatctttacatgggagcaggagacagagagagaagggggaagtgctacactttcaaacaaccagatctcgtgagaactcactcaatatcatgagaacaacagggaggaaatctgcccccatgattcaatcacctcccattagccccctcccccaacattagggattccaattcaacacgagatttgggtggggacacagagccaaaccatatcaaggaatgagcaataggaaggaagaggagatgggattagatattcacattctttcatgtgccctctgctccagccacatcaaattatgtacctttccttgagttcagcatgcttttttcatatgtgtgtgtatgcacatgtgtgtattcttttctgaggtgaggaagaagggatctctttatgtacttagggtctcagtgcccaccagattataagcaacctgatggcaggaaccatgccttgattatcattatactcctaaaaccctatgaagagcttcgtactaaatagagacttagtacattgctggtaaatgaatgaatggatgaatgaatcaatgaatacataggtgtaacttcaccttctttcccactcattcattagaactcagctcaaaaagaactcctctttataaagctgaattcctttctttactcttgttacttccctcagagtactgtgttcctagagaatcttgcattattacatgaaatcaaactgaatagcgatggtctctgtcagccccaggagaattttagaactcacgggggaagtcttattttttatcctatctgtagtgcctggtgcagtacagacagtttatagttgttgcctaataaatgttagtaagatgaacatgtacttacactttaccaggtttatctctgatgaatcaatcatctttctaaacaattcagactgactattcatcatttcatttggtaatccagtccatgatctgatcttcaactttgatatatctttagcctgacaacagtttaattgctggactgcgcaaagatggacacagtctcactctttttgtgcctgatcaaatgaatgtatgcttaatgtagtgaaaacttcagacaacttggcatcataatggctaagaaccataaaaatgaagaagagtataagcagttgcttgcctgtgttctaattgtataggcactgttttagcttaccatctgcaaaattagaatgatattaagtttatcccgagtgtaaagtatgaatagtaggtggttagggggtattttggacttacagtaccctttgccagcagtggtttgaagattcttgatgctgctrctatgtgcttttatcccctctgagagcactccatttgcctcattaaccataggacttgaattaatakgaattattaaagcaatttcttrttgtctgctttttaaaaagcatttggctaaacatcattgttcttttcacaggaaatgttgattaaccctttagcataattgtttaaagaaaacataatattgccagtttttttaatgccttaagacagtgttaataatgaaatataacatagttaattattatgaccctgcctcccccttccatggggagaaaagaagtgctatgaatatacaaacaatagattttcaatggattaccatatttcttcttccttttcatctagtttttgcacatctcttctactattatcacacttacaatgtcaccatcaatcttggattttcatagtgtttagcattaaaaagaaaccactgcatagtcttagacattcagctacaagaagagtttagtaaacactatagctttagtcatgcacaactagggaactagaagactaaagagctcctttaggtattgtttgagatagatatgtaaactgggtggacgccaattgacaactgtaatcaagattcataagttcagagtggacaaaccagatagatggtggaccttacataccaattttgaagtgtatttatccatgcctgagtgtgctgtcattacacatctgtttataggagcatgtagtcttccggagtcagttttgtcaactatgttggtctcttgtgcctgaaacaatctttaggggaacaaggatgaaagtcacttctctagggtatatagcctttctctagatttctcaatttggatacgtttaggtaggagtgattcagagctttgtgcccaaacctggtcgcaaggagacagtataatgaaatcaatcctgactctaattattatccgcctagacttcagacaagctaatatagctctcttgatccttgatttcctcaactataccagatgaaattttataagaattaaatagagtattctatgtaaaagagttaaaacagcgctggcatagagtaagtccttagtaaattttagttgttattttctcacacaaaccttaaaaggaagctcagataatcctggcttcttcttgctgacttctacgtcgtgcagtttggaaggctctgtcagatggcagtggctcccttggtcttccagaatttcctgctttagtctgcaggcataacaggagatatgaccttatttagacattaaagggaggaggtggggaagaagggaaaggaagaagggaaagagagagaaccgaagaagggaagggaagaaagaagagatgaaaggagagaaaaagaaaggaggaaagaaataccttttcctcacaaactttgccagtctattatgaggacagcatttgctaattagcaaactgttttaaaatttgtacaaaaataattatggatgaaacagaaagctatgccttaacacattgtaatattgagttatatttgtctttatttcagttgattcaacagttggcattgccacccattaccttatcagtatgcaaaccttggttttccattttgaatttgtatttttaaaacttacattaaacatttccctgtgaatagtataagtttctcatatgatggttaatgataactttgcttaatccagaaaccgtagtttttctctaacactgtaaaatcattttaggtcttactacaggcaaacaatgacatttatactagagctgaagataaagtaagtgttgggtgcttcttcctggttcgaaggatgacttagtcaggaaagttaatgactgatatttggctatagaataatttagaagggaaaggcaaaatcaatttttatgaattaaaaaactctcatgattatttaacatgctatttataagctcttttgtaatggagaatgctgacataagaaaaactagtgtaaactatgaggcaaaaattacactattttgtcttagctttgaataaataaatactaaaatttgttctacaaaagataggcctagttgtattttacaaaggctatgtttgtatagcatctcatggatataagtttatattcaaagttaatataatttttaaattgtttgcatttttaaaatttttttgacaattatcacagccgagctgaaagtgttaggcaagttaaagtaggcactgagaagacacttttttattcctcctgatagtcattgatataattaactgccagcagcaaagttatatatatattccatggccttgaatttgagtctagctaactggcccctgtggggctaatgcccatgactttggccttttttactatacttaatagtacagaaatayagattcattcggctcctgaaggattagagctttctccatctagcctcctcttcaatacctatgctgaattttttctttttttgctttcaaggatctaaatttggcaataattggtgagtgctgattcttaaacttaaaaaaagtcatattggcaatctttttttctctctagtcacaaagtgttaaaaacaccaaagagaaaaatggaaatgtcctagcattcctagaaggcattgttctttatgctccctttaggctaagaaagggaatgctatttcttcttccttgttcttaaagaagggagagaatgcaaagaatattagatcaggaaaatgttctactttttcagtcttattaatatgcccttcccaccagtaccagcccctctcttcttttctttttcaccccttctctcactagcaacaatttcctgaggacacagagtctgatagtgcaaatagggtcacatttggagacagttcggtgatatatgctaatatccactctggactagctgagatcaccaatttcatttctcttgttatctataccctatgaactgcagccttcagggcaaaaggtatttaacctgcaataatacattgcctgggagccattcagtgtttatgtcagtctatatttttatttagaaacaattagagctagttggatttcaagaattttcttgagtttcaggtcaaagtttattttttaaaaaagagaataatctacaactttgtcagcatgcagctaaaataacaactatatttttagattgctagttcttttttcctttggctgcatttatcccctgctgccataaggtatgcacggacatatacactgagagcacacagggtgaaggatgtgggtatggatggtggggaagatttgtaagagatttgtacttggtagcagtaaaaaaaattccaataaacattgttttcataggataatctcatctctggagaataacaggcatttaattaaaataaaaacacccattgattgaattacaaaatttttagataatcacaattctgacctgttgccaagttagaaaatatagtaatgttctcatttggtactaatggtattggctaccactgaagtttttactcactgtgatacctattaccaataaaacaatgtaaaaacaacttcaaatataattttaaatgattacaaatgttgatcatgttacattatttttcactttacaattatttcttttcatccctaaaaataaatacctgaaaatatgaaatctttatatagacatcgcagacaaaacataaaatctgttcaagtcaggtcccctaatatggactgggataaacagaagccgtgcccatcatcagtgcgctttttcaaaatgcttgtctattacataaataaaataatttcttgccaatgagggcaatttgcatatagcactgagatacagtatctctattttttcattaggctgttttcaaagaagtgagtagaaattcatctgagttatgtatataatgacacgttaaaataatatgcttgtgataatctcatgagaatcaagggccatgtgacctgacagccaggactcagaggggaatggagtttagtaactagatatatccccaaccgtctctagggacctcagagtaagtgtttgtaactaatctacttttcctcccagtgtacaaataaagattaaaattctgcatatctgcttctctagttatcattatcaaacaaatcattctttcatgtgtatatatacagatacacatatacataaacatacatataacttaatccactgcctactattagcttcgatttcttcatctgactcagtttctgcttcttcatgacttcagcttttcatgaactctacggaattctcccataacttatttcctgttttagctctccctgcttactctgattctctccacatttcccattgaaaattccttaaaaaggagaattttatgcttgccctctgctccgtcctgcgtctgcccactgccctcctaccgtccaccatggctcctctgcgctccagctgcgtcgtctccgggatcgccgccgccttccacccgggctcgcctctgatgcccctgccagagccagctcctggtggacccatgtggagatgggaccaccagatcccatccttggagtcaccgaaggctttaagagggacaccaatagcaaaaagatgaatctgggagttagtgcctacagggaccacaacggaaagccttacagcatccacaaggcagaggcccagattgcagccaaaaatttggacgaggactacytctccattgggcggctggctgaattttgcaaggcatctgcagaagyagccttrggcgagaatagcgaagtctcgaaaagtggccggtttgtcactgtgcagaccatttctggaactagtgccttaaggatcagagctagttttctgcaaagatttcttaagttcagccaagatgtctttctgcccraaccaacctggggaagtcgcacacccatcttcagggatactggcatgcagctacaaggttatcgatactatgaccgcaagacttgcggttttgacttcacagacactgtggaggacatttcaaaaacaccagagcaaagtcttcttcttctgcatgcttgctcccataatcccacaggagtggaccctggtcccaagcagcagaaggaaatagcaacagtggtgaagaaaacaaaaatctctttgcactcttcgacatggcctaccaaggctttgccagtggcaatggtaacaaggatgcctgggctgtgcgccactctgccaattatacrccattgtcgctgccaatcatacaccaagaacatggtcttacacagtgagrgtgtggcaggcttcaccatggtttgcaaagacgcagatgaagccaagagggtagagtcacatttgaagatcttgatstgtcccatgtattccaaccctcccctcaatgggacccgtttgcttctaccattctgaatgctccagatttgtgaaaacaatggttgcaagaagtgaaaggcaaggcccatcgcatcattagcatgcaractcagctggtstctaacctcaagaaggagggttctacccactactggccacacatcactgcccaaattgacatgttttgtttcacagggttaaagcccgaacaggtggaaaggatgagcaaggagtcctccatctacgtgacaaaggacagctgcttctctgaggcaggggtcacctccagcaatgtgggctaccttgtccataccattcaccaggtcaccaagtaatgtccctggtgcaaggaaccagagacaacctttctgtcttcagcctctgctactgggagcttcacagaggatgagagagggtggatggtagtaagtggatcatttccttcaaccacagtgtgtaacactcagcgattgaatgtttctcagaaaagaacatgtagtgacatagggcagaggcatctgtggctggtgtctggaacattgtggctctaaacaaaactctaccctatccttttaatccaacttttctcaaagagtttacatgtgcaagaaagtcatcacacaaggaaacctgtcaattatgctattggaatattttagaagatttaactgaagtgttatagagttcgggttcctcatgataaatagcacacattagaggctttgagagaagacctagttctgtcatgaacagttggcctcaggtctgtcctctcatcatggagcaaccttatcaacagaccatattgcagaaatttatgtttatgaaaaccaatgagtctgctgccactacagcaaggaaaatatgcagattcctgtcatatttaagaaaaagagaaggctctcttttcttctttgtcattgctgttcttttccttaggcacaaagaattttaaccaatgtaaatttttatcccattctaccgcatgattgaccatcaaccccatcctatcgggatttatttaaaaataaagaggccgagcacagtggctcatgactaatcccagcactttgggtgggtcacttgaggacagaagtctgagaccagcctggccaacttggttaaaccccgtctctactaaaaaatcagtcaggcatagtagcgggagcctgtaatcccagctactcgggaggctgaggcaggagaatcgcttgaactggggaggcggagggtgcagtgagccaagatcgtgccattgcactccagcctgggcaacaagagcgaaactctatctcagaaaaaaaaaaaaagaaaaaaaaaagaataaagaatgtaattttctgctgatctcataccctcacccttctcggcaaagaatagtggagagtaggtaaccacactttatctcagcatcctcttcaatgattgtgtaaattcctccagttgggatgttgtctctgaccagttggacctcctccctttgttgaatgtggttgtgcatttgctcatctcacatcatgagtcagacgcacaggctagtactaggaaagaggatattctaggctatgtgtgctgccagctgggctcaggcttcacccattggaaagaaccaccatctgctctaattatgtagacttattgcagcctagtttctctgttacaataaaattactgtaaaccgccccccaccctgccaccccatgccctgcaaaaaaagagaattttatttactcatttttttaatgtcaggccttagcattagttcctaaccagacttgggttgtatgcccatgctgactcaatcagttctggcttacgaggtctgtattgtgccacctctttagcatgagctgtaggtaagggcgcttcacacaaaagagtctgacacatcttttacatcctagctcaagctattgttactttaacccactatattttctgaattagtctttccagtaggttatctaaggaaagtaatatggagtcattattagccatacagccccaactcaaatacattgattttgtcaaatatgttgattatgcagtcacctggcagggacctgagagaataggtaatgttggcaagattttatggaatggaaattcaattgggcatcagaagacctggatattagctctctgtggccatgaattaggtctcaaaattgggcaagtttcttagtctttcagactttccattctacatctgaaagttggggagataagctgtacaacttataaggtggctcccagtctgaaattctgtgggcccacatcacgaatcttgaggtcagaatatatctagaatatgaagaaggcaatgagcctctcagaagcttctaggtgataaaagatcagaatgagggcattgctttttttaaaggaagactatctatcagaaatgacctccctgagctaatatgtacttgcaggtctaggatgggttatggcaaacccactgactatagtccacatacaaaatagttgggacaggactgagacactcaaagtctgagagaaatagattctagaggaaggaaggaagtcaatctatcaaatactttcagagatgacttaacttacaattagcgagtgtgcctattctctgatagtcaggaatgtcaacactcagtacattatttgatttagctctacatttttcttatcccagaggctgacagttttcagtggctacagtgagctgaacccccaagaatatagacatgaatgaaattggagttacattaaaaaaaatcaatatgtaacctgagaagcgatatgcaaagtcattggaaggaagctgaatggctcctaggccagcaaacttcacaatcatctgatcgaatatatgagatctaatgaaagactcttagaaggcaggtgctatgatttgaatgtgtccctccaagttcatgtgttgaaaatttaactcccaatgcaatagtgtcaagaggtggaagctttaaaaggtgattaagtcataagttctctccccttatgaatagaataatgttgttatcacaggagtgaatttgttataaaagtaagtttggcttcctcttgttctttcttttgccttgtgatgcctcctgccttctgacacagcaagaaggcctgtactagatgaggatccttgatcttggacttgccagcctccaaaatcatgagccaaataaaatattattgtttgtaaattacccagtcagtgctattttactacagcagcacaaaacagagacagcaggtatcagtaatattttgttatagtagcacaaaatgaaccaagacagcaggtaagcaaatcatggaacaatggccatgacagrgtgttgcaagccaacttggcttgtgctcatctaagcactgtccacagagaagagagttttagccaatggtcttctgctattccagattcattaacaaagtagcaataaatgccagtggtggactttgaggtttttggattctcataatttcttattggagattagtatatggacattctagttatgttaatacataggtccctaagttcttgattaatgtacatttagccttaaagagatgcattttcatttgatgtgataaaacaatcaaatgttgttcttcacacccaaggaccagacactaggcagtgatacattcaccaaagtgatggtggtcacactgaggtcttcaacatggaagaatgtcagtaaatacagacagtcttcccatggtgaccacaacgcatccatgtgccttcaggtcattcttatgcttaatttttaaaaaatatttacacatttgccctcagagtaaaatcccaacttctgacatggccttatccactgctacctcatcttctccaactctgctattcagtgacatcactcaaaccacacttcctctcttcctgtgctgctaacttatcaaggttgtctctgccttggagcctctccactcattcttctcttcgcctggaaatttcttttcctgatatgtatgtggcttattcctgttcagcattcaggccttaattaaaaataatgacagaaggcttctgtgacaatcctatctaatatagttctcctatctctacttcattctatttcatttagttttgaaaagttttatttattatagctaacactagtcaaaatgattgcacttatttgttccctcttttttaaaaaaaatgttttcctcactaaaaatatttattctgtgacagcaggaccttgcctgttatgcccattgctatattcttagcaacaaggagactatctgaaacatatagaaaactcaatcagtgtcctttaaatgaatataacagatttttactctggccgttatctgatcagcttaagcttcccatactagagaacaattatcggttttgttttggtcaggtggtggcattcccatggggctcacaaaaagaccctgatttttagaagaaaactacgtggtttaggttgtgcttctctccagagccttagtccaaagcaaatagacatttagcattaaagaagatgtatttcctacttggaggcctgaggacattatcagctacactgataatctcagaaccagaactaaatagggaattctttcatatgcttctaatcgggtagataagttgtgtatgatttatacaatgtaattcaaagtaaacttttctaattataatgtcactccgtgtttcaggaattgagaagacagtgtgccatagtggaaagagctcaggctctggaaccaatagagctgggtttgcattccgctttattgcttactagacttttgcccatggacgagcccttccaacatttgagtcccagttttctcatctgtaaagcagaactggtaatattttccagagctgccgtgaagcatgtaaatattatgcataaaatacctggcatatcgtagacagttattgacttataactaccatttttatgaagatgtcacagcctatgttggtattgtgtttttgtatttgattttttatctggctgcaagttatagagactacttctgggaacaccaagttatgggttatagaaagacagctatcttgagaggagaaaagtatgaaactcataccattgttgagtactgtctgaactggcagtggatccaagatagcagtgggaactgtagtagctggcattcaagtatatgcactagaggactccaacattcacattgtccagttgctctccaatcagatattttcttctccttttactacttgcttagtctctatatatattgtgtatatctttttattacttcatgctttttgctaacaaatagactacattttttttacagtttcagctgactacaactctgtcttcataactccacctttctcattatgacccatcctctgcttcatacctcttaagtcttatgttcagcttccaaattctactaactgcctggtttttggtttgtttcagtactttgttctgaagaggttctcatattggtcttattcaagttttatgatcaaaaccatgccatcattctctaagccagatatcagtttgacccacttgaaatcaacatttgtatatgtcttaatggacaaacagcaatttcatgtggtacaatcagatacatgttgcctctggtgaggaaccattgctagagccaagagtgaggtagtgctatttaataaataaacaacgataaaagtaagaggtctatttcacccatttaggaccagttgtggctgggacgggcattggattggctttttggcaaaatatttaatcatttttattgcctgaaattttcgacccagaaattttagacctaaaatagaccctttatttagtataaccctttcactttagaaataaggaaaccagacctcaaacagataagtcccatgtgacacataagaaattaaaagttggaaaactaaattagtgaaagaatgttacaaagatactggtttatttatgtccaaaaaatctgagtgtacaaaaaacactaagagacagactattctatcagaaatatcacaatctaatcgggaaggaaagattagtataataaatataataactgtatgcacagggtgaggaagcctaatgatggagtttaggggagactcagggcaattttcaagaagagcagatgtctggactgagactcgaagagctgagtcagtgttgggaggcggctatgactgtgaagcaggttccagagtaagaatggggaagatgtgtgagcgtgtggtacgtggtgtgggaaacaatagggaggttgggccataggttttcgctgagaagtgtccatgtctgtctctcctctccctccctatcctctgca

SEQ ID NO: 6759 - DNA, 14461 bp, Homo sapiens
tttctataactaagcaatgttttttcaaatgcaataacactgatatgcagacatattgattgtccactcacaaagccattcctcaatatcattacaacatgcctctttgaatgtcattaaaaatagatgtctcatttttctaggacaagttggctgaagttctgcttgaaaactggtaatagaaaatacaatttctcaacccgctttggccttttaattctgttctacaaccttgccagttcactttcaaagtcaagggatgcatcttgcaaaaccatgacatcttttgagtaactccttctgttcttaacacatattcccaggagcttaataaatattgtttttgcaacttgtttagtggcaaaataatgagtccttggtgtatgcttatcctctgctttgctattagagaagatatattcagactgttttaaacaaattaattcaagggcagggaacagtcctaaaacctgttaaaattcaaatacttggtcactgtatgtgcagcatgtgtgttctagaaagtcctattattttaaaatataaattgaatcttgttgagaaattaatgtcatatgaatatattaataactgaaatgctgccaagtttacaaaaagccctcaatgaaactgtgaccttgtatagacaagggcctgtggagggacatttttaaaccatctctttttttatttcctcatgagatctacaatgtaagtgcattaaagttgatgaatgaattgcagtgcaacttttcctgcctcttttgcctttcatttgtctatatttcaagcttcactgaagtgatagattttgggctttgccacattgtcctctgattgcttccmtctgctcctccttttcctagtgaatctttgttttactggtrgaaaaatctrcatctttgtatcttggcattttactttcacattatctcatagattttatttcaagttgctataaagttatcaacttttatttttaactaatattatttttaacaattagaaaattgttgaccaggtaattccagcactttgggaagctgaagcgggaggatcacgtgagcccaggagctcgagaccagcctgggcaatgcaaggagactgtctctacaaaatataaaaatacattagccaggtttggcggtgcatgcctggggtccagctattcaggaagctgaggtgggaggatcacttgagctggagaggttgaggctgcagtgagcagtgatcgcaccactgcactccagtctgggtgacagagggagaccctatctcgaaaaaaaggaaaagaagaggattttgctggcaagatggctgaataggaatagctccgttctgcagctcccagtgagatcaatgcagaaggcaggtgatttctgcatttccaacagaggtacctggttcatctcactgggactggttggacggtgggtgcagcccatggagggtgagcagaagtagggtggggcgttgcctcactcaggaagtgcaaggggtccctcttctagccaagtgaagccgtcagggactgtgccataagaacagtgcactctggtccaggcttttcccacagtctttgcaacccacagaccaggagataacaagcggtgcctatgccaccagggcccggggtttcaagcacaaaactgggtggccatttgggcagacatcaagctagctgcaggagtttttattttcataccccagtggtgcctggaacgccagtgagacagaaccgttcactcccctggataaggggcagaatccagggagccaagtggtctggcttggcgggtcccacacccacggcgcccagcaagctaagatccactggcttgaaactctcgcttccagcacagcagtctgaggtccacctgagacgcccgggcttggtgtggggaggggcatccaccattgctgaggcttgagtaggcggttttaccctcacggtgtaaacaaagctgcctggaaggtccagctgggcacagcccaccacagctcaccaaggccgctgtggccagagtgcccctctggattcctcctctctgggcaaggcatctctgaaaaaaaggcagcagcgccagtcagagacttatagataaaacccccatcaccctgggacagagcacctcagggaaggagtggctgtgggtgcagtttcagcagatttaaacgttcctgcctgacagctctgagagagcaacagatctcccagcacagcgttcaagctctgttaaagatcagactgcctcctcaagtgggtccctgactcccatgtctcctgattgagagacacctcccagtaggggctgacaaacacctcataaaggagagctccagctggcatctggcaggtgcccctctgggacgaagcttccagaggaaggaacaggcagcaatctttgctgttctgcagtctcagctgatgatacccagtcaaacaggacctggagtggacctccagcaaactccagcagacctgcagcagaggggcctgaccgttagaaggaaaattaacaaatagaaaggaatagtatcaacatcaacaaaaaggacgtccactcagagaccccatccaaaagtcaccaacatcaaagaccaaaggtagataaatccacaaagatggggagaaaccagtgcaaaaaagtctgaaaattccaaaaaccagaacgcctcttctcctccaaagaatcaccactcctcactagcaaggtaacaaaactggacagagaatgagtttgacaaattcacagaattagtgttcagaaggtgggcaataacaaactcctccaagctaacggagcatgcaaggaagctaagaaccttgaaaaaagttagagcaattgctaactagaataaccagtttagagaagaacataaatgacctgatggagctgaaaaacacagcacgagaactttgtgaagcatacacaagtatcaatagccaaatcgatcacgtggaagaaaggatatcagagattaaagatcaacttaatgaaataaattgagaagacaagattagagaaaaaagaatgaaaaggaatgaacaaagcctccaagcaatataggactatgtgaaaagaccaaatctatgtttgactggtgtaccagaaagtgacggggagcatggaaccaagctggaaaacactcttcaggatattatccaggagaacgtccccaacctagcaaaacaggccaacatttaaattcaagaaatacagacaacaccacaaagatactcctcgagaagaccaaccccaagacacataatcgtcagattcaccaaggttgaaatgaagaaaaaaatgttaagggcagccagagagaaaggtcaggttacccacaaaggaagcccatcagactaacagcagatctctctgcagaaaccctacaagccagaagagagtgggggccaatattcaacatttttaaagaaaagaattttcaacccagaatttcatgtccagccaaactaagcttcataagtgaaggagaaataaaatcctttacagacaaccaaatgctgagagattttgtcaacagcaagcctgccttacaagagctcctgaaggaagcactaaacgtggaaaggaacaatcggtaccagccactgcaaaagcacaccaaattttaaagtccattgacactatgaaaaaactgcatcaactaacaggcaaaataaccagctagcatcataatgacaggatcaaattaaccttaattaagttagccttaaatgtaaacgggctaaatgccccaattaaaagacacagactggccacctgtataaagagtaaagacccatcagtgtgctatattcaggagacccatctcacatgaaaagacacacataggctcaaaataaagggatggaggaatatttactaagcaaatgggaagcaaagaaaacaaaaagcaggggttgcaatcctagtctctgataaaacagactttaaaccaacaaagatcaaaatagacaaacaagggcattacataatggtaaagggatcaatgcaacaagaacagctaactatcctaaatatatatgcacccaatacaggagcacccagattcataaagcaagttcttagagacctacaaagagacttagactcccacacaataataatgggagactttaacactccactgtcaatattagacagatcaatgagataggaaattaacaaggatactcaggacttgaactcagttctggatcaagtggtcctaatagatacctacagaactctccaccccaaatcaacagaatttacattcttctcagcaccacatcgcacttattctaaaattcaccacatagttggaagtaaaacactcctcagcaaatgcaaaagaacggaaatcataacagtctcttagaccacagtgcagtcaaattagaactcaggattaagaaactcactcaaaaccgcacaactacatggaaactgaacctgttcctgaatgactactgggtaaataatgaaatgaagggcaaaataaagaagttctttgaaaccaatgacaacaaacacacaatgtaccagaatctctgggacacatttaaagcagtgttaagagggaaatttatagcactagatgcccaaaaaagaaagcagaaaagatctaaaatcgacaccctagcatcacaattaaaagaactagagaagcaagagcaaacaaattcaaaagctagcagaagacaataaataagatcagagcagaactgaagaggagagagacatgaaaaacccttcaaaaaaatcaatgaatccaggagctggttttttgaagagattgacaaaacagatagaccactagccagacaataaagaaggagagaagaatcaaatagatgcaataaaaaatgataaagggggtatcaccactgatcccacagaaatacaaactaccatcagagagaatactataaacaactacacaaataaactagaaaatctagaagaaatggataaattcctggacacatacaccctcccaagtctaaaccaggaagaagttgaatccctgaatagaccaataacaagttctgaaattcaggtagtaattaatagcctaccaaccaaaaaaagtccaggaccagacagattcacagccgaattctatcagaggtacaaacaggagctggtaccattccttctgaaactattccaatagaaaaagagggaatcctccctaactgattgtatgaagccagcatcatcgtgataccaaaacctggcagagacacaacaaaaaaaagaaattttcaggccaatatccctgatgaacattgatgcgaaaatcctcaataaaatactggcaagcggaatccagcagcgcatcaaaaagcttatccgccaggatcaagtcggcttcatctctgggatgcaaggctggttcaacatacgcaaatcaataaaccatcattctcagcaaattatcacaagaacagaaaaccaaacaccgcatgttctcactcataagagggagttgaacaatgagaacacgtggacccaaggaggggaacatcacatactgcggcctgtcgagggatttggggttgagggagtgatagcattaggagaaatacctaatgtaggtaacaggttgatgggtgcagcaaaccacaatgcgatgtgtatacctacctaacaaacctgcacgttctgcacatgcactccagaacttaaagtataataataaaaggcgctgcctcaggatgtaaagtgtaacaagggggctggggtgggcagcgtgggcctctgagacctttggttgcccgtgtccgcagctcgccccgcagccggctccacaatggtccgctccgtttgccacgtgcggattcgggttccagactgaaggctgcgtgttctctgccgcccacagcccaagtttattgtggcaaccgccggagcagccttccccgctatggaggagcctggggctacccctcagcggtatttggggctggtcctgggggagctaagcagggttgtggcagcactgcctgaaagygtgagaccagactctaatccttatggttttccatgggagttggtgatatgtgcagctgtacatggattttttgctgttctctttttttgtgtggagaagttttagatcggttgggagtcggctttatgtgggaagagaaaaaaagcttgctgtaatgctttctggactaattgaagaaaagcataaactacttgaaaaatttagccatgttcaaaaagagtatgaaggctatgaagtagagtcatctttaaagaatgccagctttgagaaggaggcaacctgtgaaaagctaaacaggtccaattctgaacttgaggatgaaatacyctgtctagaaaaagagttaaaataagagaaatctaaacattctgaacaaggtgaattgatggtggatatttgcaaaaggatacagtctctagaagatgagtcaaaatccctcaaatgacaagtagctgaagccaaaatgaacttgacgatatttcaaatgaatgaagaacgactgaagatagcaataaaagatgctttgaatgaaaattctcaactccaggaaaacgagagacagcttttgcaagaagctgaggtatggaaagaacaagtgagtgaacttaataaacagaaaataacatttgaagactccaaagtacatgcagaacaagttctaaatgataaagaaaatcacatcaagactctgaacgcttgctaaaaatgaaagatcaggctgctatgcttggagaagacataacggatgatggtaacttggaattagaaatgaacagtgaatcggaaaatggtgcttacttagataatcctccgaaaggagctctgaagawactgatttatgctgctaagttaaatgcttctttaaaaaccttacaagsagaaagaaaccaaatttatagtcagttatctgaagttgataaaggaagagcttacagagcatattaaaaatcttcagactgaacaagcatctttgcagtcagaaaacacacattttgaaagtgagaatcagaagcttcaacaaaaacttaaagtaatgattgaattttatcaagaaaatgaaatgaaactccagaggaaattaacagtagatgaaattaccggttagaaaaggaagaaaaactttctaaagtacacgaaaagatyagccrtgccactgaagagttggagacctatagaaagtgagccaaagatcttgaagaagagttggcgagaactattcattcttatcaaggatggattatttcccacgagaaaaaagcacataataattggttggcagcttggactgctgaaagaaacctcaatggtttaaggaaagaaagtgctcacaacagacaaaaattaactgaagcagagtttaaatttgaacttttagaaaaagatccttatgcacttcatgttccaaatacagcatttggcagagagcattccccatatggtccctcaccaytgggtcggccttcatcctaaacaagagcttttctctgagggcccactgagactctcatctttgctaacaggaggaggaggaagaggctcaagaggtccagggaatcctctggaccatcagattaccaatgaaagaggagaatcaagatgtgacaggttaaccaatcctcacagggcttctctgacactgggtccctgtcacctccatgggaacaggaccgtaggatgatgtttcttccaccaggacaatcatatcctgattcagctcttcctccacaaaggcaagacagattttattctaattctggcacactgtctggaccagcagaactcagaaggtttaatatgacttctttggataaagtggatgggtcaatgctttcagaaatggaatccagcagaaatgataccaaagatgaccttggtaatttaaatgtgcctgattcatctctccctgctgaaaatgaagcaactggcccttacttttctcctccacctcttgctccaatcagaggtccattgtttccgggggatacaaggrgcctgttcatgagaagaggacctcctttccccccacctcctccaggaaccatgtttggagcttctcaagattattttccacsaagggatttcccagatccaccacatgctccatttgcaatgagaaatgtctatccagcgaggcgtttcctccttaccttcccccaaaacctggatttttccccataaaccccacattctgaaggtagaagtgagttccctgcagggctgattctgccttcaaatgagcctrctactgaacatccagaaccacagcaagaaacctgacaatatttttgctctcttcaaaagtaattttgactgatctcattttcagtttaagtaactgctgttacttaagtgattacacttttgctcccactgaagcttaatggaattataattctcaggatagtgttttctaaataaagatgatttaaatatgaatcttatgagtaaattatttccattttatgttattctggatagtataactattttaatttgataaactaatccacgattatataaacaataatgggagttttatatatgtaatcttgcaggtagggaggctttaaattataaaggttgtgtctttatgccaagaactgtattaactgtggttgtagacaaatgtgaaagtaattttatgcttaattaaataaattttagttgatttttttttaaaaaaagaaaatggttaatctatcatttaggtgcatcatcagttgtttaaccattctctcttactgaacattgggttgtttaaaaagtgttgttatttttgaatcatggttcagtgaacaattttggacacataactttttatctgatgagttatttcctaaggatccagctcagaaactcagcacataaacctaataagaaaaaaacaatttgaagtggctaacctcttatcccaataaaaatgttgtatttatgtttggatttagatgcctttcagtggtcataccttcacctaacttttatggattctacttttaacatgtagagtgactgtttaaatcacctaaactcactgagttttaagttcctttttattcaacaagactggattgtatgttccagctcctcaaacttagttaccaaccaccatcctagagaagtgaattcacatgaggcctgtccagaagaacaatctccctttcagtgtcctcatgcatgcagtgaccagagaccaaccttgataaattatggaaaaagtacagcacattctggaagagccatgaaagatccagatcatctggtgctggataagaatattaatggacaggctgggcgcggtggctcacgcctgtaatcctagcactttgggaggccgaggcgggcggaacatgaggtcaggagatcgagaccatcctggctaacacggtgaaaccccgtctctactgaaaatacaaaaaattagccgggcatggtggcgggcgcctgtagtcccagctacacgagaggctgaggcaggagaatggcgtgaacccgggaggcagagcttgtagtgagcccagatggcgccattgcacttcagcctgggcgacagagtgagactccgtttcaaaaaaaaaaaaaaaagaatattaatggacaaaaagattaatgaaagaacatattgaagcatccaattacctggtgtctgctcaaatgaggaatcggtgagataggtcagttagcagtcaagatttataaaagagacgatggccttgggaggggctgccctactcgactttttaatggctagaagctattaagggctaagccagaacccttcagtatggttcagtgaggatcccaatttggggtccaaaagtaaatgacaactcccaggaaccattaagaataaaaatcatggagcattactgagaatttgtgttatctaagtctgaggaaaattaatgttaaggaagctttcaaaagtctaatatttacaccgaattccagggcaccatgctctaagacaaagcactctggtcctgcccctctcctttcctcatgttttttggttcttgggatccttaagggtcaatgttattcttaaaatacagagcatcctggaaactaaaaaagtggaagatattcaaattctaatgaatgtactggcagtattgtagatcatggagtataacataaagacaagaatccctagcctcttccaccatactttgtaatggtaaggagaaaggatagaattttgagaagtctgggaagacaatgtatgataacatctggagaagctctgcataagttacttttgttcaggcttaagaaaaattctagcttgcccctgcactgtcatcaggtatcatgaaagtaaataaaacctttaaagattcttcaagccagcagacttctatcttctctatactatcctgtgatcctaaactcttaacagttactacgtataatttccctacatttgctactagtattttatcatacacaatattacactcaatatttcaaaagtggatgattcatctcccgaagagactgcaaaattcatgagttaagatttgagaatactattttagacaagatttagtcagattttagagagttagaaacctgtaacaattctctaacaatactgcttctccttttgtgtattaaggaatttttgtctatcaaagatagtacgaggtagaccagaagataacttgccttcaaaatatctggaatgtaaaatggcaacagtagtatttggggacttcgtaggggatggccaatatacacccattcttagaggtactgatgatataatgtataagacaaaatcaagtggtctccatcaccatataatgtttaaaatggcaaagagggagcagaacaaacaccctttgcaaatctcttcatagaatctaccgtaataaacttgtacttgcttaaagtgtgtctcttcagtggtcttattaccactactttggggaaaatgaggctgcttaaaagattaacagacattacattttacatatctgtggcagagaaaacactatgtattcaccaaaccacttcttttccttcccagtcactcgggaagaggtcatttctttgtcccctttcatctaattgaggtgccgtgactacttctagacaggcaatgtgagcagaaggtatgcacgccacgtataggcctggtcttcaaaaatccctcagatatgatcttcttctctcgtctctttcatggacaaactacaggccatgtaataaggatggtggggttccaaactgaaagagcctggatttctgatttactgttttgagaagagttcaccagggaaacagcctggaaatacgcacaggaaaatatgcacaggaccctgtgtgagcaagatataaagatctattacatggtgccattaaggtgagagtattgtgcttatrgtatccagcattaattatcctcactactacaacttctttgtatccatcatgtggaaaagtagagtatttaataaatgattattgagtttattaccttttttatattccaatcattgctaattgtacgttacctcatttcaaggtaaaggtgaccaagggctaaagcagtgctatccaaaccaagccagacatcaaaatcacacaaaaccttttgaaaatacaactttgaagatgccattcacatagatatttattcagtgggttttcaaatggaaccctggaatctacagtctttaacaaggcttcccaagttattctgatatacagcaggcaaatctgagaaccactggacaagaagaaaataaaggctatatctttcgacaacaaagacaatgccttaaacatagaatgtattcaattaaagcttgtagaaagataggtttgtgaacaggcacagggactagcctcgagcaaattaataagggcagcaatgtttttcactgaaaccattattccccctattttatttcttctggggctctgtgtttcctttctcctatcaaaatccattctaaggttggaggttgggggtatctcttgcctactccatacagcaaggaataaaattagtatttctcgaactatctgtgacaacagacccattgtaggccagtacttttgtaaaatgcaataaaaattaacttctagaaaatgaaattttaaaatcacagacattcaaaatacaaattccaatttttttattattaactgtaagaaatttaaaattaaatctcaataaataaaattaaagcaaacataagatagaaaaaaataagcattatggattggcccagtctgcaaactgtatacactttgccaaacatgggcataaattactaagaagcaaaatcttccatctgtaaacctttccatttccattgacaatatgtgtgagggaaaggagggatgcttctgttttagaatgccaggcgtcagctaacaagtgacaaatacgtattgagactgagatctccccagcctctcagtagtcagcaagaacatgttgaggcctctgtttttgactaaaaaattggccagtgcatgggcaacatgcataggtcctgaatgaaaaaaatagcagcagcagaaatttaaaagaattttcacagctaggccacagtaaattctcaagcccttcatcagaagccactgtggggcctcatttatgcctttgtttttattaaattggatgtgatcttaagattcttctgtcaaaattccactagcatgtgaaggcaccaaaagtttaaaatgtaaaattaacccaagttaagctattccattattaagcaatagcagatatatttgttattatatgagaagaaagttaacagggagctaagattgatgttactgataagaaacagaaacaagactttaaaattaaataaatgaattatttatttaataagaaccaattgacagattctcgataaagactgtaagatgtcttaaaacattaggtgtatggagataacatttgtaactttgacaatttatatgatgagaaaaatcaaggaatgttattgtttattggcagagttctagaattacaattccatcattctgttttggggaagtttcccttgaagtaaatgataacagggcttgaaatagtacacctcagcattttgtttataaaactgtggaataggtaaggtttgtattgtaactgaacccaggttcagctgcttgctgctctaaagctagacataagagaggaaggttggtgggaggaaaagcgattttaatcggagaagcagcaaaccaagaagatggtgaacaatagtcacagaaccatcttaaattttaaaatttaccatagagtgttcaaaggaaaacttggtatgggaggcatgcaggaggggtgcagggggcggggtctgtgtgtcttgttccaatggctatctcagatagtcacccatctggaggtctagttggtattattttgaattcagcccagtggtggtggactgtcagtgactcctcgctaagcaggaggattctgcactcagggctccatgcatggtttgtttcaagattggcctctggaatttctcaagcaagaacataattaaataagcaggcattgccagaggggagtgtctggaaaggaaaggaatgaagagatgaaaggaaagtgggtggttaaactatatttttaaaactgaggttcccagttatagtatgtttcgcacgctccccccattttagcacccctgacagaatttagtaatctcctcatcttgtcctctacttcaggtcccctatctgtccttgtactctctagggtttccttttcttcttcacgaccttccttccctgcaattttataagctattcctatcccagtgatttagtttcagcttataaaactgtgtctttgccattgtaatcaaattgaagggcctctgcttcatggttggattctgtgaccaggagactcttacgaggagttggccaggtctctgttaggaaagcaaaaaagaacaatggaggcaattatcccattgatttcagctataaatcctattttgcctgaattgtctgaacgatgagtattctgtgaaaatgctgctctctagtgcaatagaactgcaaataatgcacatctatttcttataatctcatccaacatacccacagagattcagatctaacaaaacagaggtgatttggttattgaatcataatataaatatggggaagaggagggaaatttcaagcctgaggaaactgtagtaggagtaagtatgctgtgtttaagaggtcacagataaaattaatattaccaatccatcaataggcaattactaatagcttactacacacacaggaataaaatgtgaagacagaggaagtgtaaaatggagccgccaactctacagagttgtttgcaatttggtctggtagaaagctatgaaataaggaagtacatgattgagagctagagaatgtggcacaggctctgaacccggaccgttcaatg

SEQ ID NO: 6760 - DNA, 20158 bp, Homo sapiens
gatgaatgtgggggttttactgagttgtggaagtggctcctagtgggatgaatggggagctggaaggtggatgaaatgggaaggtgatcttcctctggagtttggccatccaacrgccaaactactctctgaccactcccagccaaactcctcttggcgttcagaagttcctcctcttctctccttctctgtcatgtcattccacctttcatctgcttgtcttctcatctcctcgtctgctcatctgatctggagcctggagttcagggtttatatgggtacagaatagggggcatggcaggccaaaaggcaactttttggggcatgaaaacaggaatgtctgtccccatttggagctgccagtctcccagcttaagggtggggcacgtgccagggaaccactctcttctttataaatatatatatataacatttcaagttctagggtacatgtgcacaatgtgcaggtttgttacatatgtatacatgtgccatgttggtatgctgcacccattaacttgtcatttacattaggtgtatctcctaatgctatccctccccactcccccgaccccacgacaggccccggtgtgtggtaggaacaaccctcttctacccagtatttccctgtctcttgtctgaatcaaagagaaagtgaaatgatctagtatatttgaattaaggattcacagaatgttaagtatatctactattgtactttccaattaaaattactataaaacttcatggcagggactattaattaatcatttatttgaacatatgtttactgatcactgcagatgtccaaggcacaattctattttctggggaccaatggttaatgaattatacaagcatttagcttatattatagtagaaggtggtcagcacagatagtaaagaaacatagaaagcaaagatcaagataattgtatatcatggaaagtgttatgaatgaagaaaagtgatataatcgagttcttctggacaggctcaagcagaccctcgttgtgctcatgaggattggtttgtttaagcttcactgtcagtgcttggacaattgcccaggtttcttccatttttaatatgatccagaataatccaaacttgcttctacgatgacagctgccatttattgctctttctatatgcttttatcagttatatttgtggcaggaattaaatttatgacagatttactattaagaaaaataaagcacagaggttcaataacttgccgaaagccacaaggcaagtaagtgttgctccaggatttgaatcaatttgtctgtcttcatagtgcttcattttaattgggatattttattatgctggtcaggtatattcacctgatggggtaaatatattaatacatttcaaaataaattccatcctatattcatcctctgtctccttcttgtrgccatttattttccttctgcttttagtttatttttgtttcctttaagtctttgatacctctggctttcatcttcacttttccctatttcttttttgtaaataattcggaattaattgtcattcttgccattctctgggtactttcccatttaaaccccactttaaaagtgtcctctgaaataggcatgaaatgtgagaacagaaagaacagagtgagaatgaatccttctgtcatgttaactcaatatttcttttaagatcttctaaatcaataatacttccacatttaataactgtgtttccatattttccaaggtgaacaatattttctgacaagtttaattcatgtgagagcagcaagaattgtcaaaggtgattccaagtttttagctgagaaactgtacgtatggagtgtacatttgttaagatgaagaaacacattgggaaaaggtacccattttttgatgtgttaagctagaaaatcctataatatatcaaagtgaatatgccaagaatccattcagatacgtggtcctgtagatcaagcgctggtatggagataacaatttttggacattatcaatgtatggctgttatctcaaggcacgaatctataagaaattaattcccattctggccattctctgggtactattcaatttagttcattccaggataagttttttgttttttttttaagaagaccaagaattgaactctaggacacaacaacatcttaaattaatttaaagaggaatcagttaatctgagggaggattgggttgtgagtgaagcaaaaggaaaaccaagagaatggtgtcctagggaacaaagcattttggagaagaaagtttgtcacgaaaagtgaataatcagttatttaaaattctgtttatacgatgtgtaagatgaatcctgagaactagccattggatgtgtttatactgaggtaatgttgactttagcaggagtgttttttagaaatagtgaaagaagggccaggcgtggtggctcacgcctgtaatctcagcactttgggaggccgagggggacagatcacgaggtcaggagatcgagaccatcctggctaacacggtgaaaccccgtctctactaaaaatacaaaaaattagccgggcggggtggcaggcgcctgtagtcccagttactctggaggctgaggcaggggaatggcatgaacctgggaggcggagcttgcagtgagccgagatcgcgccactgcactccagcctgggcaacagagctagactctgtctcaataaaaaaaaagaaagaataaaaataaaaaaagaaaaaaaagaaatagtgaaggaaaaagcctaattagaataggtttgggaagatcatagagaaatttttgaacccatttgttgttaagaaaattagagaaatggagtgatcatgtgtatggtgttacggtgaacaaaagatggcttctgcttgttttaatataggagatattatatcatctttggaagtgaacataagtgaacaagtagagatgaaaaaaatggaaaaattgatagaaagagaaaaagaaggaaaattacaagcttgaaatctttaaggagataggtggatggattttaatatacagatggagattgatcttagatgagtagtacaattcaaccactgttgaaaagaatactacctcatatactgatgtagctgttttggtatatttgactagtgaaacagagaaaacttctttctgaatttcttttttttcttaagataatgttaatggaaaagccaggttatccgtttagtttgtagaaagagaagacagaaagaaatttgagagtctgagaaagaaaaagagattgggaataatcttttaggagatttgcagaacagattgattagtaagagtgctgagaagttacatttcaaaaacgtaagataaaaccagttaatatgatcacattcagctacttgaatgtatgcacagagtaggtagggttggatttaaacaagctgcattttctagatgcttatgatgaatgaagaggtaagcaaggaagttgtagctgtgggtaagaaaacgatttttataattggccctggtaagtggtgcatgctgggtataataggaaatgagacatgagggattgacaacaatgagaagttggcatggtcagtgaagttgctatctcagtgggcactgaaatgctgtagagtgtagaatacccagagagagtgggctggaaacataggaggtggaggtcagagagtgaaatatctgaaacagatcatggaagaatttctcatattggaaatgaaattgtctgcactctagtgcagtgctgttcaatagccacgttgctaataatggaaatgttatttacctgcactgtccaattgcatagccaatgccacctgtggctgttaagtacctgaagtatgactagtgtgacctaggaaataaattttaaatttaatttaattttaattaatttaagtttaaatagcaattatatgcctagtgattactacggtgaatagcctagctctaaactaggatcatctagtgggtgactgatttttgtgtgtgagcaactgatttctgagtgtgggtaaggttattggaggcaaattcaagaactgagagcccatagtattggaattatcacctacctgaatgtcgaaatcacatgataatcatgataggagtagagatcaataagatttaagatagttgaaaaaataatgaagaaataaggagaatttggtaaatgactgcaacaaagtgagtttttaaatagtgtaactgataaaataagctacagaaatgctgtaagtttttaagggagaaaagtatataaagaaatgtctaaattaatatgatcatacactaataatgatagatgatatagctttttggatcataataatagaaagtatgtgagaagtgttatcaatcttctcttagaaataattaggaatcaggtgacattcttcatcattgttcaagctaagcatcatttcatggatagtgagaagttaatactttgttaggaagctttaaggtatgtgaaagaattaaggaaatgaggatgaaaacccagtttttgcaaaatctggtgaaagtcatgagacgtgaggccagccagacttcctgaatcgagtggggactcagggaactttcctgtcttacaagaggattgtaaaacgcaccaatcagtgccacgtaaaacgcaccgatcagcgctctgtaaaacgcaccaatcagcaggattctaaaagtagccaattgcggtgaggattgaaaaaaggtcagtctgatacgacagaaacggaacatggaggggacagtaaggaaataaaagctagccaccccagccagcagcagcaacccgcttgggaccccttccatgctgtggaaggtttgtcatcctgctcttcacaataaaccttgctaccactcagtctttgggtccgtgccatctttaagaggtgtaaccctcaccgcaaaggtccgcggcttcatttttgaagtcagcgagaccaggaacccaccggcaggaaccaactccggacacggaccagaacagagatagaaaaccattcttaatttcttatttttgtaatcatctatttaaactggtcctcatgtcaatggtctctgccttttctgaattcaactagaatagtaaacataagcatagatttattatttgtttcaatatttttgatagtggagttttattgatatatgacttagagcctccaaacatttttttgattatttcatcaatttgaaaaaaaaaaaaacaaaaaacatgaacaagtaacatatgtatatttaggtgtttagagatcatgcacagcgttcctaaagagaaagtttttacattgcctttctgcatctgcttcacagctgtggggtgagtgcacctcacgctggacacctttgactaagataatctccacacagatatgaaccttggaagttttagatcactccccactcatctgaaaccacaaaactcatacccaatccttcccctaagtacagttatctaatattctgcctctccccaaaggaaagctttagaggagattccttaatttcgtccctcatatatagcgctccccccccatattttcctgggttctgtattaactacatattgctgctgtaacaaattaccacagatgtattaacttccggtagttatctttttaaaatcttgtcctgtgtattccttgctgtctgcaggattatcccatggttgttgttctgttaggaactttcccaaccatgccagaagagggcactcccattcatactcacgttaagtagctaagtagctatcagtttcttctccatgccccattaccaacaccatgtctctctctctctgtctctctctctctgtctctctctgtctctctctcacacacacacacacacacacacacacacacacacgcttgaattttctataatagcagccaggtgtgtggcacagctctttctgtcttaatgtgtgtctctctgcttaatatctaatgtggctgagaataaactagaaccaatgtctccaggcagattagctagccttagatagatgtaaagaagacaacctgactcttttctgaaacattcagagcatcctctaccccgaggatcatgggaattccctcatgttcctcctgctctgcctyaagcaccccttctttgctgcacagcaagaaacagttctgacagagcagacagtttgagatctgtaacattctaaygagaatatctctaaggagaatatttggcttttctcactttctctgtagagaaacaaattgtcattcttctcttacagaggggcagtagagtgtgtctgggtcagctgagtgactacatcaaagctcccagccttgaaaaacacatgctgttcccaggcctcaagatattgaaacattaattagataatttaaagtagcgttttcttctacaatgtctgaagaagtgamctaygygacactcacatttcaggattctgctggagcaaggaataaccgagatggaaataacctaagaaaaagaggtaggagttcagagaagaccagctgtgtccttgggggagtggacaggtgttaaatgctttgaggtgccagctttaatactggcgttaaagacatgtgctgtgaaatctccaaaatggggacaaatagttgtggratgtattagaaaagtgagtgttcccaaggttgaagtgaaaatatgtggctttcagaacctctttaaagttgtgtgatatcacacagtcagagaaattctgactgcacatgccagaaattgagcttggggaattagagatttcttcttatgaatataatccttgatatttataccttgttagagatgccaggaggatattctttcagaaaccagattggaggcttctaaaatagagaaggtagaggacgtttttcttttagatgatgtaagttacttaagagaaaactggaagatgagtgagtggattagaaatagatcagagctaatttttcttttgtcagtattttttcaaattttagggtagttgaaatccgagcataatttgtaatgttgaaccagtaataatagtatctgggtagtattttatgtacattatatacagatataattgtaatgaaaatccacaataatattcgaatattagtattttctccattacatagatgaaaaaactgagggtgagagaaattagataatttaagcaagctcacacaactgctatgtggggaagcccagtctcagtgctggtcttcagctcattctcttatgcctaattggaaaaatagcagtctccatggtcaagactctgatttaatatataagaccacatctcttattttcagatatgttaactatccaggttctcctgaatcatgtcagtcatctgaactactttctcctgccctctagatttatctttacattttgtgtggtgcatgacatttgagggaaggatatttacaaaaagccgatgggaatagactttgcatatgtctaataaatgtggttacacatttttgccttgttttgttttactttttaattctaattctaacctgtgaggaaaaaggaggtgtggatatggtgcatatcacagtgtacctagagtctgtcatgctgtatctaaaacattgcgctagatgttatttggacctaaatcaagggatatgaagctaaggaaaacatgacaaccattgatattttaaacaacaacaatgactaggatgctaacggctttctggtctattctgctgtttgtaggttagactgcacattctttccttctttcattcagtattcattcattatttattaggtgataaatagcatgaataatagatragttattgttaacaggtaaaagatactttaaaaagtcgaatccacttttacaaggcagatagaacatgtgccttatagagacttttgagctcaaaagcttgaggtgtctcctactgtcagcatcatccagaaaagcagtttttagatctctcatttatgaattcaataaacttgaggaagaaaagtgggcaatgatgtaaaacaaaaaccttgaaattaggagaagcttcctttttattttattattattatactttaagttttagggtacatgtgcacaatgtgcaggttagttacatatgtatacatgtgccatgctggtgtgctgcacccattaactcgtcatttagcattaggtatatctcctaaaggtatgcctcccccctcccccaacgaagcttcctcttaaagtgaaggagagcggtggagaaatggaggggaaacaaggatggcaccctcattgcacttcatattaggtattttctaaatgagggcattaaagaagcaagaaagaaacgttagtatcgggaagctccctaagtgggagaaataaacaaaccaaagtgaaacaagcacaaagcagttctgtgtgctgattgctcttttgsctttctccagggcatccagctccatctcccatttggcgtcatgctgcyctgggtctggtaactctttgcctgatgttgctgattgggctggtgacrttggggatgatgtgtaagtatatcagcatcaaacccaacaaaggcaactagaaaacatattgtaaaccatgtactttcagcttggattgtagatgggtcctagcatcctgaatcgtctgatacktttctgctgtctcatatctctcctattcgtcatatcttcccaaaaaaccggcaaaagacattatcaggatttggttctaaattcattgttttatcttgataagctaaactggacttagacaaagactctttgtttccagttattcattagaataaagagcctcttttctgcctagacacacattcacttatcattccaatgctgagaaataaagtcaagaaatatgtattgaaggaagtgcttgctatttttatttacctgaaagacttaacactagactaggttcagtctgcttacatgaracttctctagtggagagaaatcttccaagtagcagcagcagcctgatttctatgaatgagaaagacatataaacaaagaggaagagtggcctgatacaccttaccaagtaagagagttgaaccatctccacatgacaatggaagctccactctcaagcaccacagccacaaaggaacattctattgattctgacccatcctcgggaagttggggatgaacatggtagggagttcttgagtaatgagaaaaacatcctgagaatacaaactttatagggttgttaagtatatggtatacagagtagtgaattggcatggtattcgcttacagggaactcacagtcaagaaagttaatttgctgaatgatactaacatctcctctgctacattcatttctttttaatgatttaatggataattttttaggatttaatggttaattaggatttggacatatctttgccaacataaaaagagactaatgatgtaccttgctcttttgaaaaggaatatgatgttcaagcagcagtaacagatattctggagccaatcagtatgaggattagcagccgatcttctacaataatgtatatttaaaaattaagtgaaaatgcaataacgtacgtccattggttcgatatagaagggtgacatttcttttctaaaatttagtgcttttggtgcagtggttcttaaatttgttgtgctgatgaagcaccttaaatgcttatgaaaagggcatatttcatggacccatgacgagaaatggtctgatatgccattaagatctgctttttcttttcttttggtaaacaagcatctcaggtcatctgcagagtttgagatatccattgtcccaaagaatgctgttttcattaaaacaacaattacatcatctatctccaaataaaataaaacaaaaataaaacaatttcatgaaaatgagtggcagaatgactggcccttccttagatgtgatgtcagaaatatatcattattaaatcattattttaatatagtgcaataataaaaatgtaaataaaattataaagaactataaataatttggaatagaaaggcatctggtttgtttctttcatgatacctcaaatactaagagctactaataaatcttgaacaattmagaaatgtttctgtcacgagaattatctacagttataagaatagaagaatatatgaacttgtctcctgtcatgtcttggagttttgcagatatctaatgacattaactcagattcagagaaattgagtcaacttcagaaaaccatccaacagcagcaggataacttatcccagcaactgggcaactccaacaacttgtccatggaggaggaatttctcaagtcacagatctccagtstactgaagaggcaggaacaaatggccatcaaactgtgccaagagctaatcattcatacttcaggtaatcagacttagtcctgctgaccagtcagatggcatatgytatcctggtctaagttgatcacatgtaccacctaagagtattgagagagttatgtcatccagtgaaccttaatgatgttgcactaaatttacacacagcaaggaaatatacaaattcatttaatatttttgaaaccacaggcaaatttgggaagtatcttggaatgatatcaatctggatacttcaacccctcattttattaactatttctaggtgatcatgttgctctgaaagcttaaaggcatagctggtaattctgaggtcagaagactaagccatgaaaagagaatccctgttgccccaacccataaccaggggtcacttttttttcagaggcttctaaagcagtatgctttcagggtgcaggctctcagtccctattgttcaattacatgattttgtttcaaagccttctccagtcactctrgagtcttcagtttatattattgggtataatttccttttcagaccacagatgtaatccatgtcctaagatgtggcaatggtaccaaaatagttgctactattttacaacaaatgaggagaaaacctgggctaacagtagaaaggactgcatagacaagaactccaccctagtgaagatagacagtttggaagaaaaggtaggattgagtctcattctctagttatagacattatccatacaatgagagagaaataaataaaacatctgattcacatgatggaaattcagtgcatcttgaattagaattaatacatgaatttaatgaatgtcctcatctatcttaactctgcaaactggaatgtggcgctcacgtaaaactttttctctgttttctctcttaggattttcttatgtcacagccattactcatgttttcgttcttttggctgggattatcatgggactcctctggcagaagttggttctgggaagatggctctgttccctctccatccttgtacgtctctaactattgagggtaaacacaagctttccatggaatcctgggaaaattaataatgattgtgagaattataaatacagacataaaaagaggagtacaacatactgagaaaagagctccagtaacaaatattgaaaggaggtatagttcatttcatctctgtgacaaatttatagcaaggcactgaattttatcttttggtagaaatgtgtttatttaacacacacacasacctaatactacattcaaagtattttataaatactaacccttgaagaaagcagttatattcccattttataggtagaaatattataatagagagattaagtaacttgcctgaggtcactcagctcataaattgcactttagggattgygcactcagtcactcagctattctgactctccagcacctacaatccaaaagggtgctgctggtcataagaacacatatcaacacatttatttatactaaataactgtcaaccattttctaacaaaaagtaagactgaattgactgattagttcaacaattagtgtcatgttgaggacttgccaattacaatatacggcaagtgtcttttatgaattaaaatgaactaaaccttccacttcagggtttggatgaaactatttaaaggacaaatagaatatataacacttggaaaatttcaatttttttaactatttaaagttatgaaaaaayagacgtcaacaaaaatgtgtaaggggatattaggtttgctaaattctttcacagactataaaacaaaaaattttgaggaacacctctcatcataactacatttaaatgaaacaactgtattaatattttaaatataatagtatttttctattagataaaatttaagatctttggcatcttaatggatttttaaactttttattgatacataagagatgtatatgttttggggtatatgtgataatttgatacattcagatagtgtgtaaagatcaaataagtggaattgggatatcgatcactttaaatatttatcttttctttatgctaggagcattcaaattattattttctcattattgtgaaatgtacagtagattattgttaattgtattcaccctaataatctatgaaacactaggtcttacttcttctatctaacagaatatttgtattcataatggctttttatctaccttcctcccccaacaaatcattatccacccccctccctcctgtttcactctttaaagcatgttgtcaacgttttcttaaactgaataataatcactcatcttctgtcaaagatgccatgcttcagctgtgactcagcagttccttaaatcacaaacaatggtaggtctattattttctccctggatacactttatcttcatccatttcccaatgttttgtcatggctatttctactcaaacactaatcccccattctctaatcaccattattaatcatatcaagtcaattagtttggtttcacactaataataatgacaaaaagcacatgcagagtaatacacaaacaaaaaaagtgacagttacttttttgtgacaagagcaatattgggtatgaactgattaatattaatctgaggtgttgctactagactgagggtttccaggagtagtactatgacatcatgtaaacacattcagttttcatgttggaatctaagatgtgtcccttctcccaaagggattttaatcattcttggcctctctactcactcttaatcaaagtgtggaggaggtggcccccacagcagggtttggaacctacagaccctggcccctgagacatgcagctgtcagayaagccakcatgtcaaacacaggttagagagactgagcttccagattgcatagccatttccttgactactgagtaaaggccaaggctaagatttagtaagcctagccctgaagcaagcaaagaatatggcagtgtaatgcaggtcatttagaaaaaaacaatgttgggcacaaagaaaatttagatctgacaagtataattttctaaagacattatttcaggattaacatcaatttcttagcagaggaaatgaatactattgtcagaaccatatctatatagtcaatcatttcctcttttaacgtctgtcttgttctctttttacccaccacatatgtataactatgtgaaaaattatatttgtgcataataaaatgtgataactttttacaacagaatgtgattttatttttatgtttttcttcataaggtcccaaagaacttcaagtacttctaatataagctgaactgattagatttcattaatggaattmcatatttatgaaggaaatacaaawtctcagtccaggatttaagtatttctcttaaagaattctacctgggattatgattracttaaaataaagaacccagatgtgccagctctgggcagattttgtgccagctttaggcagcttcagattttgaagctttgtggaggcagaagtckctccatattcagatacatgacattggctgtaagagcaactgagggcactaaatagtgatcacgtttcaaatacagaatttataattaattttaaattaattttcagatttagtactaaagaacttgaccagatcaatggatccaaaggatgtgcttattttcaaaaaggaaatatttatatttctcgctgtagtgctgaaattttttggatttgcgagaagacagctgccccagtgaagactgaggatttggattagtatgcttcttccaaattctccaagaagtaagagacttgtgagtaagctcatatgaggaaagaggaaactacggtaccagagccaaaccagcttttaaaatgactgtgtatttacattatcagacaaatgaacttgtttaacagaacattctccagttccttgtctgacgtcttctgatttgatgttattattcggtcttaaaattatacctggggacaaaggggaatagccatactatggccctatgattgtctcagaatcatttcactgaatttctttgctttctcaaataaagactcctttctttcattattattatactgtcacgtgtgcactagggtgatatttaaatatttaaaaactagggtgatatttaaatatttaaaaacacaggccacagcactagaacaaggtccaagagatgcctgttgtgatagttgctgggtcatgtggaggtctgggggatcccaggctaagggtcctggtagctggggctgcagcactgtatcaactgatttggaaatattttattttagcaaatgtttgtaccactgtgaaccagctaagtgtcaccctgcacttgcaaaatagcttttcttctccaacaaccctatgaaaataagcattcttattaatctttaaaatttagataatttataatctaggcataataatttaatatttacttttttttgagacactgtctcactctgttgcctaggctgtagtattgtgatgtgattggctcactgcagcctcaatctcctgggctcaatcgatccctcccacctcagcctcccgaatacctgggaccacaggcatgcaacaccatgctcagctaatttttgtatttttttgtagagacgaggtttcaccatgttgcccaggctggtctcaaacacctaggctcaagctatctgccagcctcagcctcccaaaatcctgggattacaggtgtgagccactgcccctggccaatatttatgtgtttgtcatttatttaaattagtaatattgatgttattgattttgtaatctgggtattattataaaaatatattctcttacaattgatattttgtttccctcagaaaagtcctaataaactgtttgaagacatcaaaatagaagaaccattatctttaattatttagacctttcctgaatcacagtttgtcagtgttcctgcacactagatgctaaatattgtaaatctagggttcaagatttttcctggaacaaaattgctgatttcagaatactggtaaaggatgtagttttccatttatcttcacatagttccatagctatatataggaagaaaataatgataaattagcctttgatactgattttgctagatcagaaatctagaatttactggaaaattgatataatctaaattcaaagttagatgcatttcaatactttgacagtcctttgaaactaccacttcatacataccatctagtagcttcttattctctaaatatttaaaattatcaactaatcaatgttttatataggcaccaacagaaactctagaacaaaggaaaaatgtcaagtgtgaaaatttagtaaaaattacaaacaatatatttaagcacaactttttaaatacagacaattatcatagttcaagtaaacagtgtttcttagttcttatacgggattcaaacataagttatatacacatggattaaagaagaaacttgattcttccatttctctttagcagtttgcccctggcattctcacaaagataaaattatttcttaaaggtcaaaatctgtgcctctgactctcacacatttgggtttcgttttattcccatgagaaaaataagttctttcattcctctatttctaattaaaaaaatctacttttaataattaaaataccttagttggttattttgttcctattaagaagttacaggtttttttttctggtatcttgtatattttaattctcatttcatgtaaactcttttatactcattaaaagaaaatttctgtttctgaccttacagtgctctggatcttgatcagctcctattactaagagctccctccctgctgccctgctatcatcatattatccctgacgacctctacagtagatgcataaatccagagttctcaagattcactagccctttgtgtcagaatacttcatcctttgattctgataacttagcttatgagacaggacttgattccagaaattttcatctctttctttttctttctttcttcctctcctactgcccctacaccctctccagtcaaaatccctgagatattttatttatatatacaggtatatacaaatggtatatttttaggggaaagaccattgatatggtttggatctgtgtccttaccaaatcacatgtcaagatgtaatccccaatgctggttgtggggcstggtgggaggtgattgggttatgggagcagatttctcatgaatgacttagcaccatcttcttggtgctgttctcatgatagcgagttctcgcaagatccggttgtttaaaagtgtgtagcatccccaccaaccccaccccacaccctctctcctgctcctgctccagccgtgtgaagtacccacccctccttcatcttccaccatgactgtaagtttcctgaggcctccccagaagcccagcagtttccagcatcattcttcctgtaccgcctgaagaactgtgagccaattaaacttttttctttataaattacccagtcttgagtatttctttatagcaatgtgagaatttaacatgggttccaaacatggcttcacatcagatttacatggatagtcccttaaaggcacagatatttgggccacgcgtcagatctataaaatcagaatgattggaagacagaaatggagaatctgtaagtttctcaaactacacaggtgatttttattaacacagcctgagtggcaatgtttggataaataacctcaatactaactccctgagcaaataggcccagaggcgaaggtgctggaaccatcttcaaactggatggctctttctgcaacgttagcaaatttagtttggtttgtgcagaccacgttaggtcaggacagatcagaattgggacagatatagtgacagttctcaactatttcactgttgtaatcttagccaacaagcccttactgagggtattaattggcatggttgggatggacaagtgatatgaagtttgatctatttagctctctgaaaatagttctcaattttgctgcacactgaaattatactggggagctttgaggaaatactgatgcctaagattgtcccacctcttaagatgctgatttcattgatgagaagtgtagctgggctattaaaaaaatttaaatttcctacatgattccaatctgaagctaaggttgaaaatccttgtactgaggttggcccaatggcccctattttcagtaaaatagccaaccctccattatatattaagaaaacgggtgaactagctccattggtgatgattacacatggttgagacagggacaataatgatgattacctgaaactaggattgatggtatattcgaggctgcatacaagcatatataatcatacttgtatacatttgtatgcacctggagaaggatttagacacattagtaacattgttttcctcagggtaggtatgatggagtcaaattgggaagaaggggaaatgatacacttttggaatgagaatccactgtgaagctgaggactgaaatcaagagtcagattataaataggtggccaaaattaacaatgtggtcctcaagcaaatataattttttattccacaggtatattagttttactgaacaagtaactacaagtaatacacctgtctgtctgacttcctaaacttccttccttctttctttccttccttccttccttcctttccctgcctccctccctcccttcctcctttcttccttcattctttccttcctttctctctctctttctctttctctctctctttttgagggtatataataatataaatataataaaacacatctcctctcagttctttcaaaatatgtcacagctttcaagcaggcggaagtatcccaaccccttattaggaagcagtacagcttggtgcttaagacaataaattttttaaatcagacagccatgggttatgtttttattctcaatgtaagtgctgtatattttagacaatgtctcagtctgttttgcgctgctataacagaatgccttagactgagtattctatctatttcttggctcacagttctagaagttgggaagtgtaagttaaaggcaccagcaggtttggtgcttgatgaggccattctcttctttaagaaggcaactgtaaccttgggaacggaggaaggtgggatcctcatgtggcagagggcagaatggccaagaggcaaaaggggatggaactcatccttttataacagcattaattccacccatgagggctgtgccccttaatgatctctttctttgtttttatatttagagacagagtcttgctctgtcacccaggctggactgcagtggtgcgatcacggttcactgcaaccttgaactcctgggctcaattaatcctcctgcctcagtcttttgaggaactggtaggtaccacaggtgggcaccaccatgttcaactatttttcaaaaataaattttttgtagaaatgggatcttgctatgttgaccaggctgctcttgaactcctggcttcaagtgatcctcctgccttggccttccaaagtgttgagattacaggtgtgagccgcctcacccagccaatcacttctttaaagtttcacactttaataactattataatggtaattaaattacaacgtgaattttggagggtacaagcattcacaccatagcagacagggctcttaaattatgtaaacccttttcataatagggtgacaaaactcgtgcccatcctctgagatttttgtgaagaaaacaaaaagagagataacccacatggtacagtgaagacccagttaagtttagctgttcttacatttaccatcctctgcttccccttagagagcagatttgcatgatccttccagtcccaagaacattcctgcattgggtgcttagcttggttttcaccaccaatgatattttccttgggaaaattatctcagtgtaactgaaaggcaacagtttttaaatacaaacacaataatgaaagttggttcagcggctgagcatcagctcatcagggaagagaaatcatggaggggagcaacagggtgaatagtagatggcaggtagccctaggtaattacctgagacaggcactatattgcccatggactatttttgtatcttctgtgccctttgtgatgtggaggccagaaacgaggtggacaaggatagggtccagaccctttcacctttttgattccttagcatagcactggaaattgtagggaaacactaattgttactgttatagttaccaaggccattattttcagttctccagctttctttgtttctagacagaatttgtttctgagaaaaattactctctatgggtgaattgatgttggcttcatcaatcttgtccagcccatatgatctgtgagttgtattttgagtagagtaatttctagggggctccattctctcttgttcttcaagtactgaccttcaatttccagtgcaagaagacagtatttgattgtttctgtctttattttgaagctcttttgtgtctaaataggacaagttgggaaggaatacctctcaaaacttacagagccaaaaaatgcatcaaggagggtgggaaatgagtcccaggaaggtgaattggactgaaaaccagatttctggtctctctttatctgggtctgccaaatgcacaactgatatttcgacaggtgcgactggcagctgcaaattattcacttatttaacaatagattttgtgtgtgtgtcaaccaagtgctagtcgatatgcaaa

SEQ ID NO: 6761 - DNA, 30231 bp, Homo sapiens
gctaataacactgataaatgtagatgcaaaaatcctgaacaaaatactagcaaactgaattcaacaacagattaaaaagatcattcaccatggtcaagtgggattcatcccagaaatgcaaagatggttcaacatacataaatcaagaaatattaagcatttattgatttatgttatacattatttaataaacatttattgatttacatgatacattaatgtgatacattgcatttacagaaccaagaacagaagccatataatttcaatagatgctgagaaagcattcaataaaatttaacatccctttatgataaaaatgctcgacaaactgggggtatcccatacctcaaagtaatacaagccatatattagacaaacccaaagccaacatcatacttaatggggaaaaattgaaaatcctttctctaacatctggagccagacaaagatccccactttcaccacttttattcaatataattctggaagtcctggctagagcaattagctgagagaaaaaataaagggcatctgaactagaaaggaagaagtcaagttagacttgttggcagacaatgtgatcttatatttagaaaatcctaaaaactctaccaaaaaactctttgaactgacaaattcagtaaagttccaggatacaaaatcaacatacaaaaatcagtagcatttatatacatcaacagcaaacaatctgaaaaagaaatcaaaaagcatttttttatttacaatttgtccccatttacaatagctacaaagaatataaaatacataggaaccaatttaaccaaagaagtaaaagatcgatacaaggaaaactataaaacactgatgaaaaaaattgaagaggacaccaaaatatggaaagatagtccatgctcatggactggaagaactggtattgttaaaaagacaatactactggccgggtgtggttgctcacgcctgtaatcctagtactttgggaggccgaggcaggtggattgcctgagctcaggagttcaagaccagcctaggcaacacggtgaaactctgtctctactaaaatacaaaaaattagccaggtgtggcagcgggcgcctgtagcccctgctactcaggaggctgaggcaggagaatcacttgaacccaggaggcagaagttgcagtgagctgagatcacaccactgcactccagcttgggtgacaaagagagactctgtctcaaaaaaaaaaaaaaaaaaagacaatacaactcaaagcaatttgtacattcaatgcaattcctaacaaaataccaataacattcttcacagaaaacattcttcacagaaataggaaaaaaatcctaaaatttatgtggaaccacaaaagaccccaaatagccaatgcaatcctgagcaaaaagaacaaagctgaagatagcataatacctgatttcaaaatatagtatgaagctatagtaaccaaatcagtacgggactggcataaaaacagacaaacagtcgaatggaacagaatagagaacccagatacaaatccatgcacttacagccaactcattttcaacaaaggaaccaataacatacgttggagaaagggacagtcttttcaataaatgatgctgggaaactgaataaccatatgcagaagaatgaaacgagacccctatctctcaccataaacaaaaatcaaataaaatggattaaagacttaaatctaaatcctgaaactatgaatctactagaagaaaacattgaggaaacactctagggcattggtctgggcaaaaaattttttgtgtaagacctcaaaagcataggcaacaaaggcaaaaatagacaaatggaattacatcaaactaaaaagcttccgcacagcaaaggaaacaaccaacaaagtgaacagacaaccccacagaataggagaaaataccacaacctatccacctgacaagggattaataaccagaatatacaaggagctccaacaactttatagtaaaaacacaaataatccagtttaaaaatggacaaaagagatccgaataaacatttctcaaaagaagacataaaattgctaacaggtatataaaagaatgttaaacatcactaatcatgagaaaaatgcaaatcaaaagcacaatgagctatcttctcaccacagttaaaatgacttttatctgaaaaacagggaataacagatgctggcgaggatttggagaaaggggaatcattgtacactgttgatgggaatgtaaattagtacaaccactatggagaacagtatggaggctcctcagaaaactaaaaatagaattaccatatgatccagcaattccactactgggtatatatcccaaagaaaaggaatcaatatactaaagagctatctgcattcccatgtttactgcaacaatattcacaatatccaaaatatggaatcaacctaagtggccatcaatggatgaatggataaagaaatgtggtgtatgtacataacggaatattattcagtcataaacaagaatgaaatcctgtcatttgcagcaatatgggtggaactagaggccatgatgttaagtaaataagccaagcacaaaaagacaaatattgcatattctcactcatacgtgggagctaaacaaaaaaacaagtggatttcatgaagatagagagtagattggtggtaaccagagttcagaaagagtagaggtaggggtctgaatagaggctggttaaggggtatgtattagtcttttttcacactgctataaaaaaatgcctgagactgggtaatttataaagaaaagaggtttaattgactcacacttccacatggctggggaggcctcaggaaacttacaatcatgttggaagaagaagcagtcaccttcttcacaaggtggcaggagagagaagaacaaaggaggaacttccaaacatatctcacaaaccatcagatcttgtgagagctcactcactgtcatgagaacaccatgggggaaactgccccttgtgatccaatcacctccctccctccacttgtgggaattacaggtccctccctcaacacgtgggaattacaattcaagatgagatttgggtggggacacagagccaaaacataccaaggtgtaatacacagttagacagaaaaaataagacctggtgttcaataaaccagtaggttagctatggttaacattaacctactgtacatttcaaaatagccagaagagaatcatttgaatatttccggcatacagaaaagacaaatacttggcgatagatatcccaatttccctgctttgatctttacacataatattaatcaaattatcacatgtacccccaaaatatgtgcatctattatataccaatttttaaaattaagttaaaaattaaattttgggttttgcatgtgaaaaaagagagaatatgggagaaaagaaattggaaacatcccttagggacaatttttttaggagttttgctgtaaagcaaagcagagaaatgaggtagtggctggagagaaatagggtgcaaggtaaggggttttatttattttatggacaatattacagtgtattcattagtatgctgataattcagtacagaatgaaaatcttgaaatacagaagagagagaaggacctcattcatgagaaagcatttaacatccagggtgcaaaagaattttctcatataggaactagggccagtgactcagaatgaaaagtagagcatacagtttctaatgcagagaggagggcagatgtgcctgtgaggcggtatagaagttctctttactcagtaacagaaagcaaagtcatcagcactcagtgagatgggaggagttgttggcggcttgaaaagagagtagaagaccaggcatggtggctcagcctgtaatcccagcactttgggaggctgaggtgggaggatcgcttgatcccaggaggtggagaccagcccgaacaacatggtgaaacttcatctcttaaaaaaaaaaatacaaaaattagcctggtgtggtggcgcaagcctatagtcccagctacttaggaggctgaggtgggagggttgcttgtgcccaggaagcagagattgcagtcagccaagatcgcactactgaactccagcctggctcaaaaaaataaataaataaataatgaaaagagagtagaacctgtgaaatagtcatttaggagaatggatggactaagaaatgtagaaggatagccaggcagcgtgaagggcccacttgaacttaatggttataaactgaaaatgaaaccaatcatcccagccatgtggttttctcaaacaacctctgccgtacaggcgcaggccaggaactggattcaagcagatttgggtttccatcaagagaataaaaccaagaaagactgggacaagagagttaagggtaacggcacatacacaggactggccataaccatgctccatggcctcttaaattgagtgaggagagaagtgagcacatgaggaagtgaaggtcagggccagggtggtaaatctaaatagggaaaagctctgtggttttccaatgaagaatgaggagaggagtaaggtccaagggagacattttgtgttccccaggcaaaaggtaagacagcatctctgaggaggagaccgaaggggacgtgggcctctccaagcatcgcaggctgaaaataatagtcccccaaatatgtccatgtcctaacccccagaagctgtggatgttaatttctatggcaagagggattttttttgaaatgtgattaaattaaggatcttgacgtcaagagattatcccagattagccagctgggcctgatgtaatcacaacagtcgttattagaaggacccacgaggagccagtgcctgagcatgtgatgtgatgatgaaggcagaggttgcagtcatgcactttgaagataaaggagcgagccataagccaaggaatgcaaacagtcactgggaactggaaaaggcaaagaaatattctcatctagaacctccaggaggaactagccccaccaacactgactttataaagcccagtaaaacttgatttcagacttggcacctccagaagtttaagagaatacatgtttgttatactactaagtttgtgttaatttgttgtgacagcaattggaaactaatacaccaaggaagggggaggatgtagaagagaggtccaggcaacatctctttcctctccaaaataaatctgaaagaaaggaattgggaaaagaccaaacgggtagctctgtgtcactcggtgagaagtgaaataaacgtaaaatcctggtatcaacaacccttgtgtgcgtttaggagagttctgactgctgggagccacttgtctaattccctcacctcctgtgtttgttccaagatcccctatttaaaattgcaaagtacacccccagtcctacacacccacaaacgcacctcgccacaccccgcccagctctatgctttcagtaccacctcatgacacacacgacgccatatatttactatatttatggattgcttgtttccccaactagaatagggcagtgacttttgtgcaagcatcttgaacagctcctggtacacagttggctctcaattaatatctgttaaatggatgaacttcagaggtgagatggaagatgccgaatggcaaatattcacttcagaatgttttgaaaggtaaagatgaaattatgggtatttacatccttttcccccaatagtattttaacaaatgaaaatcaccttaacaggtattcctaaaataattcttatttgtttgtaataaaaaacgaggaggaggacttgaatacacgcgtcgctgactcaaagatggtcccctccgcccaagaatcccgctccgcacagcgcagagttcaggggcccgcgccggaagtgggcgtggttcgcccgcggcttgctgggacttgtatttcggggccctaggcgcgcgagcggtcagcatccggaatctggcccctgcaggcgtggggttccacgtgggaggtgagactggccgggcttccccagccgctggcagaggcgttcaggggtcaggaaatgggtgtgccgcgggtaaggcgctgggccgccgagctgcggaagccgggagggcggcgatggtagggcaygcgaccagcggaggcgcggcccgcggcggcacgtgtgtcccggcgccgcatttccgagctgctgcgcccccggggccgggctgcggccacaccgaagcctgtggggccctgcagctgagcggccgcgcctccgatggcccctcctccctcctggccgagctctggcctgggccggctgggggcttcgtggttggccacgccggccttttcctcgcctgtgacgggcgttattgcaggggggttttcggtggacgttaggcgacggacgggggctcctgtaagagactgaggtttctgtccgcagcactgccttcgctgaaaagagcttgcatctgagcycccgcaccgcaggaacgagccaggctcctgagaatgaggtcggggaaggcgtcttgggcaaccgaaatccatcccgagaagcttctcctcttaactagaactttaggacagagatcgggaaagtcagaggaaatgggcacggcttcgagctgccggcggctgcggaatttacctagcctcttggttttggggggaaaacttggcttgtttaatcgaaagccctgtggagagagatgaaggtggtgacagaaaatgcttcacctctcacctgatggagggagtgtgggtggaagtgactgaagaagcgtcagaggcaggagcggagtaactttttccccgcagtcttgctggacttgattttcatggctttttctctttccctaactctgcctttccaggaatccatcccctctgggagtaagaaatgaccagggtccgggtgagttggcgttccatttctcctaaaatgccatctccctgaaatgtccctgtgccatgtgttgttttctttattgtcaggcccccagtacggtattttatagctatggatgtagggacattaagatactaaggacatgtagctagcagatgatgtcaccagggtctgcacagagagttttcactggcccatcctgcctccaagaatttattccactcctcagagcagtgggctgtgccctcctggggagcctctcaaagcctgccttttcctgccagacatttcactcacattgaaagtcattccaagctattccatactcatcccagtgctaagtggtctcagcaaaacagatagaatgataaaccacggtgcttttcttcaaggagcttaccatcttgatgaacatattatattacctgtacacaaaaaaatgcatattaatagtgataatttattaactatgagtcaaaaacgaggaaattcgttaaatggcagcacagtggttacaaaatcactctagaaatgcttttcaactaggctatgcatcagaactctctgtggtgttttttaagaactaagcttccttctctcttccagacctagtgaaaggagagtttcactccttttttattctgttgatctttgtacatccaaaggtttattgtgaaatatctctctatacactataagtgtctctagggtaggtaaaatgagttattcatcctttatactcaggttgatttgttctctttcactagcatgtctacatatttaactgttccagtaaattttaaattaccaagtcgtacttttttaaagagagttttcagttgtccccataaaaccatctgtaggaggttacctcaaaattaacccttagactcccagggtatttgagatggtcagcccccacttagaatcccatggtgtttgagatggtcggccccctctttgccctgtcctggcgttttatggtggagagctctaactcggctaactctgagagagccgaaggaaagtgccttgtcctttgtttcagagagcagaaggccagaaataaaccccgtgttttcttccttcaggctgttctttctccattaactaaacaggtcatcacatcagaagttgtttgaataaaatatcagactgcgttttaagggaaaaaaaatgttttttaacactaccagcaaaggccatctttttgcttggcaaatacagccctcacacacatgagctcttagaaaaaatctgtttagaggacagtaagctgacttgaggtactgagagcatggcttctctgtgccctgaaaagtrattgaggacttcaagggagattaaccttagtagaatcaatacattttccttccttcgcttctgcctgctccctaatgattaagtattcactgccgctgcaactggggattgccagtttagtaaattttgagattctggtgtgtgttacacaacaacttttttaatttaaaggaaggacttcattccaagcattgtgtgttttctatgtaccacacattgtccttaggtctgctgaaaggcgggagtcttagttaaccctgcttttcctctgtgacattgggtaagtcacttcgcccttatgaactgtggtttttttctctgtaaactgagggtcttgggcttgactatctttatgttttcttttagttgtattattattcatttaaattgaatgtgaatttatatttatctttcagattccaagtcaattgtggtagttgctggggatttaaagatgagttgaggccagacatggtggctcacacctgtaatcccagtactttgggagactgagtggggaggatcacctgaggtcaggagttgagaccagcctggccaacatagtgaaacctcatctctactaaaaatacaaaaattagctggtcatgttgatgcctgttgtaatcccagctactcgggaggctgaggcaggagaatctcttgaacccgggaggtggaggttgtagtgagctgagatcatgccactgcactccagcctgggcaacagagtgagactctgtytcaaacaacaaagatgagttgagtgtagcccctatccttcagaatcttccagccaacttgggagagacttaatagctatagtagagggatgtgaaagatgctatgagatctcagaggaggagaattctaactcatcctcatgcttcagaaagaggctattgtcctgagactgaaagctccaaaatggatgggagaactcaataagttagggcttactatagaaaggactgtgctagactcaagtgtaatgtgttgaatgactccaggtaatctagtgtgcctcttcctgcttttccacttcaaagtaaattgttagatacagcagagatgggctctagaaagaagtggaaggccacatgatggcatgtatgtagttctgaggaggtcgacatttgtctgatagaaacaggaaacaattgaacttgtgaccttcctctttggttggcctttagaatatcaagtctgctctcccaactgtaagcaggagcacagccttggagtgactccttagtgccactgatacctgggaagactgttgattattcagtgtttcagtcccacctttgtcttgctttaacaggagcactaatttcctttccttttctcctttcccttgtcacaatgattcttttcatttggtctactcctgtcattttttttacctaccacaaagttagtagtccaccaacatatcctttcccttctcagaatggagtcccgcctgccattttatcttgaggaccttaaaaaattaataactctggttgtctaacctagggactggaagatgacaaaaattgtactacaaagaattggtaaggagttattgtagcctaggtaagaaaaaaaataagggtcttactaagactggcagtggaaatggaaaagaggtaacacattggagggaaatttaggaggcagaattgacaggatctgaaatggtttgaatattgttgaggtagagaaggaggattagacaatccagacaactgaatggaagacggataaaaaaataagggagagaaaagataattggtgggcttgcatctctgaagatagaagaagggatttgatctagaatgcacaggaagagattagccttaaacagaaagaaatttttttttctctgtggtctgaagagaaggtctggttgggaagagcagccagtccacttgcttttaatatgccatgggtcatgccttgctaaaggatgtggtgatggagcttgaaggcagcaacctttgcttctgtttgtttgtcccacctttactccggggcttgagcctccttttccagccctcttcctcagaatggagaccagtgaccttgaacagaaagcttgggagacagcacccatccttaccttcatctttaccctcatccttccccactggtgacaagttgggtaagtcatgtcactcctgcagggcaggcccaaggaaggagggagtggtgcctctttagcctcaggccaaagctggcttagctgatcaaatttatgagacagcctttatgactttttatatattctatcactttacttttgaaattgtgccttagagagtggtgccagcccatgcactgtgcagatataagtactgaaattgagagtttcaaaaacaaaaaaaaactggttcttcaccacaggtagtttaagaagcattgcttcatcagacagagccctgaagggaaccagatttgctgacattgactgagtaaatatttggactccctttatgtgccaggccctgcttgaggtcttggggatgcagtcatgaacaaatgaggcagcctctctattcttggggaatttaaatctcagcagggaaagacagtaaataagaaagcaagtgaataagaaaataaggtaaggcataagttataagaagaaattaattaaattaaaccaggaaaatgatatatacaggatgctccagtggattagatggtcagtgacatgctttctgaagaggcaacagttggactgagagctgaatcatgaggaatggagagggcagctagtgcagaagctacaatgagtttgatgcagttcaagggcctgctgggtcactggtgctgaatatgatcataagagaggcctaggttggggaggtgacaggagagcctcatgggccaggatgaagagtctggattttactggatggccactgaaaagcctttggagggtttcatgcttggccttgtttttgttttaaaagatcaccttggctgtcatgtggaaaactcaygtttgggggagcaggagtagagtcagaccaaccaggaggttgatgtgggtgagagcaagtgctgcctaggcctagagaggtgacagtgcagggcaggggagctgggtggatgccgatatgctttagcggtaaaggaggtgggtgataggtgagatgtgaggatgagaatgaaatgacatcggggattttggtttgagcaattgagtggttcrtgtggctgtttactaaaatggggatgactggggaagagcagatgctgatggatattgctggagcaggagttctgttggggcctgttaagtgttttgttttgttttttgtttgtttgttcaactcactgcaacctccgcctcccgggttcaagagatccttccacctcagcctcctgagtagctgggactacaggcacacatcaccacgcctggctaatttttgtattttcagtagagacgaggtttcaccatgttggccaggctggtctcgaactcctgacctcaagtgatccgcccacctcggcctccccaaatgctgggattacagccgtgagccatcgtgcccagctagggcctgttaagttttaagcactttagacgtcccagtgtagatgttaaaaggtagaaaggtggagtctggaggtgaggtaagaggttagggctggaaataaatatttggcagtgaatggtattttaagtcaagggatccctcaggagagtgttttatggctgtgtgtatatgtgctattttattttcccagtaatgttcaattacttagtttagaagaggaagaacagaaagcataggaagtgatttttaacttgtaggatattagagagattcatattttaagagtagaggggtccaggtagtggactagtcccgattatggttattacagtttgatgaaatgtggctgagatcattggcactgtggagattaagaaatgtgaggtcagagtgttgggtaarttgttcctgcgagtgttaaggttgtcaggataatggtgggaatggggtgaagatgacaactcagcaatgacacaagaagagagtgacacagaaagattcagtagctgagaacttgagcgtagatatgttgtgggcaggagggaaatgatttggatggaagtagccaagtaagtgagaaaggaaagactttccaacaaaacttggcttagctcactcagatccctgagctgcaaacttcttctatacctttcttaccttttccagtgctgctgacttcaccccacttgcagggcatttgtgcagatggttgtttgttgaggaggaatgtgcttaatgttttaggaaccagttacattcaaggatgcctctgtggccttcaccgaggaggagtgaggtcacctggactctgctcccaggaagctgtgcggagctgtgatgctgggcaactacagaaacttggtcttggtgggtaaggacatgtgaacttggacacctgcccattggcttctttgtttcctacttcctttttgacacaaaaggatgttttctgactattctaagcagctaaagaacttggtaaaaattggagaatggtagttttactgggttgtctcaaaaaccataccttttccatcctttataagccagaggtgggactgattttgctttctgcacaatcacccaatccctgtgagtttctgaaatgtgatctctcagatggagcaagataaagatcattatataatagcaagtgaacctcaaagagcaccaggcatcatggcaagttataagccaggctaatccacagcagaggaatccctttttcaacgttccaggagttatctggtatcttgcagtctgtgtcgaaagcagggacttccaggatgtttcctatgtgctactgttttacctgatctattcacttactgcccttctacctctgcaggaggttgtggtctttcccagtaatggtcacttgcttctctgtactcctgcctttccccacatttccccaacattggtcatgtgccatctttgcttggactttatttttcattgaatgtcctccccctgcctggcaatatccagtttccattatttcttttcttacacattcaggaattcatccctctcccctcccaaaaataatcgaaattcatggtgagacactctcataccctacaaatagataaaacacttttttgttttctttttttgagacggagtctttttgttttgtttgtttgtttgttttgagacggagtctccctctttcatccaggctggagtctggagtgcagtggcacgatctcggctcactgcaacctccacctcccaggttcaagtgattctcctgcctcggcctctggagtggctgggattacaggcatgagccaccacacccggccagataaaacactttttgactacctgaatcaaggagccttaaacattttcaaatgcagtaattcattttttagatatctagtctaaggcaataattagtaattttaactgaaaattgtgaacaaagatattcattatagaattatttaaaatagtgaaaaaattatttacccactagatgtatcacaggggattggtcaggcaaattatcatggatcacagaaaagtatgtagccattaaaaaatatgttcatgaagaacttaaattagatggggaaatgaatgtatacctactaggttgaaccatatgaacttgccattttatagccaaaagcagccattctacaaaaaacactgaaaagtggctgggcacagtggctcatgcctataatcccagcactttgggaggctaaggcgggcagatggcttgagctcatgagtttgagaccagcctgggcaacacagcgaaaccctgtctctacaaaatatacaaaaattagcaggacatggcggcagttacatgtaatcccagctactcaggaggctgaggtgggaggaccccttgagccaggaaggcagagttgcagtgagccgagatgacactactgcactcctgccctggtgaccgtgagaccctgtcaaaaaaaaaaaacactgaaaaatgtgtcatcatgttagctttcagggtttttgcctccctcagtccacagtgggaccctggttctcttccctcagtaactgtggcctttcagtttctattttcagctaatcctggggagtaaagagaatgctacagggcaaagtggttacctccaggtagtgaaccaggcctttccacgttctttatataaacccagtgcctgtgctctgttcttgtaccaaaattgcccacttggaagtcactactgaacttttgtctctttcagagtttgttccttttttaatttttatttcagcatatttaccattatcagttttattgatggtttctatagtgttgaccttctcttgaaattctttgtcatgcatgaaatcayagtttttctgtttcctccagcttctctcttagtcctttgctctgcagattctctggcttctttttctttttttttttttttttttttttttttcttgagatggagtcttgttctgtcgcccaggctggagtgcagtggcgtgatctgggctcactgcaacctccgcctcctgggttcaagcaattctcctgcctcagactcctgagtagctgggactacaggcgcgtgccaccatgcccggctaatgttttgtatttttagtagagacagggtttcaccatgttagccaggctggtcttgatctcctggcttctgtcttttttctaacttgaaatctcaaagggctctttggttttaagttacatcatcagtgtttctcggcctttttctttatcattactctctccctgccaaaaggagacaaattaaatttctcctgtagaaaaattaagtatgaaggaataaggttttgtcaggtaggattgtttttatgagtcccaaaccagcataatatgtaagatttgtttggccaggtgtggtggctcacacctataatcccagcactttgggaggccgaggtgggcggatcacctgaggtcaggagttcgagaccagcctggccaacatggcaaaatcctgtctctactaaaaatacaaaaattagctgggcgtggtggcgggtgcctttaatcccagctgctcaggaggctgaggcaggagaattgcttaaacccggaaggtggaggttgcagtgagccgagatcgtgccactgcactccagcctggttgacagagtgagactctgtcccaaaaaataaaataaaataaaaagatttgttgtgtcccctatgaaccaattctcaccccttggggacattattgcccctgagaatgcatggtatgtccacttataggaggagctgttacacatttaatggtgttcaactctcctttctattttgataagcctaaaattattttcctttttaagttcccttcttatagtcccacttttgtcagtattaaagttgttccagtctcctagtttagaaataggccatgactatattcggtttctcttgggccaggcgtggtggctcatgcctgtaatcccagcactttgggaggcagaagcaggaggatcacttgagcccaggagttggagaccagcctgggcaacatggcaaaaccccttctacaaaaaatataaaaaattagccgggcctggtggcatacacctgtagtcccagctacttgggaggctgaggtgggaggatcacctaagccagagaggttgaggcttcagagagcaaaattctccagcctgggcaacagagtgagaccctgtctcaaaataaaaaaattttttaaaaaaaatttctctcttctcgtcctcagtatctaaaatctcccaccaattcttttttaactttaacttcttttaagtttattaacactcctagatcccacagatgttgccctaaagtcattctgtttaacgcttaaaatagggtaaaaattagtcagattgttgccatcgtttttcaagctcaagttagatgttgcaggtacactwgtctcctttaaacatcatttatgatgtcattctttggagtgttactatacggtcagtaagtcctgtgaagaatggaacaccgctctgagagaacaaagacgtgatgkaatgcgggttgtgtatgtgtcttacggagagcctctgaagtgacattaaactgggagctaagggatcaatagtttaaacaggtggctagggaggggaagaacattccaggcaaagagaaccatgcaagaagagacccaaagacctggaaggaggagtgtggtagaccacagggtgcatctaagaaggactgagaagaggtggtgaacatggcctggctcagttatggcgttgaaggccctggtaaaaagtagatttatgacaaaaaattagccaggcatggtggtacatgcctgtaatcccagcttcttgggaggctgaggtgggagaatcgcttgagcccaggaggtggaggttgcagtgagctgagatagtgccagtgcactccagcctgggagacactgtgtgaccccatctcaaaaaaaaaagtagatttatcttcagtgggcagccattgtatcaaggaatggtgtgctctgattgacccagtatcactgtgactgctctgtagagagtgatttacaagtagacaaaaatgaaataggagatgggcttccaatttcaagctctgctctaggttttcattgttattaacataaaatggaacatacttgttcaacatttttcttttatgcaagtaagacataaaagtctcaaaaactcaaacaacacagtataatatgaaatcaaatcactttctatggactctgtacttatgtatgtacattacaagtatatgtattaaaattttatgagattacactgtgtatttttaatgtgctgttttatgcagtatgtgttagagcttttttctgccatgttaaatccctataaaaggaccccttttctcatgtcagtattttctcctaatgttatacactcattcttcatatttttttttcttcttcttcttttagacgaaggctcactctgtcgcccaggctggagtgcagtggcacaatctcggctcactgtaagctccacctcccgggttcaagtgatttctcctgactcagcctcctgagtagctgggactacaggtgcccactaccacaccctgctattttttgtatattcagaggagactgggtttcaccgtgttggtcaggctgatctcgaactcctgacctcaagtaatccacccacctcggcctcccaaagtgctgggattacaggcatgagccaccgtgcccagcctcattcttcatattattttaaacatttttttaaaagctaacatcacactttcattaaaatgcacctttcataaaattcctcccccattcattttcatatacctataatttctataaccactagccatttccaagtattgtatgatatggctgttgaagcaatatcctttaaaatccatttaatcatttcagcccatttcatgatttaacgctacaaactgccctgtttttcttttgtcatttttctttttcatttttgccattacttttgaaatttataaataaagtgatacactcacctgggtaaaacaagttgtgtggacagctcatagtaaaaacattcctgtttcctgactctgctgctccatcagccacagtgtggcttccaaaggcactcagttttcacctttctagctgttccatattgggtttgtcttcctactccagacaatatgtttacatattgttatttttctctctcatgtaaacaataaatgcattcacatggttaaaaaataaatataaaacgtgcacagtgaaaagtttctttcatgtctgtagctcttgtctatccaggttctggtcattggcctttaaaaagtgagctgtctcatgtaaatgtcatttcacaaattatgcctgaaaatctgaagagtaaaactctaagttggaatgctgagtgcatatatttatgacattgattgataattgtcaaaatgtctgtccttcgtatcagtttacattcacaagtaatgtgtgtcttcagacttcgggtttgtgctagtgtaacaggtggaaaatggtacctcagtatcctttaaatttagtgtattgtgatatactgttatttctcagtttatcaatattttgtaatttctattgacttccctatattatagatgaggatgtagcttttttatattacctccccaaatgcctagcttcccaagaatttatgttagagtcatgtcagtgatgaatgcttacattgctttgactttgtaattagttgttcactgtagagtcaagtagtacagtatgattatagttctttttaatttttttatttttcctctgaagctaatacttgctttttaaaaatatattttatttggggggttttgactccgtgctgttattgtagagttttgtttatttttttcttttatttttcaactatggttttggggtttgggggtttttgttttgtattttgtagagagagttttgccgtgttgcacacactggtctcgaactcctgagctcaagcaatcacctcacctcaacctcccaaaatgctgggattacagacatgaaccaccatgcctggcctaattatgtattgtattgacttcttggcttactgctatttcttgcagcatgtatcctttttcttaaattttaaaaaattttgctatagtatattcctgaatgattgttttagtaattgaatcttttcgtgtctgaaagagtgtctattttttcctcccactgaaatggttaattggctgggtaaaaattataatttcacaatgacttttaacccaaaatttgaagatattgaagatttgcaatattgccaattagttgttcagtgtcaatataattctcatttatttgcacataacctggcttttctgtttggaagcttttagcattttctgtttctttgtttgtttgtttgtttgtttgtttgtttgttttttccttgaagtcctgaggtttaaaagagtatgtttagtttggggtctttttacataccattttttagcatttattgggccctgaatcttgaattctaggaaacatttttttgttattatttctttgatcattttctctccctgtgttccatcttcactgtcctcatgcagctccttgaagatgggcttttacttttatctttctatttgtctgtcttttcatttgcattcttggagaattcctcaatcttccatcttagccatgtgttcattttactatttaactcatctagattgcaggcgtttgactaaaacagcctgacacatatctaggaaacaagtgacataacctatcatcatcttcagtcattttatttagaattattatttttcatagcaatatgtttatattttattattagattgtgtttaaatgtgatatcctctccagtttttctgggwttttaattatgtaccttttaaattctgttggtctccttatatattttttcaaaattcttgtgttctcagcatgatattrgagtgtgtcctcaacccatgcttgacccactttggcatgcatatgtgttttactttaggggacacttctgctgattgggctagggagggaggtaataagaatccagatggtggatattataggcctttttttttttttttttttttttgacagttggcagagctagctgaggttttattttgggaaaaagaaaaaatttgaattgttttgtagctggatacatgggcaaggggactacccaggcagtaaactggccccacggatgggctaagggctaagggctagggctgagcctcaggtgggcctcctattccctgtactcccctgcacagtggtgtaggccattttttaagtccacctcttttgccactgagttatctggggcatgccctgcttctttatttccagcgctgggctatcttccttgtcagaactcccattaaaaagtttagcttgaagttttatcctgggcacttatgttgtcaattacttcttttttgtaccttaatccattggtcattgtgtacgttcaacattacctcaacctctgcttctctcttcagtccagttaatattattagcagtctttctttggcagatcatttattttattcttgaggctttatatgagggcactgctgctagccatccaatatttctatttctaagaggaagagggtgggctgggagagtgctgctaacagcaaaaactagcacagctgttaggaatgcctaagttgaattaggaaatgtcttactttatcattgtttattattttctgagacatagactccagagaaatggggtcagtgctcccttactttgtaattattgattctgagtttggtaattgaatttctatgatttcttaggatgttttacccacgaagaagccttctgttatacataatttgagctgtacatttttttcccctagttcctccatcactcctaatccatctgctccttatcatttaggagttcctcaatgtttttattctgatgatatcagcctttctgttttcccaagagtattatggatttcttgtcatttcagtgtaatattaggctattcactctaattgtttaagtctcggggagggttttgtttttgtttttgttttttaatataccagtaagtctaaactctgtattcctagcacagttctctcacaggagttccagacctatatatatctcacagcttackgaccagtactgcaagaatgttccaccaacaccacagattatacaaggcagttctgctgccttccctayttcagcctcttcctgttgcatttcctatctgattatatagcaccaccataccgtcactcaggcaggaatcccaaggaacaggcttggtgcctcctttctcttctaggtttagtttatcatcacatgatctagaatgaatttctcctattctctccacaactatcatccttaccgtttttcttctgatttgctatggcagccgtctcgctacctaaagtcttgctttccagtggtgtttattgtcacaaagtcagtcatttcactctgaattaaaattctttaatagttttcaatcccttcagggtttagccccarggtccttattattagacactaagccctttgctctgtcctcttacttcccctccgtggcacattcttcaccactcttactgtttttatctccttcgtaagaagccgcttgtagttttctttaacatgtcatattttctctccacatttcacttccttttttttgtttgttttttgtttttcctgtcattttctcccagaaatcttcctaaacaccagggtctgagttgagtgttcctctgctgtgctttcgtggctggttaggcatacatctcttgtactgtattgtactatacattcatctacaccactcacttagtattatcattatttggtgtatttgtcttcccaggaagctttagcttgttaagcaaaaggatttatattttcttccttgtattccccacacctatgaaagcagaataccaattaaatgcaaatttacttaaaggaaagtaggcygggtgtggtgactcatgcctgtaatcccagcactttgggaggctgacgcggatggatcacttgaggccaggagttggaggccagcctggtcaacatggaaaaaccacacctctactaaaaatacaaaaattagctgggcatgatggcatgtgcctataatcccagctacttgggaggctgaggtgggaaaattgcttgaacctgggaggtggaggctacagtgagaccagatcacaccacggcactccagcctgggcagcagagtgaaactcygtctcaaaaaaaaaaatgaagtgagatgagatgaaatgttattgttagcaaggatataggacttacagccttctataggattagttagggaagactttccttggctatgcttaaaagccaagagaaaatttctgtcttgtacccagatacaaatgtacctgaccttaacccaaaggacatgactataaagacaagctgaactttttcctagttactaagacttcaggccttaggcactctcactctgaaatcttgaagtctaccctttgttcttaccactgaattgtctttgttccctaggagacttgaatgaaaattctgtggagaatcttcarcagaaaacacttcaggatctgttacatgagctttcctcctggctagttttggaaggcatggccagtacaattactggaagtcaggattgtattgtgaatcatcgaggggaagtggatggggagcctgaactagatatttccccttgtcaacagtggggagaagcatcttctcctatttccagaaacagggacagtgtgatgactcttcaaagtggttgtttcraaaacattgaaagtgaaacatatttgcctttgaaagtctcaagccaaatagacacacaagactcttcagtgaagttctgtaagaatgagcctcaggatcatcaggaaagcagacgtctctttgtaatggaagaaagcactgagagaaaagtgataaagggggaaagttgttcagagaaccttcaagttaaactggtgtctgatggacaagaactggcctcgccattgttaaatggtgaggcaacttgccagaatggccagttaaaagaatctttggatcccattgactgtaactgcaaagacattcatggatggaaatcacaggtggtcagttgtagtcagcagagagstcatacagaggagaaaccctgtgaccataataactgtgggaaaatacttaacaccagcccagatggtcatccatatgagaaaatccacactgcagagaaacaatacgaakgtagtcagtgtggtaagaacttcagtcaaagctcagagctactacttcatcagagagaccacacagaagaaaaaccctacaaatgtgagcaatgtgggaagggcttcacaaggagctcgagtctgcttatccatcaggcagtccacacagatgagaagccttataagtgtgasaagtgtgggaagggcttcaccaggagctcaagtctgctcatccatcatgccgtccatacaggcgaaaaaccttataaatgtgacaagtgtgggaagggctttagtcagagctccaaactgcacatccaccagcgagtccacactggagagaagccytatgagtgtgaggagtgtggtatgagcttcagtcagcgctcaaacctgcacatccaccagcgagtacacacaggagagaggccctacaagtgwggtgagtgtgggaagggcttcagtcagagctcgaaccttcacattcaccggtgcatccacacaggagagaagccttaccaatgctatgagtgtgggaagggtttcagccagagctcggatcttcgcatccatctcagagtccacactggagagaagccctatcactgtggcaagtgtgggaagggatttagccagagttccaaactcctcatccaccagagagtacatactggagagaagccctatgagtgcagcaagtgtgggaagggcttcagccagagctccaaccttcacakccaccagcgggttcacaagaaagatcctcgctaactgacattagcccattcaggtcttcacagcgctcatactgtaaaaactgttaaatatttagtatcactcttactttatattctacaaaggagagagatgtaagggttatttagatatgttccctcactgaaaaatcactcattcaaaatatttaagtatcaagcactttgttatgctgtacaatgaatggattgttcttgtttctcagatgggtagagtaaaagtgtctgtactttacaattcaactacwtgttctacccagcattttaacggcaagaactttatatttattctcaagcagggcatgtttccctttgttcacattctctgakaaattgaaactctggtttctcttcaaattttgtgccttgtgtttttcatacttctttccagtcctgattagccccctctaaactatgattgtacactgcgtccattttaggccaagagggcagttggaaatacaatggacatggaaattattgtgtttattgcaaaaagatataatagtttgtagccacacaacaaaaagctggaagagagttactcatgtagtacattcccatataccattttgataggaagttgaacagcccctcccaggcaactattcaggaacataagtagtcctttttggtgagtacagctagtttattgggatacttccagagtgaatgtgaggaagggtccaaagtaacatgcctggcactttgggaggctgaagagggtgcatcacttgagcctaggagttcgtgaccagcctgggcaacatggcaaaatcttgtctctataaaaaagtgcaaaaattagctggtgtgctggcacagacctgcagacccagctactcaggaggggtacctgagagcaggtgataataacaaataggttccagaggcagagctggaaaaatgaatacataaggagcagggggcagcttagaggctgcagaaatcatgttggggcttgataagctaaaaatggctagcacagaaagtattcgagaatgcacttttgttaaacatgtctcatcacattggacaacattaagatgcgaggaaaatttaatttatcaaactacagcaataaggagaataggagaaagactatcagcaaatgaaaatttgaaagatggaaagatagccagtagagcagaagcaggcacagttatgctgcttgcatatggggataaggaaaagaaggaaccaatttggcaccaggctcagaaatgcttagtaccttggaagatgggagtgagatgtgaagagaaagcaatgaaactaatggccatttgtatatggaacatacctcctcattacataaacacacactgctccccaactcctgtacgtggctgaccagaggtttaacgtccagcaagaaatgggaagtttcttctctgcagaagttgaatggccccaagggaaagacctctgtattatgggaattcgggaatcctacagcaaagctactttctagcttaagtacacataaacagagcttcaaaattcatgaaataaaaactggcaaaattgaaagaggcacaatttcaattataattagatagttaaataagtaattgatagcacaagtcacttaggaggtataagccttgaacagcactatcaactaacttgactaattggcatttgtagaacactcattagcatgatatattaatatatttttattttttagggacagtgtgtcactctttcacccaggctgaagtgcagtggtgcaatgagttaattgcaaccttgaattcctgggttcaatcaatcctcctgtctcagcctccagagtagctaggactataggcatgtgccaccacacccagctattttttatttttgtagggatggagtctagctctgttgcctaggctggtctcgaactcacaggctcaagcaatcctccctccaggacctcccaaagcactgggattacatatgtgagccactgtgcccaacctgtatacattcttttcaagtgtgcctactatggactgtaataaaacagtcttaaaattttttaaagaatgaaaaccatacaaggtatattctctcaccaggacagaattaagtaagagaccaataacaaagatgtctgaacaatctcttagtatttggaaattaaacaacatactcctaaatgagcaataaagagaaagtaagaaaaatttgaaaatattttgaactgaatgaatatgtcagaatttgtgaaatgtagctaaagcagtgcttagaggtgaaatcagagataaagatttcaattcgatagtctaaacttccaccttacgaaatgagaaaaagaacagaaatcatccaaagcaagtagaacaggagatgatacagagctaaaagtcacaaaaatcacaagtggacaaacaatagagaaaatttaatggaaccaaaacctaactctttgaaagggttgaaaggattcctgtatcaggaatgaaagagtaaatatcactataggtcctatacaccaagaaggtaatacaggaattttattagtaacttaattccaataaattcagcaacttaaatgaattggaaaattttatcctaaggactatagaaccaaagcccacttgagagaacttgaatagtcctattaaattgaatttttagctgataaccttcccccaaagaaaagtcatgagaccaacattacccagataccaaagccaaaaaggacatcataggaaaaactcatagatcaatatctcttaatatagatgtaaaaatcctttttaaaataccaagttgaacacagcaatctataaaaggaaacacatatggccaagtagggtttatcctagaaatgcaagctttaacattcaaaaagcaatgtttcatattaatattaaaaagaaaaaccacataatttttttaatgtaggaaaacatttgaaaaaatttaacacccattcatgataaaaccgctcagttgattaggaattaaattgagtttcaagaatctaagaaagagcatctatgggagaacctacatctgacatcgtacttactggtgaagtaaaaagcacttttctcctaagattggaaacaagagaaagatgtctagtcaccacttccagtcaaccttgtagtggatgtcctagccagtacaataagccaataaaaaagaggctgggtgtggtagctcatgcctaaaatcctggcatttttgggaggccaaggtgggaagattgcttgagcttaggagttcaagactaacctggacaatatagtgagacctcatttctaccaaaacttaaataaaaattagccaggcatagtggcatgtgcctgtagtgccacctactcaggaggctgaacaggaggatcactggaggcccaggagatcaaggctgcagggagctgtgatcgcaccactgcactccagcctgggcgacagagtgagaccctgtctcaaagaaaagggatacagaatgtgaaagaaggcatgagactgctgtgacatgattgtctatatggaaaagcataaagtgtctgaaaatgtttttaaaactagtaagtatgtttagcaaggtcacaggatacaagctcaatatttttaaaaagttgaaagtatgaaaacggcatcaaaattatgaaatgtagggacaaagttactagacctgtactaaagctacaaaacatgtactaatgctagaagaaagtaaataagtcctaaaaataaatagatacactgtatgcatgagttataaacctcaaggacctacaaagtcaaaacaattttttaagatttttttcttcttctttgagatggagtctccctctgtcacccaggctggagtgcagtggcacgatctcggctcactgcaacctctgcctcccgggttcaagtgattctcctccctcagcctcccaagtagctgggattacgggcgtgtgccaccacatccagctaatttttttttgtatttttagtagagacgaggtttcaccatgttgaccaggctgatcttgaactcctgacctcaggtgatccacctgccccagcctcccaaagtgctgggattacagacttttttcaaaactaaagatatagtgatcaagatagtatggtactggatctaggctacacatacaggtaaacagaattggactcacccatatattttcaagtggttttcaacaaagatgcaaagataaagggaaaagatagagttttcaacacagttctgtaacaattgaatctttgtataggggaaaaatgagtaatataagcatgaaaaccataaagtgcctagaagaaaatcttcattaaagaggacatgaaaaacgtaaatcttagaagaaaaaattaagttgggtttcatcagttttaaaacttatgttgtttgaaacttcatatcaagaaacgaaagttatggagtggggggaaatatttataggacaaatatgtgatgaagaaggacttatatacagaatatattaaagactcttacaacccagtaattcagaaaaacattcaaaactggacaaaaggccaggcacggtatctcacgcctgtaatcccagtactgtgggaggctgaggtgggcggatcacctgaggtcaagagtttgagaccagcctgatcaacatggtgaaaccccgtctctactaaaaatacaaaaaaaaaaaaaaaaaaaaaaaaaaaaaaaaaaaaaaaaaaaagctgggtgtggtggcggtcgtctgcaatctcagctactcaggaggctgaggcaggagaatcacttgaacccaggaggcagaggttgcagtgagccaagatcgcaccactgccctccagcctggacaacaagagcaaaattctgcctaaaaaaaaaaaaaaagaaaaagaaaaagaaaaaaaactagacaaaagaatgggcattttatgaaggaacatatgcaaatggtcagtaagcacctgaaaggatggtcaatatcattaatcatcagagaagtacaaattcattttatgatgccaatattttcctaataccaaagttgtcagacagtagtactaagaaaactgggattacagttttcattacattacattacataccatacccagcccaatatccttaatattgaaggatacaggatacagatcaatacccttcatatcctgcatacacaaagtcctcaaaaaacattagcaaattgaggctgggcatggtggctcatgcctgtaatcccagcactttgggaggccgaggtgggtggatcacctgaggtcaggagctcgagaccagcctggccaacatggagaaaccccatctcttttaaaaatacagaattaaccaggcatggtggcacatgcctgtaattccagctactcgggaggctgaggcaggagaatcgcttgaacgtgggacgtggaggttgcagtgagccgagatcgcaacattgcactccagcctgggcaacaagagcaaaactccatctcaaaaaaaaaaaaattagcaaactgaacccaaaaatatatcaacagaatcatgcactacaactaagtgaggcttattccacgaaggcaagaatagttcaatatattaatccaccatattaataggccaatgaagcaaaagcacatatcaaataatgtaggaaaaaatgtgacaaaattcaacacccattcatagtaacctcaccaagctaggaaaagagagaaacctcctcagctttacacagagcacctaaaaatatgtacagttactatcatacttaatggtaaaaaaaaaaaaaaaaaaaaaagcagtgctttcttcataagattgggaacaaggcagggattccactcccacagctcttattcagcatagtacacgaagtcctagtcagtgcaataaggcaataaaaaggaaaaagacatatagatttttaaaaactgtcactgtttgcaaatgacacaattatctacacagaaaattcaaagggatacatgcatacacacacgacgagaataaatgagttcatcaagatcacagaatacaagatcagcataccaatatcaactgcatttctgtgtgctagcaatgattatgtgaaaactgaggttaaaggctgaataccatttacaatcactcaacaataaaaaaattacttaggtataaatctaataaaacatgtataggacttgtatgctgaaaattacaaaacactaataaaagaaatcgaagaagatctaaataagtcgagacatacatattcattgatatttgagatgtcagttctcttcaaactgatctgtagttttaacataattcctatcaaaatctcagcaagatttttttgttgatgtatgcaggcttactctgaaatttatatggcagggcaaaggaactgcaaccactg

SEQ ID NO: 6762 - DNA, 26184 bp, Homo sapiens
aatattttgtcccaatctgggtctcatatttttattctccaaacagtgtctttcaaaaaacaagtgtcttcaattttgataaagtacaacttattttttccttatagtgttttatcttataatgcttttccaaacccagtataatgaagaatttctccaatattttcttctagaggtttttcagttttacctttccaatctatgtctgtgatccactttaatttggtttgtgtatatgaggtatggatcaaagttcatttttttcttttgcttacctagttgttccagcatcatttgtcaaaaataaacctattgtttctccactgaattacctttataactttgtcaaaaattagttgtctatttgtctgtgaatgtatttctgaacacttcctactgtaactttgatttctctatttttacaccaataccacactgttttgattactctagctttatgataagtcttgaagttgggtagtttaaatcctccaatggtgttctttttaaaaagttttttggctattctaggtcttttgcaagtctataagaatattaaagccagcatgtcaatttcttaaaaaaatacctgatggaattatgactgatgatattgccttgaatttatagacgaatttaggaaaaatggacatcttaacaatattgaattttctaatccatgaacatagtatgtctctcaatttatttaggtcttatttaatttctctcactaatgttttgtagctttcaatatacaggtcttatacatctcttttgaaacttatctgtatttcatattttggggctattgttaatgagttttaaattttccatttctaatcatttgttgctattgtataaaaatacacttgatttttgcatactgattttatatcctgaaattttgctaaattcacttattagttctggtatcttgtttgtacattccagagggttgtctatgtagatgatcttattgtcagtgaataaagttcattttcttacttcttcctttctaatctcaactcttccttcccaatctcaacttatttgtatttcttttttttttccttaatgcactagctggaaccaccagtaaaaaattgaatagaaatgatctcttgttcctgatattaaagggaaatgtttcagttaagtttgatgctaaccatttacaaggttaaggcttctattctgagtcactgagaacttttattaggaatgaatgttggattttatcaaatgtttctttgtgtactatggagagaatcttgtttttttccttttagtttgttaatgtgattaattacattgattaatttttcaagtgacaaaccaaccttacatttctgagacaaaccccacttgtatcttttatatacattatcagatttaatttgccaagattttgttaagaagttttgcacttatattcataaggttattagtgtgtagttttctttagtatctttgtctggttttggtattgaagtaatactgacattatagaatgatttggaaagtttaatctcctcttcaattttttggaagagtttgtatagaattaatattgtttgtttattaaatgtttggtaggtttattaaatgtttggtagtaatgtttggtgaaagccatctgggactggaatattctttatgggaaaaattttaagtacaaattcaatttctttgatagttatggcactatacaggttatgtatttcttcctgagggagctttggtagattagattgtccttaaaggaatttgttcattttgtgtaagttatcagatttattggcataaactcgttcatagtattctcttactgaccttttaatatctgcagaattcgtagtcattgttacctctctcattcctaatattggccatttgtggtttttttattttgatccacctatagctataggactacagatttactacattttctcaaggaactaacttcaatttttatcttttccactttactttgatatttatgtatcttaattttgggttttattgatttatttctctagttttttaaaaatgtcaggatacatttaatttaatgtagtcatatttgcatttgaagaaattttgatgaattcagttgtgaataatgttttacttggagcatataaaacaaggcgtcctcagcctaaaagctcctttagctgataaacaacttcagcaacgtttctggatacaaaatcaatgtacaaaaatcaccagaattcctgtacatcaacaacagccaagccaagagccaaatcaggaatgcaatcccattcacaattatcacaaaaagaataaaatacctaggaatacagctaaccagaaaggtgaaagatctctacaatgagaattataaaacactacaaagaaatcagagatgacacccaaatagaaaaacatcctatgctcatggattcagagaataaatatcattcaaatggccatactgcctgaagcaatttatagattcaatgctattcctgtcagattaccaacaacattctcatagaactagaaaaaactattttaaaattcacatggaaccagaaaagaacctgaatagccaaggcaatcctaagcaaaaaaaaaaaaaaaaaagaaacaaaaacaaaacaaaaaccacaaagctggaggtatcacgctacccaacttcagactataccacagggctacagtaaccaaaacaacacggtattggcataaaaagcagacacatagaccaatggaacagaatagagagcccagaaacaaggttacatacctacaaccatctgatctacaacagagctgacaaaaacaaacaatggggaaaggttccctgttcaataaatggtgctgggataactgatgagccatatgcagaagattgaaactggacccttcttatgctatatacaaaaatcaactcaagagggataaaaggcttaaatgtaaaactaaaaactataaaaaccctggaagatgacctaggcaataccatttttgacatagaaactggcaaagatttcatgacaaaagatgccaaaagcaatcgcaacaaaagcaaaaattgacaagtgggatctaattaaacataagagcttctgcacaacaaactatcaacagaataagcagacaaaccacagaatgggagaaaatatttgcaaactatgcatctgacaaaggtttaatatgcagtgtacataaggaatggatttacaagaaaaaaacaaccccattaaaaagtggtcaaaggacatgaacagatatttttcaaaagaagacatatatgtggccaataaacaagtgggaaaagctcaatgtcactgattattagagcaatgaaaatcaaaaccacaatgaaatatcatctcacactagtcagaatggctattatgaaaaagtcaaaaaacagcaaatgctggtgaagttgcagaaaaaagagaatgcttatacactgttgtgggagtgtaaattagttcaatcgtggaaagcagtgtggcaattcctcaaggagctaaaaatagaaaaaccatttaactcagcaatttcattactgggcatatacccaaagaaatataaatcatcacataaagacacatgcacacataagttcattgcagcactattcacagtagcaaagacattaaatcaacctaaatccccatcagtggtagactggataaagaaaatgtggtacatatatgtcatggaatactatacagccataaaaaagaatgtgatcatgtcctctttaggaagaaaaccaattaccacatgttctcacttacaaatgggagctaaatgatgagaacacatggacacaaaggggaacaatagacccttgggcctccttaaggatggagggtgggaggagggagaagatcagaaaaaataactattgggtactaggcttagtacctgaatgatgaaatcatccgtacaacaaacccctgtgacatgagtttatctgtataataaacctgcatatgtacccctgaactcaaaataaattattttatttttggtagagatgagatttcactatgttggccaggctggtctcgaacttctggcttcaagtgatctgcctgtctcagtctctttatttagttattttggacataagatttcatgctgcaaatttctttatgagcattgtataaactgtgttccacagattttgatatatgatgtttttattcaatatatatgaggagtttctgtagatctttcttttactaattcctagttcaattccaatgtatgaagatattttatatgactttagttactttaaacttgttaatgttcattttatggcccagaatatgggctattttggtgattttttccttgcacatttgaagagactgtgtattctggtgttactgagttgtgtgtcttttaaatgtcaattaagtcaagttgtctgattgtgttgctcaggtcttctatatcattattgatcttttgtttgctaattttattgattgctgagagagttttgaagtctaccaattacggatttatctacttttccttttagctctgtgtttcattcatatattatgaaattctgttgtttggtgaatatacatttacaattgtgtgctaattgatcctttattggtatgtgtgctcctctttgtccctgttaatattatttgctttggagtcgatattgtctgattttaatatggccattcctgctttcttttgattattatttgcatgaactattcttctctggccatttacttctgatgtatttgtatctttatatataaaatagtttctttaggccacaaataggtctcctttttcatccaatttgatgatttctcatttaattgatgtgtgtaaaccattttcatttgatgtaactactaatacagttaaatttcaatttactatcttgctacttgttttctatttgtttcatctgttctttgtggtttttttcctttctctgcccgttttgaattgagcttttaaaaatgattccattttatttatgctattaatttactgcttatatttcttactaaaagtttcttagctgccctctggcttatgatatatatctcaaacttatcacgtctcctttaagtaaaattctgaaattcacaaatagtttaagaaacttacaacaatattccttgaatacccctccctatactttgtgttattgttttcacacattttatttctacgtcataaacccttcaaaacgttgttactatttttgctttagacagtcaattatattttagaatgattaaaaaaatacacaaagtcctgtatatttattttttaccatttctgcagcttttaattttttgcatagatccatgtttctggctggcatggtattactcccgacagaataattttatttaacatttctagcacaggtcttctggcagtgaattctctgtttttgttcatctgtgaaggtttttattttgctttcatttttgaaagatttttgttttagtatagaattttgggttgacatggtttttttttttttcatttttaacgctttaaagatgttactctcttttcttctggtttgcggtgtttctgatgagaggtctcttaaaattcttatgttcattcctctgtatttaatatgtcatacctgtctaccttcaagatgttccctttatctttggttcaagccatttaaatatgatgtgttttagtcaatagagggttttggttgaattttttggtggtggtgaggaatgagcaggtccagccctgctgttgtatctgttgtgctgcagcagaggtgtgagtttaggaacatcatgttcctgtccacctaactccaacagaagccttagtcttgacatttcccttatttagctgttactaaggaccacaagttagatgcatccgagacttcctttcctgaatttaccactggcgttaatctacagagaacactagataattcagatatcattaaaaattatcctcattttttcaataaaggggattagcttcaatgaagaccagcaaaaggaaaaggatcagcttggcaaagcccccaagaaggaaraagcagctgccctccacaaagacatttctggttcaggcaagaggtcactggagaagaaccaaattaatttttggaggaatcaaatgaccaagagatgggaaccaagcttaaactggaagaccactgttaattacaaagactatgtagacatttgcatttgctttcagatgcatctttagtaacaatattcacctaatgtttcacataactttatttatttatttttgagatggagtcttgctctgttggccaggctggagtgcactggtgcaatcttagctcactgcaacctcygcctcccaggttcaagtgattctcctgcctcagcctcctgagtagctgggattacaggcatgtgccactacgcctggctaacyttttttttttttttttgtaattttagtagagacagggttacaacwtgttggccagactgctctcaaactccygccctcaagtgatctgcccaccttggcctcccaaagtgctgggattacaggtgtgagacactgcatccggccagaactttattttataatagaaaaataccgagtagatagttacatgtccctccaaggaacaggtttattcctttctgctcctttttgtattccaagcagaaagatttgatagagtttgtgtgtggagcaccatgaagggaagggaagaacacaattcacttttatatagttggtgagtcgggacaaataatatgcagaaaagatgataaaacacatggagaagtcacaggagaaatgtaaaaatcatggtagggacctgattaagtaagcactgggagaatgtggaatgatgaaaatgatatggagttagtcagggaaactgtcatagagagaatgtctaacagaactttaatactatgaaaaggctagagtctcaaaaatatgaatgggcctatataaagtggacactggcttaatgaatgtatgaaatatacaaaacaagtgccatttaggaccctctataaacaggcatcaaagcaaaaattgagggccaatgctacttaaatgctggggcagtctgaaataccttgagcattatttatttatttatttattgagacaaagtcttgctgtcacccaggctggagtgcagcggcatgaattggctcactgcaacctctgactcccaggtgcaagcgattctcttgcttcagcctcccgagtagctgggattacaggtgtgtgacaccacggctggctaatttttgtatttttagtagagatggcgttttgccatgttggccaggctagtttygaactcctgagctcaagtaatccgcccacttcagcctcccaaagtgctgggattacaggtgtgagccactgcacccaacccactttttaaaatttaacaaatagtttacaagtcgcggcctgtaggtgatattctatgttgtcccatttttgggttaagaactgactcctggttgatcacacggggaccttctcctgcagggattctgagaaccacagagtgattgtgttttggaagcaaacccagagagctgtttgaagaacggagtcatgtggagaggggagacactggctcctctgattgattctcatcaattttggggtgtttgacttttgtggctctgtttgaaagagtcaatgtgaaaatgaaaaatgcatgggcaactctgttgactggcaagtgagttttaaaatactgctttttccatattcttactctttcaagcatgagattccttagcaggtattcaagggagaacacagaatgccaaggactatgcaaagcctgcgaatacctggaaaaccaggtgcaggccctgttgcaacgttgggtggggaagataagaaaatagaaaactataattgggggcaatccgtacctagagtagaaggcattggatgcaggattcacaccaacagtggcagcctgtgaagacctgttcctaggtgctggacagaaagtttcttcaatatgtaaaacatagggctgtgctgaaagagtgaaaaagacagctccgagtgtcagaatgaggctggaactcttgtcaggaacacacatcatttgagcacatggaaataayggagtatatatctacattgccatcttttattttttattaattagcataaagcaataaagctaatatatttgtatatttttttaaagcaaaggctcagcaaaagaaatccaagaggacaaacacacaggaaaacttgaaaaaccaagaccatctgtttcacacggaagagcacaattacttcggtatgtttctggtcagcaagacgagttccctaaagccaccctcacgcagtgggctactgagcatgcaaattaatggcatccttcctattagggtccccagatgtttacactgacggttactaggaatgttagtaaaagtggtcacactggatttctttaaatactttttcaagatattcttctaatgcagttacccaaaatacagtgatttactagtattagttgactgtgggaaaagaaatgtatttaatgcaaagagcagtgaactaagtttaggaacactgggctcttaactgatgtcttgcctctgaacaatcatgtcctggcaaagttatgtatctgtctgagcctccctttgctgatcacaaaagactgccgattttgaagtggtctatgttattgctaacgaaaacaattaaaaattaaatatgaggccaactagtaaatttttacttgattttcagtttgacaaaaaaagtgacatgtctggaagataagggtcagccacttttattagcttcagagtggtggatattagcgcttttgttacaatctcacagttccttgaggctgcgttcactgattttttcagttatttttttctctacgttgttcagattgagccaattctgttgttctatcttcaagttcatttattttttcttctgtcctattcttctgctaatttcattcagtgagtttttaatttcacttataatttttagttccaaaatttccatttggtttttcttttctatcttctctttctttgctgagactttctatttttttcatttgtttcaagcatgttcatatagcttgttgaaatattgttatgatggtgcctttcatatctttgtcagataattcatacttcttcatcaccttgatattggcattttaaaattgtcttttctcatttaagatgagatcttccccattcttggtatgacaaataattttcagttgaaatgtagacattttggttattatgagacactggatcttatttaaattatttatttatttatttgagacagagtcttgtctgtcacccaggctggagtgcagtggtacaatcttggctcagtgcaacctccgcctcccgagttcaggcagttcttctgcctcagcctcctgagtagatgcaattacaggcgtgcgctaccacactcagctaatttttttatttttagtagatacggggttttgccatgttggccaggctggtcttgcactcctgacctcaagtgatctgcctgcctcggcctcccaaagtgctgggattacagatgtgagccactgcacctggcctaaatcttttattttagaaggccttctctgccaccatattggcaggatgaggtatgtgttgcttctccaggctggtgaggaattgaaatagcaggttttcccataggccttcactgatgcctggggggtcaggcaagggagtcctcattatttctggagggtagtgggagttcatgctccacctatgcctctgctgataccagccggacagtgtgacgggggagtccttcgttactttgtcagtgggctctactgatatcacagttcggataagtgacttcatttttgccacgatgtagtgagcatctgactccctgtcaggccttctctgaggccaccccagcaggtgggttgcagcgctttcttacagtctgataaaggtagagccctaggctcttcacttggcctttgctataagaggtagacttgggccacgctgttatgtgtggtcttgattgacatagatcatttgttgtctaaacattttctgtcttattaggctttccttttctggccctttgaattagacagagcaggactttcttaggtcctttttttgcctgcacctcctggagtttctgctttgccggcttttccagtacccagtctaggaagaatgagacaaaaagaaaacccagggaatgcaccgstgtgttgagccacaggtcttcagatccctaggtagtgctcttctttttctctacctttcagagtcaccttatgtttgttttatatacaatatccagatttttagttgtgcttggtgggagaaatagggaaaagtatatctacttcatctttcctgaaacagatattgggccaaaagtatttcaatttttagtgagttagagagcttcagggtagtagataaggtaaagttgtaacatatctaagcaacagctattactcaatgataaaaatgaaacttctctgtgtctaatcttgcctaagtggatagaattctgtggtagagaagtatttcttaaggtggagtttgtagatcaattcaatgttgacatttgcttctttttaactcctgaatatgtagttgccatggaacaggattggaaagaatcatatcaaataggaaaagcattttaaagttagctatcaaaggattcatcaattggaaaaaaaaagcttttctttggggcgctgctttttaaaatgggattgtggagtgattgggtagacctaattcactctgccctcaactccaggagcttgttagactaagggaaggtaaatttaggctttccccaaagaatttaggcttattctactatatgcttcaatctggaatctttgagttaagtttaagtcacttcttgaataaggcctgatatactggaaacttcactcaggtggctcattaaatgggaacagatgcttgaattcaggctttccctcttccagggtccagagagcataatcatagtgttttacacacaaattggcttttggaagcgcagaaattgggggytctctgtgccaaaaaaactgtaagaaattaagaaaatcatggaaccttacamattaataaaatttaaaaattgcccatcctctttctatgctccgaaatggaatagactagaaaagacttttatggatgagaacccactgggagttggagagaggagaggagggagagaaacaaagaaaatgagaatgaattgatatragcatgaaggctkaaatggactagtccttgcccatgagcttaatgttgagttagaaacttctagagcgatgaggaataaagtgtactttctcataagtctttttataattagaccacaatgatcgtgattscactaattctatttttgtaaatccaagttaaacatctgcagatggcccgttttcagccctggttgatttcactccaggtttgcactgtgtcaataacctttttatggattactggggacccagatatgttttctaaagattaatgggagcccagaatgaatacactactccagggggtggctggcagggtccttgggttcctctttcccacagacaccactctaaatgcaaactcgaatgagtcctgtctcctcctggactctcctcyygtatcttgctctgcrrtagcccaaatgaatcattcttccactttgctctctcttctacatttttttccttgcccccacctcatactacaaggaaatgaattttcttatatcctaaccctatgcaccaaagcctccactctctcctttcttgcatttattgaaacttttccatgacagcagcgattctccttcagatcttcttttccctaggctctgtgtaaccacagggcatggggaccgtaggcggaaatctcctctttattgcttcaaactaccttactcttcagattagatctccttttctatgaggctgatgtaaccctctgtctttcctggttgctgttttctatggacccattgtcactgacgattttgacattgactcactatcactttcatcctatgtcccatcatcatcttgaaaaacctgaaaccccaggaggaaaaccaataccaaatcttggcctgcgcactccctggtttcagtctcactgactgtygcctcctctccatcaagctgctgctactgccacctcctggaattatcaccagaagtacccttcttccaaaatctaaacctagactgaattttgttcattcacttattcatacctgctttaatttattaattcttgtagcaattatttactgacttccttgtgctaggggagacagtataaaaagtataaaagacagaaacggtccttgccttcatggaacttacgaagacactacaagaaaacacagaaataaaaattttctgatggtgaccaaagtggacaaggtactgagctacaaaataatgggaacttagrtaattactcatagaccacagatttgattctgttcttgctgaasatcgaggtaaacacaaaaacctaaccagttacttaatttatgtggtccttaagatgaaaacagatcagatcttcaaaracaaaaccacascttttccttggagtttaacaaagatactgaaatacagtattcttcaatagcattcccttgatacctggcagccagcaggccctccatgcatgtgtggtgaatgaatatgcatgataatacagaactrtctaacacgtatttcatgctttttgtatgccaggcactgttataagctttttacatactaactgctgttatcatcctcaatttgcaggtgaggaaaccgaggcacgcacaagttaaatgactaccccagctcctctaggaaccaagatgaacagctctcattacgaatatttgttttaacacagccactttactaaccatggagctttgttcaaattgttattattacagaatcttgctctgtcatccaggctggagtgcggtagcgcaattttgcctcacggcaacctctgcctcccaggttcaagtgattttcctacctcagcctcctgagtaactgggacaagaggcacatgccactacacccagctaatttttgtatttttagtagagacagggtttcaccatgttggctaggctggtctcaaactcccaacctcaagcaatccactcacctcggcctcccaaagtgctgggattacaggtgtgagcccaccacacccggcccaaattatttttaactcattgtctctataatgagagtaataacaacctcatagattgttgagtgaattaaaatgagacatttaacccacagtctgttgtcctgaactctcgtggccaaatgcatgcggttctgaaaaactcactttaaaaaagggtaatgaaattcatataatatatattatatgataacctctattggagtgtgagccaataccctataatcaaaaacatgagcatttctgtagtgaaacatgaatattcacactgaatgagaggaataaagaccataaatagtctagtatcaattcatataagtctttagcaacaagttaagtccagtggggaaaaaaatcagttttcagagatttttcaatttcagaattagaggaaaagtattgtggacttgtgtgatctataatggtcattgactttatgactttgatatttaaggacaccttaatatgtgattggcaagggccacattttaagtaattttggatccttcaatgtgaatggttttttttctcctcttaatttctctgaggtttccttgcttgtagaatgtggatgatagagcctgctttgcaaagtggttgtgaggtttagaaataataaatataaagtgcctgggacrggccgggcgcagtggctcatacctgtaataccagcactttgggaggccgagacgggaggatcacgaggtcaagagtttgagaccagcctgaccaacatggtgaaaccccgtcactactaaaaataaaaaaattagccagacgtggtggcgcatgcctataagcccagctactcaggaggctgaggcaggagaatcacttgaacccgggtggcggaggttgcagtgagccaagattgtgccagtgcactccagccagggcgacagagtgagactccatctcacaaaaaaaaaaaaagtacctaggacaaaatagaccaacctacacaaaactggtggctgctgttggtattatttaatattaaaaatagctagaagatttaaaagtttgcttctgtcctgtgagatgaggaatatgtgggaaacaatatcaggataaatatcctgggttcagcacctctccacatgtgagtgatggatgagtagttcctgagacatcattgtggatttggtgacccaatggcagtaacctggcatccggcagtgggaggtggagacaagttggtgtgatgagtgtgcatrtgcatgagggacctctgcagggacatagggcatatattggattccagaaggctcttgtaatactgttgtccatgcatcaaaccatagaatgtggtgtacttctgtggaactcaacactttgcatggtaatgtctctcagagttggtgsctaactctttggtcctgaacctgattatgttcatgttattgctgttctttggcaccttgtgcccttgcaagtacttcagtgtaggcattatggagggatgtgctgaatattgactctctttggtaaaagagactctttcactttagggccttgtggcactgcccagttgaacttactggaataatagaaatagtcaatatctgagctgtccagtatggtaaccacgagacacgtgggccattgagcacttgaatgtggctagtgtgattggagaactggatttttaattttctttaattttagttaaataartaagttcaaatatctgtaactatagacgaccacatgcaatgagtggcagtcttattgaaaagtgcagccttaagacattcactgaatacccttgtttatttctcactgttttctttattatgattattgcacccagagcaattgcacctgcaatagagacaggtttattcacctcacgcagttcctttttattttattttattttatttttgagagagagtcttactctgtcttccaggctggagtgcagtggtatgataatgtaataatggtttactgcagctcaaactyctgggctcaagcgatcctcctgcgtcaagcctcctgagtagctgggattacaggcatgcaccaccatgtctggctaattaaaatttgtttttgtagagacagagtcttgctatgttgtccaggctagcattgaactcttggcctcaagtgatcctcccacctcagcctcccaaagcactgagattataggcatgaaccactgcacctggcctcatgtagatcttaacagagatctactagaactcagaaggtgttggtatctgatccattgcttgtgcccatgttgccaaaatatgattataaccatctccacactrtagcttacatgtgtatgtgtgttgttattgttcttaggaagagtgckgaaaagattgaggaaactgttagckatagctcctcagaaagtgaggaagatgaagaaccacctgaccatcgtcaggaagcaagtgcagatttgccatcagaatattggcaaattcagaagctggtgaaatatttaaaggtaagaaaggcctgtggtartatgtttgcaatgttcatttaaaatactttcccaaggatgtatatgctgattccaagtttactttatgtttctttcaaataagagtagtaagcattcctgttgttttatctaagtgtgtgcagggraaggtcttattaccctgaggatgcaagattcatcctcatggagcaaccaggmtgcctggtaccaaccctctstcctggctggggagtgcccatggtaaacagctgacactgagacttgctgccattttatgatttgtagtatggtrtggaagaaataacatggatttttaaagcggactttggttaaactccaggctgtttcccttactagcaacgtagctgttgaaacgttacagttttgagccctaattttctcaacccttggaataaaattaatatacctgtactacaggactattataaagtttaagaaaacacacttgaaacatacagcgtggtttctgagacattgtgggtgtttataatgtggattggttcattttcatttctctcaagtcagatagcatatatgagaatattttacataataattggccacgtaatgtatttaagtacttgaatttgcaggagggcaaggggaatgactcaccaaaacccagattaatattcatttctgatgtcagatagcaagtattgatgatatctaggccttgtgtaaagtcgacgtccagagtatttgaaaaagcatttgactcaactcatgttttctttctgcttttccatgtctttggtcaaatcaaccaagggcatttgccagtggctttgcttgattcaatcattgcagtgtaaacatttatcaaaatatcacattgtactccacaaaaatacacaattattctttgtcaattaaaaataatttgtattttggctgggcgtggtggctcacgcctgtaatcccagcacttagggaggccgaggtgggtggatcatctgaggtcaggagatcaagactagcctggccaacatggtgaaaccctgtctctactaaaaatacaaaaaaattagccgagtgtggtggtggacgcctgtaatcccagctacttgggaggctgaggcaggagaatcgcttgaacccaggaggcggaggttgcagtgagccaagatcgcaccattgcactccagcctgggtgacaagagcaaaactccatctcaaaaagtaaaataaataaaattttgtatttcagaaaggacatgagcttatacaaaacaagccctaatgctcaacttggagatccttttggcaggctcttaatgattttaccaacatcaatgcaaaatgaaaaatattgttttttggtctggactgtttgtcatgaaacaaacctctagactactggagagaacagttaatattttgtgagttttaaaatttcatgttaagcgtgatacttcataaatattaaatatttttatggcatctgtcaatttttaaaatgttttttatttggcatttattttgtgttaatgtttccctcatttagtgtttcatattatgaaattcctatatcaggtgcacattgttkttacatgttgttgcagtatataattatgtcacatattttggctcataataataataaatcatrcatttattacataagttttttttttttacagaaaacctctgaaatttttagcataactctaccacaaaaaatgattcactgtttattatgatagaaatgattcactattattacaggcattcattattatttaaagacatgtaaattaaatgttaggaaaaatacagaataatataattttgggaactcatgaaaattcctaggaattttgattgtatattcctgaatcttgaagatkaacctgtcgggaatttggaaacactagcatggagcacaggctagattcaggccacacgtttctgcactcccctttggcaggagtatttgtgcacaaaccacatagttcaacacagaggtcccgcctggcacacatggcgaccatgtccagccttgggacatttaggacaaccttgcaacagtgcctctgcatctttactgaaccccagggcctcctgtaattacctctcctggacttctaaaaagcatgccatctggggaaaaaaaaacaaaactggcagtggagaactttgccaacaccactctctctctgaggcgggcagctctagacagggtgactgaggcttagacatggtccgcccttcttcctctcctttcctctcctttcctctcctcccctctcctcccctctcctcccctctcctcccctcccctctttccttttctctttcctaggctgatcctgaactcctggcctcaagcagtcttcccaccttggctcccaaagtgctgggattgcaggcatgagcctctacacccgtccaagacatagcctttcagaagatgaattaagagaggcctgagtttttcccaggagtcctggtccattatctttatttcattagcaaaaggaaacagagtcaaaatggcagaagcaaaagatgggctaggaagcagaataccagagtaattagaagcacgatctttgacgttggaaagaccagttgagttgaaattctgccacttactcaatrgccttggatgagttgactaacccytctaagcttcagtttcctcattggtgaaggtggaaaaataaaagttctcttatattaggattattaagaatgttaaatgaaatacaacacatgtaaagtgcttagcacaaagtagtaactgttggcaataataatcattgctattgcttattattattgtagcaaatgtgtggcatggagacttaactgactcgtgcaggtggccttcaacttttactttcagttctctagcaaccaataaaaggggggaaatagagtgagttaatacagggagggaaagtctctcaacgtcttaaaataaaaacaaaccagttgccagtgagtataactgatcctggtgctaagagcaggaagaattttctcccttaggatttaatggggcaggcacagagtgagagagtgaacagccgcaataataccctcccagtgaacatggcaaagagagtttctcataatarcctaattactggataactgtcttgagtttttcaactatttaggataagtccaggtagcattaggccaaaaagagatgcactatttctgtcccagtacagctaaaaaaaacatttattgatgaagtgctacttaaatttgcacgagttattcatcaataaatcatgtgcaaatgtgatactcttggccagacagtaaattgcttggaattcttatagttcccacaggtaaatattcttcatgtagccaataaaaggaaaagtatatctwtaaatgatttcaaggttttcgacacagataaatattctatctggagacataaaatgatactagaagtctatgaaatgcaaagttgaatgtctctaggcaatctcaaaataaatacacttaacattttaatttatgaaattatgatttaaatgtagatttaagctagcagagaaatgttcatgttgacctgactttctatttaccattttctaagtaatgtctgtgattgttggggaaaaaaaagagatttaatgagctcattaatacccaracaggtcaatgaactatagcttattaattgtccagagctatgagctcatatcttggcacatcaaaatagtttgtatttaattatttggtttgacatatgttaatttcaacctgcaagttttatatatgtatatattcttttcatctggattttttgaacacaatttaatttttaaattaatgaatgtatcacatttttactcaccaaccttccagcttcttctctcycccatagctgatgatgctgtaccctaattctaaaggaagcaaggaacccccttttcagctaccttactgataagcacttatgttctgccttctgccatcctgatggttcrggttgtctgtcttactacctacttcttgagtagagagatcacattaaatttattgctgtatctcrcagggcatcttgctaatgtgcacaggctcgcctccctacctctgccctratggtgcgaaggggagagagcgaggttccttagtggcagggctttgctgttcttcactctcagccccctgaaagcagttcttcctgcctctgagcctgtctttccttctgctgttgacttctttcctactttttttgcatccctctctcttccttttcctgccgtctttcttgtagacatactagttgattgctgtatttgctgactttatatggayattattttctcccttggccaagattgttttaaaatcttgcaaggaaaatgtcttgcttttgatcacttctagcrattaaaggagatggtttgttaatgtctctatgctccatactaaatctatgagtctctctaaaacttcagtgaaatcatgctcatttctaaataaggtatgtggagagcccctttgtgaaatacgagaagggatgtaggatattttctttgtttggaaatgtggaaataaatattagttacaagtactctatgttataaattcatacaaatgggtattctgcagtagagtggggtaaaatgttgaaaggtcataattataagtaggtttgcattttatacacattataatgaaaaagaatttctggacccaaagtcaaaaacatgttgaaatccatttcatgtaatcccagcactttgggaggccaaggcgggcagatcacgaggtcaggagattgagaccatccagaccatggtgaaaccccgtctctactaaaatacaaaaaattaactgggaatggtggcatgcacctgtagtcccagctacttgggaggctgaggaagggtaatctcttgaaccaggaggcagaggttgcagtgagctgagatggtgccacgtccctccagcctgggcgacagagcaagactccgtctcaaaaacaaacaaacaaacaaacaaacaaaaaaacaaaaaaatccatttcaatgtggattgaaggtagagtggatatagtatttaacacttataggatcagtaaatccaagaagaaactgagaagactagaataatgccaagaacatggttggttgtcagctttttggtagtttagaggcatttcagaggctgggcctagaattatgctttctttcccttgaagatatttcctagagctgtcactagagggtaagatgcccgtattatccaggcaccagctctaggctcacgaagggttacattggcaagcacagttggatatctgcccatactctgaaatgcttcatccagcctgtcttattcctgagtacttgctgcaatgatggaggcctctagggctcattcccagggccatttctccacrtgtacctcctccctgtgggatgccagcttctgtacctgggattttgatcagagtccaggtgggagagtggggaaagggatgatgaaagcactgatttggaaagatgaatccagcagcaggtggtgtgccaagtgaatctaatgggaagggatgagaagacagtgacaacggggttacactggtagaaaggatggccattaccacacattcatcctcgcccctgacccacgatgggttggtgaggggtagcataagcctaatttgtttgtcctatatcatcaaattcatcaaacactggagttgatttcacctttcacatgagccacattgcttgccatgcttctgctctgtaaccataaattgagaattttcaggccaccagatgcctggtggatcccagcttagcagtggtcaatactctattcctgagtggcatctaaaagacattcacatcagaaatgccaccgggctgccaacttcagaagggactcccagagctctctccctggtaggttttgggtttcttctctggaggtggattcttggcaaggacatttttcagacttgaaaccctttgttaaagactgcatttgtggggctcagttccttaatgatcttacgtaaactgattaaacacacacacacacataaatacatacacatacacacacacacacacacacacacacacccctgggcttaaagcgtgctttcgagtggtaattggaagttgtgtgagtttttgttgtaggaatttgatgtactttgcaatcaattacagttaattcaattcctttcccattacttgagttttgggtatggagtggcaggtagtttgatccttgtttcattggtggaaaagctgagaaattctttgctccaggacacacagaaggcagctgcaggactgagtccaggcttctatctttattgcccattgcctggttgttcggttccactgtcaagaaattcaggacccaggaggcctgcagaacctactgttgtatcttcctgtctttctcttgtttggatttcttcatttgagtgagagtcaacagggagcccttcccataaaggaactcagtattcatgtttggaaggccatattagacggtgctcttctgctgtctttacttaaaaaaaaaatagaaaagaacgtgatggcacagagttattcttgttaaaaagagtatttcaaaaatggaaaacgatggtccctgttcatccactcaaatcaactccagtagttagaaaggcaaatgagtaccatgttcctgagaaacattctttaagttagtacatgtgttgctacattgatgtgggttgagctttcttttttttttttttttaattttttttttattgataattcttgggtgtttctcacagagggggatttggcagggtcatgggacaatagtggagggaaggtcagcagataaacaagtgaacaaaggtatctggttttcctaggcagaggaccctgcggccttccgcagtgtttgtgtccctgattacttgagattagggagtggtgatgactcttaacgagcatgctgccttcaagcatctgtttaacaaagcacatcttgcaccgcccttaatccatttaaccctgagtggacacagcacttgtttcagagagcacagggttgggggtaaggtcacagatcaacaggatcccaaggcagaagaatttttcttagtgcagaacaaaatgaaaagtctcccatgtctacttctttctacacagacacggcaaccatccgatttctcaatcttttccccacctttcctgcctttctattccacaaagccgccattgtcatcctggcccgttctcaatgagctgttgggcacacctcccagacggggtggtggctgggcagaggggctcctcacttcccagtaggggcggccgggcagaggcgcccctcacctcccggacggggcggctggccgggcggggggctgaccccccacctccctcccggacagggcggctggccgggcagaggggctcctcacttcccagtaggggcggccgggcagaggcacccctcacctcccggatggggcggctggccgggcggggggctgacccccccacctccctcctggacagggcggctggccgggtggggggctgacccccccacctccctcccggatggggcagctggccgggcagggggctgacccccccacctccctcccggacggggcgtcttgctgggcagaggggctcttcacttcccagtaggggtggccgggcagaggtgcccctcacctcccagacggggcggctggccgggcggggggctgacccccccacctccctcccggatggggcgggtggccgggcggggggctgacccccccacctccctcccggacagggcggctggccaggcggagacgctcctcacttcccagatggggtggctgccgggcggagaggctcctcacttctcagacggggcagctgccgggcggaggggctcctcacttctcagacggggtggttgccaggcagagggtctcctcacttctcagatggggcggccgggcagagacgctcctcacctcccagacggggtcgtggccgggcagaggcgctcctcacatcccagacggggcagtggggcagaggcgctccccacatctcagacgatgggcggccgggcagagacgctcctcacttcctagatgtgatgacggccgggaagaggtgctcctcacttcctagatgggatggcggccgggcagagacgctcctcactttccagactgggcagccaggcagaggggctcctcacatcccagacgatggttggccaggcagagacactcctcacttcccagacggggtggcggccgggcagaggctgcaatctcggcactttgggaggccaaggcaggcggctgggaggtgtaggttgtagcgagctgagatcaggccactgcactccagcctgggcaccattgagcactgagtgaatgagactccgtctgcaatcccggcacctcgggaggccgaggctggcagatcactcgcggttaggggctggagactggcccggccaacacagcgaaaccccgtctccaccaaaaccagtcaggcgtggcggcgcgtgcctgcaatcgcaggcactcggcaggctgaggcaggagaatcaggcagggaggttgcagtgagccgagatggcagcagtacagtccagctttggctccgcatgagagggagaccgtggaaagagagggagactgtggggagagggagagggagagggagagggagagcgggttgagctttcttaaaaaagtcagtgacaaacgaataggacaacttttgtgactatttttttaaaattgccatgtttgaaatcataagatatttaaattccatcagctaaaaaaagtctactcagaatctgcatttatgttttcataaatattgtagtgtaagaaatgaatgcattttaagtatttggattattggtaatgtgtgttacttgtatggttatattgcccacaaaagaatttgtcatcttttatttttgttataaaggagattgtggaagaaatggagaggctcatctccgtcattcccaaaggggaatctgtatttaaattcttgagctttaagctttccttgcctcttggcattcataagtaaatacgtgtggagaaaaagcagagtaaagacaattagatcagtatgataacacaatgctactgactcataacagtttatatgaccactagctagcactatgctaccacgtcaacttaacgactgaaaaatgacaatattgaaaatctcaggggagttcccttaagctttaactcattcattcattcactcactcatgtgtttattcatgaacgtgtgctatgagccagcacagctagagcatactgatatgatacacatacccatctagttatttgtaagatttttgattggcatgaactgtgatatctaaggcagttttatgtagtagatcttttcggggaatttcttgccccatgtttttgcaacaacacttatttttgttccttaaaatatgcttttcccctaaaattcatttgagaaagctaagtagattggagaagagtagtggtactggctggttcccagtttctataatgtgctaggctgctttgctttctgttttaaaaacgcacactcatggcctgttacagagcctgcatgctgaagaatttttagtatatgagttaaggagtgaataagaggcataagatttggtataaatgatttttcattttatatctctctatagatctattgtcattatttaaaattgcattttgcaggaaaaatattaaactgcatgtccctttttggtccattggcctgtgagatttctctcgcagggctgtggttcttcccagctcttgctcccggggtgggtgtggctgtctggttgtggctgctgatgtttctgtgacacaggacatagcagaagcacgtggtattcttcccgtttcccttactcccttctgtgtttaaaatctttaaatattatacaaatagcacactcatatatgcttaatataaaacttcaagccatgcaaagtgaaagccccttccagatatttctctgtttatatacatatacatatacatatatcatttatatacataaatgaaatcctactattattctacattttgctttttatatttaatattctgtcttggtgatctttcatatctgcctcactccttttaattactacatagtatttcattaaaggtatatatcattaatttattgagcaattgccttattgataacatttaagttgtccctcaaatcactttttgttactacaaacaatactgcagctaatatttttacatattctttggatatgtgcattatttctataggatggattctttgaaatggaattgcttgagtcaaagagaatgcacatttacatttttgatagcactaatagggagttctatacacatg

SEQ ID NO: 6763 - DNA, 14387 bp, Homo sapiens
gacacagagcactgattggtgcatttacaaacctttagctagacacagtgctgattggtgcgtttacaattctctagcttgacataaaagttctccaagtccccaccagattagctagatacagagtgctgattggtgcatccacaaacccctggagctagacgtagagtgctgattggtgcatatacaatcctccagctagacataaaagttctccaagtcgccaagcgactcaggagcccagctggctttacataggcctggtggatcctgcgccatgggccgcgggcggagctgaccttcagtcccaggcggtgcgcgggcactccttagcccttgaggggtcaatgggatctggcgctgcagagcagtgggcagtgcgcccatggcggggaggagccaggggaggagcgggggaagagggggtgggggaagcgcggggcggatttgggcatatgccgcaggctgcaggtcctgagccctgacccgcgggtaggcggctgaggcccagtgagaattcgagagtggtgcgcgcaggccggcagtgctagggggacccggggcatcctccgcagctgctggcttggtgctaagcccctcactgccctgggcactccaagtgcaggtcccgccgagcccacgcccacccggaactcacgctggcccgcgagtgccctgcgcagccccagttcccacccgcgcctctccctccaggcctctccctccacaccttccggcaagcagagggagctggctcaggcctcggccagcccagacaggggctcccacagtgcaacggcgggctgaagggctcctcaagcgtggccagagtggaggctgaggccaaggaggcacggagagcgagcaagggctgctagcgtgttgtcgtctctcagggggatggagtctggctctgtcacctaggctggagtgctatctctgcttactgcaacctgtgcctcccagctcactgcaacctttgcctcctgggttcaagtgatcctccggcctcagcttcctgagtagctgggattacaaacatgtgccaccatgcccagctaatttttgtacttttagtagagacagggtttcaccatgtgggccaggctggtctcaaactcctgacctcaagtgatccgcccacctaggcctcccaaaatgctaggattacaggtgtgagccactgcacctggcctgttttgggttcttttcttctctttttgaaagtgcaaaagttgttgggaattgaatagtttcgcctaaaggagcttctacctgcagagaagcttaggcttgcaaccagtgagaaaggggcttatgctaataggtatatagcctgggcaacagcacaaaaactctgtctcaaaaaaaaaaaaaagtatagtaaattatgaaaaagaataagcatcttcaacaataaagaatgaaaaaaataaaaactatactccacaattagaaaacaataactcttaggttgttaaaatattttttgatatattttaaataagacaccctcagtatatgtgcagaaaagattatattagtataggaaacagctgtgattatagatatataaactagagaaatgctagtcagaaataggtttatcagaagagagaagaaatttttatttgagtaaatgtagagtctataatttaaaattatacaatggtttttttattaaatgtttattcaaatataaaaacaaaagcttataaatagaccaaaagaaatattgttggtttataatcaggttcataggaactaaaacagagtaattagatgagagagtgtgcaaatgattgtgttattttagtaaaaatatctaacactgtaccttacaaattaaaaatatactttttaaaggtcaacaaaaaattattgtgcttcacatttttaaaacttacccttcttgtagtatagtttgaagtcaggtagcgtgatgcctccagctttgttctttttgctcaggattgtcttggctatacgggctcttttttggttccataagaaatttaaagtagttttttctaattctgtgaagcaaatcaatggtagcttgatggggatagcattgaatctgtaaattactttgggcagtatggccattttcatgatattgattcttcctattcatgagcatggaatgtttccatttgtttatgtcctcttttatttccttgagcagtggtttgtagttctccttgaagaggtccttcacatcccttgtaagttggattcctaggtattttattctctttgtagcaattgtgaatgggagttcactcatgatttggatctctatttttggtgtatagaatgcttgagatttctgcacattgcttttgtatcctgagactttgctgaagttgcttatcagcttaaggagattttgggctgagacgatgggttttccaaatatacaatcatgtcatctgcaaacagagacaatttgacttcctctcttcctatttgaataccctttatttctttctcttgcctgattgccttggccagaacgcccaatactatgtagaataggagtggtgagagagggcatccttgtcttgtgtcggttttcaaatggaatgcttccagcttttgcccattcagtataatattggctatgggtttgtcataaatagctcttattattttgagatacatcactcataagtgggagttgaacaatgagaacacatggacacaaggagtggaacaccacatactggggcctgtcggggagtggggaagtacaggagggataacattaggagaaatacctaatgtagatgacgggttgatggatgcagcaaaccaccatgccacacgtatacctgtgcaaccaacctgcacgttctgtacacgtatcccagaacttaaaagtgtaataaaaagaaataaaatttatcctccaagtgaaattactataagaagataaatctaacctataaataaataatcgactatttgggaaagttaataaacttctcaacacacaatagaattaaggaagataggctgggcgcagcggcttatgcctgtaatcgcagcactttgggaggccgaggctggcagatcacgagctcaagagattgagaccatcctggccaacatggtgaaaccccgtctctactgaaaatacaaaaattagccgggtgtggtggcctgtgcctgtagtcccagctactcgggaagctgaggcagtagaatcgcttgaacccgggaggcggaggttgcagtgagccgaaatcctgccactgcactccaacaggaaattaataacaaaaaagagacagagagggtgtggagagagtgtgtgtgtgtatgtgtgtgtgtgcatgtgtgaaagagagactatgggggtggggagtgtgtgtgtgtgtgagagagagagagattatctctgcttcttttgtggaaaagcagccccgcckcctcctgctgatcagagtatatgaatcctgccccagtggtgatgtatttcttgtcttttggttactggacccaaagaatctaaagcacccaacccataacctttagagaacaggacttgcctgccttccagatcccagagctgcagtgatgagaagcacaggaaaaccttagaagattattgggagcatttgtaactggggacaytcctgtttctacctctcagtttcctgtagattcttcctatgaagaactactatataaagatctgtgattgaatatgtataaaagatgatgcctcctgctttcagaatgtctcttttggcatagtacctcctttgcatcttgagaagatttccccagggctccatgagtccaactgcggcttttttttttttttttttgagacagagtatagctctgtcgccaggctggagtacagtggctcaactgcaacctccgcctcccgggttcaagtgatccttctgcctcagcctcccgagtagctgggactgcaggcgcccaccaccatacccgactaatttttgtatttttaatagagacggggtttcaccatgttggcaaggatggtcttgatctcttgacctcgtgatccacccgcctcggcctcccaaagtactgggattacaggcgtgagccaccatgcgcggctggaattaagactatatatatattgatttttttttcttgaaatctacatggatttaagaatcattagtatattgaacgggaagaaacaagatggcggctgaaggtgatccagagtggggccccagcgattcggattgagccttctccctccacccgcttcggcaggccgggtctctaccgcccaggcgcccggcccctcgggcctcctcgtcaggccccggcgctccccactgcctccactgcgcccgccgctcctcgtccgctttcccttctcccccagtctcagccgccgccgccgcacacgtccgaacccatcgggggctcagctagcggcaacgcagtagcagccggggcaggtgggccgccgccaggatgaggtggcgcccaagacgcggctgagctcggccagggtgggcagcagtagttggcggaagctgccgctgccttccgcccccacacacgcacaccacaccacacacaccagcgcccctggcggcggcggcgggggcggcggggctggggcagccacctggcgtgcaccaccgaggccctcggccgttaacaaagtggtatacgatgacctcaagagcgaggaggaggagtacggcgacgctgaggagacccaggagtctgaggacaactaggaggatgagatggaggaggacgacgatgacttcgattacccttacccggaggagctggaagacgacgaggaggactccagttactgcagggaaagcaacttcaggagccatagtacctacagcagcacttcaggctggaatgcaatgttgcgatctcgcttcactgcagcctctgactcccaggttcaagcgattctcctgcttcagcctcctgagtagctgggattacaggtcagtttctctccctggaaggaagagtattctcggatttcaaaaaaaggaggaagagttcaggctgccagaagtggactagcacttctgaatatccggaggcgaggtctcctgacttccttgggaagctctgcagtgcccccaccccaccctaccccaccactgcaggccctggagtcctgggaccacccaggtctgcgacccaaatccttcctcgctaaggggaggggagggggttccgggggggcgggatgggaaggggtgcttggacaggattgtgacataagattgccatggtgacatggagcagatttagacccgagcctaataaaggtggcattaaataaaggtgtcataaagacagggcagggcgcacgcttataagggacacgagcgtttcggggctgccagaatggctctcgctcactgcgcggtgccagcatgtgtcatgtcccggctgtgtttctggggcctatggcccctgctyacgtggcaactattgtggctactagtcaaggaggctcagcctctggagtgrgtcaaggatctgytccagctgacctctaacccccgggggccgcctgagccctggtcttccgctcctcccatctcccatgggaatctccccatgcccctattgccccagcagatccgggggactttgattacctgrgrccctctgcttcctcgcagatgtcagccccaccccaggaatyaactgaaaatttggttccattcctggacacggattcagctggagagctgcccctagggccagrgcagttctcagttgcacaccaggatttcaatgacaagctgactctgcaagaaaggctcccagaggtggttccaatgctggacagggatcagaaccagaccctagttcagcctcctcgcctcaaaagtaaggttcaaactgcagatctagatggggctgcaggtcatcaggcagatgaaatacttgttccactagacagtaaggtttcaaaaccaaccaaatttatttattgtttgtttcacccaggaacctgaagaaagatctagctcagcattggagcattgctgatattgttggaattccacagcaattatccaaaccacagcgttagaaacagactttgcaggatgaatattcgagtatggatacacagtatcctggcagcctgcctccagaactccgggtgaactcagatgagcctccagggycccctgagtaagttggactttctcaattccatctagagcctgaaactcaaaatccagagacccttgaagatatccagtcctcttcactccaggaagaagccccagagcagcttccacacctccttcttcaacccagcaggaggccccagctctgcctccagagtcctctatggagagtctagctcaaactctaccaaatcatgaggtgacagttcaacctccaggtgaggatcaagctcattataacttgcccaacattrcagttaaacctgcagatgtggaggttaccataacttcggagcctaccartgagaaagaatcttcccaagsccagcaggaggctccagttcagtttccagaggaggtggaaccttctgcaacccaacagtaggccccaacygagcctccatgtcatcctacrgagcgtgaactttccattagtgagcaggagcagccagctcagccttctgagtcttctggggaggttgaatcttctcagactcggcaggagaccccagctcagcctccagaagagatggaacctcctgcaaaccaagaggaggccccaactgagcctccaggtcctcctgtagagcctgaactttcccccagtgagcaggagcagccagctcagccttctggggaggttgaatcttctccagcccagcaggagaccccagctcagcctccagaacatcatgaagtcaccgtttcacctccaggtcaccatcaaactcagcattcagatttgcccaatgtctytgttaagcctccagacatgcagctcaccrtagcaacagagcctagtgcagaggtgggaacttctccagtccaccagraggctacagctcagctctcaggaccaggtaatgatgtagaacctcccactatccagcacrggggcccacctcttcctccagagtcaccggaagatgctggacctttagcaattcaacaggagacttcagttcaatctccggaacctrttaataatgagaacccctctccaacccagcaggaagctgcagctgagcatccacagactgctgagaagggtaagtcttctctaacccagcaggaggccccagctgagactccagagctccctaatgtagttgtagctcaatctccggaacattcaaacctgactcaagccacagttcaacctttggacctggggcttaccatcactccagaatccacaacagaagttgaactttctccaaccatgcaggagaccccaactcatcctcctaagaaagttgtaccccaacttccagtatatcaagaggttacaattccaacaccaggtcaggatcaggctcagcatccaatgtcacccagcattacagttcaacytttggacctgggacttaccatcactccagaacccactacggaggttggacattctacacccctgaagaagaatgtagttcctccaaagcaccctaaggtgacacttccacatccagaccaggttcagactcagcattcaaacctgactcaagccacagttcaacctttggatttggggcttaccaccactccagaatccacaacagagattgaaccttctgcagccctgacgactacagctcctcctccagaacaccctgaggtgacacttccaccttcagacaagggtcgggctcagcattcaaacctgactcaagtcacacttccacctctggacctggagcttaccataactacagaacctactacagaggttaaaccgtctccaaccacggaggagacctcaactcagcctccagacctggggcttgccataactccagagcccactacagagactggacattctacagccctggagaagactacagctcctcatccagaccaggttcagactctgcatcgaaaactgactgaagtcacaggtccacctactgaactagaacctactcaggattcactggtgcagtctgaaagttacgcccaaaataaggctttaaccgcaccagaggaacagtaggcctccacaagcaccaacatatgtgagctctgtacctgcggaggtgagacgctgtcgtgtattgatctcagcccaaaacagaggctctgccaagtgcctgtgccagagcccracacctaccatggcaccttcaccaycttaaatttccaaggaaactatatttcwtacmttgatggaaatgtatggaaagcatacagttggaccgggaaactaattctcaawgaaaatwayttgactgaattacataacgattcatttaaaggcctgctatccctccagtatttagatttatcctgcaataaaatacagtctatcgaaagacatacatttgaaccactaccatttttgcagtttataaatcttggttgcaatttactcacagaactgagctttggaacatttcaggcctggcatggaatgcagtttttacacaagttaattctcaatcgcaatcctctgacaactgttgaagatccatatctctttaaattgtcagcatttaaatatctagacacgggaacaatgcaagtcccacttacaacaattgagaacattctcgtgatgactgttgaactggagaaactgatcttacctagccatatgacctgctgcctctgccaatttaaaaatagcactgaggctgtctgcaagacagtcaagctgcattgcagcagtgcatttctgacaaacaccatacattgtctgaagaagcatctgtagagaatccaggagtgttcatgaaggtgttacaagcccagaagaagcacacgagcactgagctgactattgagccggaggcagcctcagacagcaatggcatcaatttgtcaggctttgggagtgggcagctagacaccaatgatgagagggatgttatcagtrcactaagttacatcttgctttatttctcagcggtaaatctagatgtgaaatcaatgttgttacccttcattaatctgctttcttcaaatgtgcaagatggagataggctcctgggtattttgaataacaatacaaagagcccctctcttcaacctgcatccaacaactcaacttatgaaaataaattgagaaagctgtatttgctggaaagtatgttagatgcagaaatacaagaaaaaattgatgaagttaaaagggaagaaaaaactgccatgcttatgcagtccagccttctaggtaacaaatttaaatgccaaatatttgaaaagaaattagaaactatctaaccacaggaaagcagcctggcaaagattcaaagtgtaggcaaaaacctgcagagagtgaacagagtcctcatgggcccaaggagcatcttgaaaaggcacttcaaagaggtggaaagcagaggatcaggagggaacagggtgcccaggcatttgcagagaacgctgccaaagaaaaaaggctcgggagtccagccccaagggagctgagacagcctcacatagagcaggggcctgacaagttagtgggaaacaccatctacaccaagccttcrttcatccaagagcataaggccgcagtctcctctgtgctgaaacccttctccatgggtgtgccttctgcctccacccctgcaaaagccctacctcaggtcagagacagagcaaaagacttaacctacaccattttcattttagaaaatgcaaaggctagagttaaaaatatgaaggctgctaaaccaatcgtacatyccagaaaaaaatactgctttcataaaacttgctcccgcatggcccacagaacactcaaggccaaaaagagtccaaagttcagaaagaaaaattacctcattagactgatgctcgcaaagaggcctccattctctgcagtgaagagcctcataaattccctttcccaaagggctttttcatctttaggagacccgagtcctcaggaaaatccttttccagaagtatttgctccttcagaacgttttatagaaaacactaatgtaaaaaacacaactgcaagaaatgcctttgaagaaaacatttttatggaaaacactactaggccataaggcaccatctctgaaaacacaacccacaatcatcctcmtgaggcagattccgctgggactgcattcaacttagggccaactattaagcaaactgagacaaaatgggaatacaacaacgtgggcactgacctgtcccccgagcccaaaagcttcaattacccattgytctcgtccccaggtgatcagtttgaaattcagctaacccaacagccacgttccctcatccccaacaacaatgtgagaaggctcatttctcatgttatccggaccttgaagatggactgctctgagacccatgtgcarttgacctgtgccaagctcatctccaggacaggcctcctgatgaagcttctcagtgagcagcaagaagtaaaggtgtccaaggcagaatgggatacggaccagtggaaaactgagaactatatcaatgacagcacagaagcccagaatgaacagaaagagcagaagtcgagtgagctcacaaaagaagttccaggatatggctataacaacaaactcatcttggcaatatttgtgaccgaaatactaacgactttgattataattttttgcctcattgagatttattctcaccgatggtcatcacaagaagatggagaaggattctcaaggggcattttcagatttctgycacagaggagatgctcttcacgaagtgagactcaggatgaatctttctcattcagacagccactctggcttaaagatatgtacaaacctctcagtgccacaagagtaaataaccaggcatggaagctgcacaagaagtcatctaatgaggatgagatccccatctgatgaggacagcgaaaccccaacagagaasggggaggagagtgaagccctgccacgggaggagaacacrgagtgaccccagcccacctcaggcgtcctgcaaaaatacttagcgtaaacaacaagggccatcagaaagaaaagcaggactgaagccagcggcccacgcatccacagaggcagccggcggaggaagcacagggccgtcgttccctcctttgtttcccagtctaattaatcacccagacctgaaaacatatcctcagggggtggagattttacaattaaataccattgttcttggtgaaaaaaaatcattagtatattatatattgtgcactaacagtgacatagtagaatttctttatcatcctgagaagtccacaagacactggaagaatagactaatctacttgttcagttttcttaactttcaatgtatctgttttgtctttttgtcttaattttatgcatagaactgcagtgattctaactaaagtgaataataattcaagaagcttaggctcttttaaaaacacactcatgaattctctatttaacatgcctcaatttagcaatttagtcaaaagtaaatattttccacctttatggtgattctgccatttccaaattcttcctcccaagtgctctcaattttgttgtgttgttttttttagaaaaaagtatcaccacagccctgttcaaatttaggtaatggctctctaaagcctccatgataacgtctgaatttctgacaaggtgcctccaagttttgttccaaattctcatctcactaatttttgtcatacattctatgttccttccaaatcctctttatctcccaaaactctgttcctcctctgcctttgcatgtggtctatgtggaatgcccaacttttttttttttggtaatgacagggccttgctctactggccaggctggagtgcagtggtgtgatcataactcactgtagcctcaaactcctgggtgcaagcgatcctcctgccttggcctcccaaagtgctcagattacacatgtgagtcactgtgcccagcccacctctttcccacagaatgtatcctccttgttcctcaaggtcagtaaatatgcttcatcctctctaatattttctggtcttctccagaagccaggatcaggagtcactatacctcctctgttttccccaagcactttgttaacaaatctttcatagaattcattgcagtatatgatatgcattggattatattgtattataatgttatattactgcatctttttctccacattgtaaatttcttgatagagaattttctttattcatttcatgtctaacattgtatttcttgtcatgtaataagcaataaaattttgatgacttgaatgatgtgagaaaataagaaaaaaaacagacttgacgattacacaggtgtatgtcttatttttcattcggcataacttctgcctgtattttattgataaccttggccttgaatatacataagtggataaaatgtctcatatttcggagtaggttgtagcaaattaatcatctaattgcttgtttatactgttcaatttgatcatcacagtttaggtctctagcaagaagaaaaagaagactttcacgtatgtgacaaatacataaataggatacaaatcggatttgttaataatcggaatctgttaaaaacaagataaatttttactgttttgtgataataacaaagtaaaatgaattgtgttcctagggtttacttacaaattaaacacactattaccactttattttccaatttcatctctttaagaaaaaaaaatgtgttactttaaaatgatctatgagtacaattttatatggaaagggcaataacattgctttcaatgcaaatagaagtttattattgcaagggcaactgttaaaaaaaacttcttattcacaacaggctgtgtgacataggcctttaacatggggccaatgtcgctaagaagttgaaaatacagtattacaaaatcagtagaaaacaagcaacaaaacaaaagtgtctatcttcttttctttgtccaacatgtttgggtagtagtattgaaggagctctatgacaagtgcaaatgattgtaaaatgaatcagctctgctcagcatatacacagagactataaagttacttatgcaaatatagctctactgtgttaattgccacaggacttagataggtatggcagaaagatggccagatttagatgacctagacactgatgtcacactaaactcttggaattggcttcttggctttcctctctgacaagtgactgaaatgggggtagggttgaattttatgaagatgtgacacttaacccaccacacacacgcacaaattattgtatttccttcttcgtgcctgtgttatggcctgctaatggtatactttacttgaatgaactcatgtgctccaaattttctgtgggatagagattgatcatattccccattttaaggaaattacagcttgaaaaaactaaatagtgtggcaagaaagctagtaagttgcaaagtcagggatggtcccaggattctgtctctggagactgtcctttccaccccaccacacatggctgctgatcatcgagacaggtttccatgatgcacaggatggtgggtgaagtgggtggaggcaagacatgttcactacactcacacctgtcatttaccagcaaatcagccatggaaagcaccacggtccttaaataaatgacccctgctgggacttactttagatagccgacatgtttgaagcagccctggctcacaccgaggcctgaggcctccgtggagactgcgcatctgcccattggatgtaggagagcctcccagcacatgcagtgggcatgccctgcagagcgcatttttctcattccacagagcatcgatcttaagacagatcatcctgaactgcccttaaagctgagggcaatctgtccatccactcacacatcacttaagagacagaaagaaacttcattctctctctctgtgtgtgtgtgcgcgcgcgtgtgtgtgtgtgtgtgtgtgtgaagtcatttccttttcctctctcccccgccaaggcacctgctcagcacactttccttttcgctttttcctcctgggcagtgctcatcctccctgcctgattcagattcttccctggtgctgctgtccaatatttattgctcagctaagtatcaaaaaagaggaaatacaaaaatcttgaaggctactacatgctaggtaatttcacatactttattggagaaaacgaaatttttcagagcttgtttcctgacgcagtcacacagtgaactagcggcaaatcc

SEQ ID NO: 6764 - DNA, 148764 bp, Homo sapiens
  misc_feature (1)...(148764): n = A,T,C or G, or insertion/deletion polymorphism (see Tables 1-2)
taattttaatattaggatttttgggagttgaatcatgcattatggaagtttctttctttttggattatggaacaaatctttcttttcattcattttctgtggttgtttattaaaaataataactgcacagttatctatatactttaatccatctgtataagtactgcctatgtaattatttttagttaccgatttctaggaaatacagtcattaggtagactaacttcctatttctagatagggaaatattaaaagggtcacttagcatagagtttgcatctataccgtgttattaggtaatgaattctgttctgttttgtgtaataatttatgaataaaaatattttgtagaacccctgttctagactttgcctgatatctaatattcttggtcaactagtgttgtagttttcctatgaagattggacttttgcatttgtataggctgaaaggaaaggagtatatatttaaaaagtagagaaatgttggttaagagaagcaaggacaatactcttgaccttaccccgtggcattttctgtggttactcatctgcacttgtaaaatgagtgaatcctggatttcttggtgtgcctttggaagttttgtaagatgagactgagggagagggtagagtaaggggtctggagtcaccatcattataattttctttgagagacctctgggcaaatgtgatttttcatcaaggctctgggctttcctgaagctgactacgttctgtgcacatggactttttctgcttgttcctttgctgctacttggcagctcaggccttgccctttgaagaagtagcagagtgctgctgatggaagcaaagttcaaaagtaaaatgatagtaaatatacagaggcagtcagccaattgggccaccgaaaagatgaaatgagatgattgtgaaagggagtcagagtgttctgcaaatgtagttattcatggttattcatactagtagcagcaataataaagtcatagaaagatagttgccctgagcctcagcctaaggcacctgggagagagtccccaccacttcattctccaccagggttgtggcgtgtcttgttgttggatttatgtgtgttctgcaataatttttaaatcatatttcatttttctaatgtaaattttttaactaaagaagatacatttctcatttgataatacattttcccttaaaatagctgcactttaatcttgattccattagttaacagaaatcatttagaatgtttgttttatgtattaacctggttagtacaggacagaaaaaaatatataacacaagaagttatacgattagcaaaatacatgggaaggggttcgttcttagggagaattaaaaatgggaattaggccaggcatggtggctcacacctgtattcccagtactttgagaggttggggtaggccgatcacttgagcccaggagttggacagcagcccgggcaacatggtgaaaccccatctctgccaaaaaaaaaaaaaaaattcaaaaacaattagccaggcaaggcgatgtgtgcctgtagtccccgctactcaggaggctgaggtgggaggatggcttcagcacaggaatgggaggtgcagtgagctgtgatcctgctaccacacttcagaataatagtaatattggatgcagtaattccttaataaatatgtttaagtgaagtaccaatgaatatctaataaatgaaaaaattaaaagaatgagactggtgaaatgccctaaatggtagtttgttttttgtttgattgctttttaccaaatgaaaatagttttctcatttttttttctgattgtaaaaataagtagtcacttagaaatttcaaacaagacagaactgtatagaaggacaaattaaaatgaccccaaatctctccatcaagagggaaccactgttgacattttggtcagtatcttttttattattactattatactttaagttctggggtacatgtgcagaacgtgcaggtttgttacataggcaaacacgtgccacggtggtttgctgcacccatcaacccgtcatctacattaggtatttctcctaatgatatcccttccctagtcccccaccccctgacaggccctggtgtgtgatattcccctccctgtgtccatgtgttttcactgttcaagtcccactttggtgagtatcttttaaaacagctttcttttcttttctttttttccttttcgagacagagtctcgctctgtcgcccaggctggagttcaatcaatggctcgatctcggctcactgcaacctccgcctcccatattcaagcgatttcctgcctcagcctcccgagtggctgggactacaggcacccaccatcatgtccggctaatttttgtatttttatggagacagggtttcgccatgttggccaggctggtcttgaactcctgatctcaggtgatccgcctgcctcggcctcccaaaatgctggggttacaggtgtgagccacggtgcctggccttaaacagctttctgtgaagataaacacaaaattaaattgttactaagatagataaatgctgtctgcaacctgaacatggaggtatactgtattcggtttaaccaactgtgttaagtgatggactcagcttctttgaattttctagtagtaaacaactctaagaacatccttgaatatgcatccatccacactcgaaaaagtacagcctggaagaaataatgataagtagaatgtctagcaaagaatatataaattttaaattttgattcataagggcagaatacattccagaaatacagaaatgtacagttccaataatagtcattcactgttttcttatatcctctccaacatttgatattatcaatatatttttaaaattttaatgagataaaaagacttcatttttaaaatttattattactgagattgttttttcactgtttttgctattagcatttttctagttgctaatgcctcttactaacttttattctatttttatttttacttttttgagacagggtttcattctcttgccgaggctggagggcagtgcccaatcacagctcactgcagcctccacctcccaaggctcaggtgatcctctcacctcagcccccacgggccaccacactcagttattttttgtatttttagtagagatggggtttcaatgtgttgcccaggctggtcttgagctcctgggctcaaaagatccaccagccttggtctcccaaagtgctgggattacaggagtgagccactgcacccagcctcttactgacttttcaatagggatgcttgcttcttattttttagagctaatcgcatattgggaatattaagtctttatacatgttgaaaatattttcccagcttatcactgtttttcaattttgtttaaagtatttaaattttttttacataagtatattttaaatttttgagtagttacttgtatttcctggattttatggcatgcttgaaaataccttctccacccatatgttaacagaggacagggagaggtgaaaaaagagaataatatatagatagacattttacaatttataaagatagggaaaaaactcaatttatattttaatcaaatcacaacaaaacaaacaactacaaaacaaaaattctgagcctttctggataaagaaaattgaaccagataaattttgaaggtttttatctcttctgggatggtaccaatacctggagaaatgcttttactgattcaacaaatatctgttaagtatcaggcactgtgctttagttttgactcagaaaaaaaagcattgattctgaaaataaagtaaaattactactgccagcaaagagcttacagactacaatagtcatgtatgtacaaggcacagcaggagcctagaacccgcctcccttctttatcttattctacttctaaaacataggaggaacagttggcaaaatgctaaaaattctaatttcttcaaaaatatttcttatgatttcaagagaacatacttagaagagccccaaagtcccttcttctgcttctgcatccacagttacttccctgagaggaggcaatgttgcctttgagacattgactgggctgtaatacttaaacctgtaatcatgtttgatgccaggaaaatgttttcaaaactctgcactatttaaccagccaagacattttgtgaaaaatatttgtgaatgatttcatcaagagatactcgttcacttgaagtaacagatgaaagcatttgaaaatatttggtcatcttaactctgtgtatgtgtgtgtgtgttgagtgtgtgagaatgaaggtgcatatgctcatgtgtagcagtagaattttacatataatcatgttttgaagttaatacactttctgtatttgattttataagaaagaatgaaaggacataagaatctatcttggcagccgggcgcggtggctcatgcctgtaatcccagcactttgggaggctgaggcaggtggatcacctgaggtcaggagtttgagaccagcctggccaacatggagaaaccctgtctctactaaaaatacaaaaaaattagctgggtgtagtggtacatgcctgtaatcccagctacttgggagactgaggcaggagaatcacttgaacctgggaggtggaggttgtggtgagccaagatcgcgccaccgcactgcagcctgggcaacaagagcaaaactctgtctcaaaagaaaaaaaaaaaagaatctatcttaaaaatgaatgaaataataataatcccttattattttaatagttgtttagaaattattttacctttattattcagtcttcaccaaagcctatgaaataagcaccaatattttcattttacatgattgattaaaaaatatgactcagtgtgattaggtaattgaagttcaaaggtaaaagtaaagccccaagttcattgctgtttccaccacactacatcacactatgctaaatgcctgtctaacctgtaaaaggaggtttagcaagttagttctcagctatctaagctctgtctttatcatgatttcatcggcacattgtggtagaaggaacatgaactttggagtcaaatactgttcagtttagcctaaagctgcctccttgtaaattcagcctaaaggtttctctggacatagtgaattgtaacgtaacgggatgtgtgaacagactgtaatctactcttgtaccaaccaccaagtttcagccagtcacaggcgaccaactattcagataagaccaaagccaagctcgaatcaatccagctgttgatgcacctcacttcgttcctttctctgtacatcactttgctgttttctgtcagtaaatcctgcccaaccacatcacagagccacagtggctctgaacctattctagttttggaattgtctgatttatgaaggattccttgcttaattaaacactgttggatttcatttgtttaaagtttttcttttaacaatacctaggtttgaattccagttctgccacttactagctgtgcatatttgggcctaaactctctgccttgccttcactaggaaccttggcaatgataacacaatggagatttgttgtgatagctctggcaaataacaggtgatcgagaatgtctttgagacatagactgaactctcctgggatgctgtcaagagacacacaattgacttgggcaatgtaagaattgtgggcaatggggccctggacatataggcaagagccaataaataggagtcagtgttgagctttgcactgatccacatgcagagaattggtatttggccatgattagatttttctcatctctgattctcatattcacatacgtctaggaggcattatatcaagaagacggaagtggaatcttgggaacatgagagaaaagtaggaatgacacttgtgaatactttttacgaaggccaaagtgagtttatctaatcctttttttttttttttttttttttactctttatagccagtggcgtctgtgtctttaaatgcttactcaacagagacactgagtgttgctgtgtgtggaaggagtccatcttgatgactctggggtacagcagtgctttactgaaggttgagtctcatgctggtaagttttgtgcatatccaggccctctgtcttatccaaagaagaatctcctgattcttctcactttcagtggttactgattagttggcttttgaagcatgtttcctgataccagtcaattctcatgcattgatgaaatgattttaagctggtcttggtacttacttgataccatagctagagaaaaatcaatcttttcctagagtatgagaatgtttttattcttttattattattattattatwataatactttgagttttagggtacatgtgcacaacgtgcaggttagttacatatgtatacatgtgccatgctggtgtgctgcacccattaactcgtcatttagcattaggtatatatcctaatgctatccctcccccatcccccaaccccacaacagtccccttcctgtgtccatgtgttgtcattcttcaattcccatctatgagtgagaacatgcggtgtttggttttttgtccttgcaatagtttactgagaatgatgatttccaatttcatccctgtccctacaaaggacatgaattcatcattttttatggctgcatagtattccatggtgtatatgtgccacattttcttaatccagtctatcattgttggacatttggcttggttccaagtctttgctattgtgaatagtgccgcaataaacatacgtgtgcatgtgtctttatagcagcatgatttatagtcctttgggtatatacccagtaatgggatggctgggtcaaatggtatttctagttctagatccctgaggattygccacactgacttccacaatggttgaactagtttacagtcccaccaacagtgtaaaagtgttcctatttctccacatcctctccagcamctgttgtttcctgactttttaatgatagccattctaactggtgtgagatggtatctcattgtggttttgatttgcatgtctccgatggccagtgatgatgagcattttttcatgtgtcttttggctgcataaatgtcttcttttgagaagtgtctgttcatatcctttgcccagtttttgatgaggttatttgtttttttcttgtaaatttgtttgagttcattgtagattctggatattagccctttgtcagatgagtaggttgcgaaaattttctcccattwtgtaggttgcctgttcactctgatggtagtttctgttgctgtgcagaagctctttagtttaattagatcccatttgtcaattttggcttttgttgccattgcttttggtgttttagacatgaagcccttgcccatgcstatgtcctgaatggtaatgcctaggttttcttctagggtttttatggttttaggtctaaggtttaagtcttcaatccatcttgaattaatttttgtataaggtgtaaggaagggatccagtttcagctttctacatatggctagccagttttcccagcaccatttattaaatagggaatcctttccccattgcttgtttttctcaggtttgtcaaagatcagatagttgtagatatgcggcattatttctgagggctctgttctgttccatggatctatatctctgttttggtaccagtaccatgctgttttggttactgtagccttgtagtatagtttgaagtcaggtagcctgatgcctccagctttgttcttttggcttaggattgacttggcgatgcaggctcttttttggttccatatgaactttaaagtagttttttccagttctgtgaagaaagtcattagtagcttgatggggatggcactgaatctataaattaccttgggcagtatggccattttcacgatattgattcttcctatccacgagcatggaatgttcttccatttgtttgtatcctcttttatttcgttgagcagtggtttgtagttctccttgaagaggtccttcacatcccttgtaagttggattcctaagtattttattctctttgaagcaattgtgaatgggagttcactcatgatttggctctctgtttgtctgttattggtgtataagaatggttgtgatttttgtacattgattatgtatcctgagactttgctgaagttgcttatcagcttaaggagattttgggctgagacaatggggttttctagatatacaatcatgtcatctgcaaacagggacaattcgacttcctcttttcctaattgaataatgtttttattcttagccctccttttggtcttccttcatcctaagctgcaggagagactaccaaaggttgtccagatcttcaccactgttgtcaattctccttgaagatgaggttgtttgcagaaatgcgactttcagtttgagyggtggtcagaatgatttcatcctgtttttgtctttgaatcatttactgagcattttttgactctgggcaataaaaatcaagcaacagagaagtaaattaaagtgtaactagaagtattttaagaaagtactgaaccaccctctgaaagatttccagcctgataaagaaaattagaactaacagtgccttgggtcaaccttggatggttgagtgtcatttctttaacttagatataagttgttccatctcacatatggtgttaatccacatacagtgtaaaatgctagcaatggtatggattcttctctggttaactaaaatatccaaggctcttttattattaactaccttgggataaagaagttaaactgatttctaaactgactctggagtcagccagagtgaggaactttctttatcatatatctatccatacatctgtctctgwatccatcagtctaccttatctttaatymtgaatttcagagtaaattttaatagtcagcatgtttcacccccgtatattgtgcatatcattaattagaattcaaaatttgttgatgatttttatttgtttctattgaggttaaatttacaaattgtccattgaagtacacaaatcttaagacactatcgttcctgaaaattacctcatgccctttcccagtcattccccactgccattctgccaggggtaatcatcactcttctgatatttttcccaccatagagtagctttgtcttttctagaacttcctataaatgaaataattcaatatatactctctttattaaggtcactcagcatagtgttttcaggctcgtctgtgttgttacaagtattagcaatttgttcatctttcttgctaagtagtagtcacaatttgtttattctcattttgatggatattgaggctgtttccagattttgtctattatgaatatggctgctrtaaatattctcattccaatatatttctatacatatttttttcatttctcgagtcaaaaatctaagagtaaaattcctgggtcatasagtaagtgcatgatgagttttacaggaaatagccagaattttttttccaaagtggttatagcattttacactcccagcaacaaataatgaatgagagtwctggttgttccacgttcttgctaaaatttgctcttgcatgagatatgagttatatctcattacagtttcaatttccattttcctgatgtctaatgatgttaagcactttttcatgtgcttatgagttcaaattgtttgcctgttactaactggctgtgtgtccatagagtagttgttctgtatatatccaggataccacgcttgtatcagatatgtaatttatggatgctttgtagttgcttattcattaccataatgttgtcttatgttgagcagaagttttaaaatttgaagtctaattaatcattcttcttctttgtttattgctctctgtgtcctaagaaccctttgctactttcagtactaaatgatttgtcctatgtttccttctagaagtttcctagctttagcttttatattttaggtatgtaattcatctaaattatttttcatatgatatgaagtatgaggccaagaattatttttagttcatacagatatcccgctattctaataatgtttactgaaaagatattttcaagtcaaatgaccatataaaagtcttgaactttattctgtgcctttgattatccttataccaatatcgcattgtctggattacctttaaagtaactcttgaggtcagatagtctatgtccttgaacttagttcttctttgacatgattgttctggatcttttggtcctttgcatttctgtatmcatttataattaagttgtcaatttctacaaaaatgcttgatccgattataattgagattgatcartttggtgagaattgtacttttaacaatttattgaatgtattgagcaatttattgaaaaggcaaaagagagcaactgtccctgacagtttccaaattatagataaaagtccagtatgctaccatgaagtataatatttgttgtatttttttgtggatgatctttctcagattcaggaaattcccttctatccttagtttgcagaaaatttttatcattattaggcattggattttgtcaaacttttttaaaactattgatatgataatattctataactttggttaattgctttgaatgatgtgctttgtgtagaattgatattatttgtctgttaaatgtttgatagaatccacctgtgaatttattgaggcttgagattttattcatgggaatattcatggcaattctttaatagatatggggctcttcagattttcttcttgtttcaatttgatattttatatcctttcatggaattttccatttcatcaaagatgtcagattcattggcaaaattgttcataatttgcatgttatccttttaattttgtaagatttgtaataatttctgctatttgttttctgatagttgttattaatgtttcctctttttttctttgatcagcgtaggtaggggtttatcaattttattagtttctcaacaaatcaaatttggctgtattcgtttctctatagtttttctattttttatttcattgatttctagtcttatttttattattttcttcattctacattctttgggcttgctttgctcttttgttacagcttcttatagtgaaaacctaggtcactaacttcattcttttactttttctaatacagtttcttaaaaccattagrtttccactaagcatggattatctatataaccaaattttggtatgttgcatcatcattattattcagttcaaaatatatactactttctattgtaattacttctttgacccctgggataatgagaagtggtttaatttccatgtacttgggaatttttcgtatattttttggttatcgaagctggacattctaaatgttgtgcgtcaagtgtctggattttgtaaccttcctttaaggaatattgaggtttgctcaggtaggcagattacctagtataggtcagcttcattattctgaggcttatttttagttgtgctatggctaagaaatctttattccaggtccagtttagatatgctactaaagtgtgaacaaactgtgttttctgatgtatgtctgaagtgttcaacaaggtcttctcacactgacttgttggaactataaactttctccatgttatattatctctggsaattgttcagcttagaaaaattagagctccttgaagttattcttttcccatagaggtttttgtccacttgcggaaacttaccatatatatgcgctgcttagaatttatcaagctagaaactcaaggggagccttttgtagatattttgagctccttcttgatataactcctttctgtttgacaatccactgtagaaattccagcagcagcttcagcctccctgaatgccattctttgtatttttaactcagcaagaccattttgctctattttgcttcccacaccctacgctgaagtctggatagtgcctcaagacagaaaaccaagttaatcatagcactgaccttattggtttagcttcttttaaagatcacagtttggcatggactgttctccattgtgtgacagctattgtttcacatattttgcttagttttcttatggcaatgggtgggaaggtatggtagcagttaatgtcatgattatgagtagaagtcctccatatttctttgaagaaaaagagattcatacacttagaaccctttagatttggatgaaaagccagactcgatcaacatttccattcctctgtattctcattctgacacacattcttgcccgttcatgcaattgaacagagtcagaaacttctgctctctgagccaggcaaaacagtcttcaactcaaaatatttgcaaatgcttccttccaattaatgatagatcagcctttttgacttcgatattcctataatgtatgcaaatgacatgtttctattatcttcaggaatcctcctgtgatcttaaagtgtgcctccaaaatactgacyactgatacatagggctaccattacagaccatatcgaaaagccaattttttttggatcaagatttgtgaagaatctgagattttatcctatttgcaaggtaacaagttacattgccwctgtttcatggktgctgacaaaggacatagggatcctggttcagagataaaggctttattactcagagaaagagcattagccagagtgtcagcacattgtcagttctgtgagctccagttcccacaggcagatgcagaggccaggtggttacctatagatgtagtcagttgcattataggagaggaccactgaacttggagaacctgctattttatagcaagaagtaagaaagcctgctgtttattccagaggaagatgtcacttcatcccttgagattgcttgctgcatacataactctgagaaatagcccagacaaagagtggtcgaagtcttgcattcttggcatactcagcaagacaggtatgaatcccagtatgagactgacagagaaacgtctcccagcatttttgttccatgtggaggagggaaaagatactcttacgtatagacacaaacactgagacaatggtagtataggaagcttaattcatacatcagatcaaactagacacaaacacatacatgaacaatctttgtaggaaatacagacatggttgaggcaatttagaatttcctctacagctaagataaaatgatatttgtagtataagatattccatagtatacctctcttaataattcaattgcgacaagcctcacaccttgaaaaattatgcccccaccaacctggttatagagaagtaggtgcttcagtcattcaagatatcctgaaaactacagagaaacaacactgaatgaggataaataccagcctcagggcttttcacttatttgaggggaccagatatccattagataaaaataatttaagtaggcttgagacagaaatacaaccaggtattcggatagcaataaaccggaaataatttagaaacagactcagtgagagcaaaatcactctctcggttcagttagctgcaccccagaagccaaggaagacaggcctagttataaggggtttgtaggttgtacttcttgggcagtgcagcttggttagccctggtggatcagtccatgtggacatcttggtgggtcctttatgttaaaagtcaaaaaaataaaaaacatttttttaatactgagttttatctgcaacagtaaaacatatatgaaggaattctgccttcacaacaaatggctcccagataaagagagccatgtttacttatatttataggtcaaatataacatcttgcaatcctgattggattacatttgggtcagttttaataaaagcaagaaattcctatcttcggtaatgaaaatcaggataagccttatctcaggatgtgacttggaaggtcccagatggcccagatcccaggtggcagtggatcttgattgtcatttgtcagcctgggtgttgacagaaggctgtctacttatatcactgcctatcagatacaatcactgagttttcaagatgtgtgctgatttcctggaataagaggatgtggagtttgaaatgcaaggcttttgttttatatttagaaatgagtgaacagctgccaagtatctgwaacttgggtaaaaaataaatccaccttcactggggggttgacctgtgttgataattaggaggcactactaggaaagaaatgatcaaatatacaaatatgacagtgtgaggactatttcttccctctcttccttcttcagaattgtgactcagtgatttccaagcctgatttggtcatatgtcagataatctccagtaatctcaaatactggtatgaaatcctaaaaataaaatatattttaattcagtgtattttggaagcagtgggaatatttaatgagtgtcataaaaaaaaaaaaagagtctcactctgtcacccaggctggagtgcaatggcacaatctcgctcagtgcaaccactgcctcccgggttcaagtggttctcgtgcctcagtctcctgagtagctgggattacgggcgcgtgccaccacacccagctaatttttgtgtttttagtagagatggggttttatcatgtagtccaaactggtcttgaactcctgatctcaggtgatccacttgccttggcctcctaaattgctgggattataggtgtgagccaccgcacctggccaagtgtcaaaaatttttttaagttttttttttttaaagtttaattaatggacttacagtaatatctgtgaagcattgactatgtacttacaagatatctgcaaggttaattcctgttcatctatccattcatccastcattcaacaaatacttattgagagtcagttatgtgccaagtacttctttatgtgctgaagatacagcactgaagaaatagaagttcttacarttacaaagctgacattttcaggaagggacacagacaataagcaaataaacatatagtgggttacgtgcgataagtgtggaaaagacaaaccagaataagaaacagagaatagctgggaattaartcaatgtactacatataggtaattttggagggggtagcctcataataagatgacatctgagtagaaaactacaatggggatggggaggagccgtgtgcatctgtgctaagggtggtccagacagagggagcagaactacaargcccttgaagcaagatgtgttcaaaggatggaggagaaggcaggagacaggatcagattgctagaggcctggtcaggtgagacactagggaccataatgaggactttagctatgttttgagggagatgagaagctttggagaacttgtagcaggggcttgacatggtctgggaatgatatcatttttatatactttttaaaggtacgcatttataccctctctcactgtaattctcatagcagayccatgaggttggtatatttcattattcccatttttcagcaaagacactaaggctcacaamtattaagaaaattgcctaggtgacaaaaataaaatacaaggccccttctctttctatgtcctccagacttccccttcacctttcattgcattggctgctgccgtctaacgtagaaaactcatgtcattatatgggatgatatcaagaacatgggaaaaccaacttttatcaacgtttcactaactgtcaaaaacaaatagagacaccggcagacttcattctggggacttatgagtcatggaaagstttcttcaggaatttgaaaaattttcaaacttacagaacagttacataaacataacagagaacttatgaataccctttaaatagattcattaatgtgtagtgttttgtcacattgggtttatctctttctctgtatgtgtgtgtgcacatatataatcacataattttatttctgaaccttttgagaataatttgcatatgacacattcctttaccctttgtacttcattgggcattgcctgtgaataagaatattctcttacgtaaccatagtagagttatcaaattcaggaatttaacatttatataatatttgcttgatctatagcccatagtccaatttcataaatggtcccaatttatgcctttatagcatatttttccctctccattactggatctggcccaggaccaagtcttgcatttagttgtcatgtttctttagtctcctttaatttgaaacagttcttcagccttttctttcttttatgacatggatatattcaaagaatatggaccagttatgttatagaatattccccatttgtgtttcttttctggtttcctcatgaaaagattagtttacacatccccaggcagaaaactacccaagttctattgtgtccttctcaggatatcacatcagggagcaccaaagcccatctacccctcattggttttgatcaccagatcaggatgttttccagttcctccactgcaaagttactcttctttccctgttagccataactcataagcaatctgtgcaaaagcactttgagatcccacaaatatcctgttcctcrtcatatagcctcctacctcaaatttagtatccgattgttatccattgctttggaaagacagttgatctttttgtgtgttagccttgtatcctgcaaccttgctaagtcacttagttcttatatgattttttggatagattcctagaagtttctacataagtggttatatcagctgtgattagagacagttttactttcttcctatcctgtctgtatgtctcgccttccttccttttttttctttttyttttttttgccttattgcatcagctaggtgctctagtacaatgtacaatgttgtatagaagagagtgagcatccttgcctctttcatgaactcgagagtatttactttccctcgtgttagctgtaggttttttttaaaatagatgccctttattaagctgagaaaggtctattatatttctaatttgccgagagtttctactttgaatgtatgtttcatgaaatgctttttctgaatctacagagatgattatatcatttttattttagtctgttaatatatggatttttcaatgctaaaacaaccttgaatttctgagttaaacctcattgtcatgatgtatgacccttttaasatattgctagatkaagtttgctagaattttataaatgatttttgtgtctgtgtttatttggtattgctttgtagttttcttaatgcctttgtggggcttgggtatcagagtaatattggccttataaaatgagctgggacatgctccctaatctttggggaactgtatagaattggtgtcatttcttcaaatatctcatgttttatattgataataggtcttatctttttattttcttgattagcctaacaagaggcttatcaattttgttgatcttttcaatgaaacagcttttggtttcattcatttttctctattttgtccattttctatcttattgattctttctctcatctttgttattttcttttctctgattactttgtttctctgattacacttctctaacttaagcttagattgttaaattctttcctttgttgtaatgcactcctttaatgctggacatttctttccacactctgctctagcaacatctcataaatttgggtatgttgtggtttccttgctatacagttcaatatattttctaatttttattgttattttctctttgacctatggatttattttttgatscatggattatktggggatgtttaatttccaatcatttggggattttccagatatctcttggttatgatttctagttgaattctttcttgatctgggaaaatgctctgtacgatattaatggtttcacatttgttggagtctgttttatggcccacaatatggtccatgttggtgaatgttccatgagcacttaaaaagaatgtgtgttttgttcttgttgggtggcgttttctctaaatatcagttgggtcaagttggttgatccctaatggttcttggtctacttgttctattaattattgagggaggagaattggaattacaagctataactgtttatgttttatgtcccttttccatatcatagatgatatttcattgagtatatgtgaagttatgcttcagacgattacaaaagaaggcaaaaagtaaaaactccaactttctaccagctgtttttcaatttttttcttctagcagctgtttttcaatttttttctcttatagggaaaactcatacttcatttaaacccagctggagcatgactgctgtatgcctctctgctctcagtatttattatagcaaccatcttctctggtccctgtttcctgctgagcaagtgcacaaaatatgcgttctactgaaagatttatgggtaaaataacatgatgtctggaattagctttaaaatgtacagcaaaaaaaaaaattccccaaaaggcacggcagtacagatgaattaagatgaaaaaaatcttaacaaattttaaatcttgggaataggattctgtatattaatctaactgtgtacatttgagatttttcataacaaaagttgaaaaaactcataatgcttgaaaagttcacaaaaacatgacttggggtatgaggagctacaaagaaaggatgtcactcatctacaagttgattaatctgctggtcgtctaaagtgtaatgatcaaaagtattggagctgccttgaaatactctcttaacaattacagtagcaagagcaggaggctggggtggctgactagtggaacttgagaatctttatagtttgcaatttgctgcatgtgactattagcttccaggtgaagtagaacatagttatttgttataggacacactgtgctcagcattaacatttgtatccccctctttcttcttcaaaatgcattcaaatctctcagctctcttaggagcatgaaaggaataaatatcatttaataaattaaaacaaaagaaaatgttctggcagcgtgccgtggctcacgcctttgatcccagcactctgagaagccaagatgggagaattgcttgaggctgggagtttgagaccagcctgggcaacacaggcagaccctgactctaccaaaaaaaaaaaattaaaagtgatccgggcatagtggtagtcccctatgccccaaatataatgtgtatagatattacatatattatatattttacatatataataaattatttatattatatattatacattttatgtatataataaattatttatattatatattatatatgttaaatatataatatattatttatattatatattatatataacatataatatatattatttatattatatattatatgtaacatataatatatattatttacattatatattatatgtaacatatataatatatattatttacattatatattatatgtaacatataatatatattatttacattatatattacatgtaacatatattatatattatttacattatatattacatgtaacatataatatatattatttacattatatattacatgtaacatatataatatatattatttatattatatattatatgtaacatatataatatataatatgaataatatatattatatgttacatataatatatattattcatattatatattatatgtaacatataatatatattattcatattatatattatatgtaacattatatattattcatattatatattatacataacatattatatattatttatattatatattatataacatattttatatataaaaataacatatataatataacatatgttatatatgttacatatataaattacatatggggcataggggaataccattatgcctagctgatttttaatttcatatatatatatagagagagagagagagaccgacagacagacacagagacagacagacagacagacagacagacagagacagagtctcactctgttgcccaggctggagtgcaatagtgtgatctcgtctcactgcaaccaccacctccggggcacaggtgattctcctgcctcagcctcctgagtaactgggattacaggcacctgccaccacacgtggctaatttttgtatacttagtagaaatgggggctttaccatgttggccaagctggtttcgaactcctgacctaagcgatccgcccacctcagcctcccaaagtgctgggattacaggtgtgagccactgcacctggctggcaatatattttacaataaaaaaaaaaaaaaatatatatatatatatatatatatacacacacatatatatatatatgtatgtcttttgatctgacttctaggaatttaacctaaacatattcataaatgagcaaaatgaaatttaagaaactattaacattaaatcattattcgtaatagcaatatactgaaaacaacaaaagtgttcatcttcaggcgatgggtggtttggaataccatacagctattttaaaaatttttacttatgaaaagaacttctagttcaattaaaattttctgttcttggctaaaattaaagcaagtttattacgaaagcaaaggaataataaaaaaagtctaatccataggcagagcagcggcatgagctgcttgactgagtatacttatagttacttcttgagtatatgctaaacggggtggattattcatgagttttctgggaaaggggtggatatttcctggaactgagggtccttctcttttttagacttaactaggggaaactgtttatactgtctgttactcagtttaagaaatatttattcagtgtttagaactcccagcccttcaggtactgtgctgggtgctaaggatgtaatattttattttattgattttccattttttgagcactttgtcaccagataagtgcctcccacaactctctcaacttctctttgtaagagaaacctccctatgcttcccagataaggtagtgatacctccaaaccagtttgattcatggaatctcaggagagtatattgcatcctatgggcccactgaccatgtatgaagaggcagtgtgctatattaaacccacctcggggaaggaaactctttattaataatttattgatgagacaatatattgtttgtccacttatagaatttccatattgggaaatttccatattgtgccctccaatgtagctttttacaaccctccctcctttctaaagatacacatacttggccttcttcacctatttatggcacctgtgtgaccgtgaaggacttgagtatgccacccctttccagggtagaccatggaagaacaggcaaggactaatcggtgtgctcaaggactatcatagtccacatggcaccttgtccaaattgggaagaaaaaaaccaaccttccttaagacaggttttttctttcatctgtcataaagttatgatatactgattttgttagaaaaatgaattcactgccatttgctaaagaatttataataaataaatctatgatgcttttgataaaaaaaaaaacatggtcccagggttgtgcaatgcacatcctgcacaactgtacatggctgtcttgtatatttaaattaagtatggtctgtatttcataaggaaacttatggaaaacttacaggctttcctgggcattccattaagtgatctgagtttggagcagatcattaaaagaacaaggaagatcacagagtgacagtaagatcacccttatctcattttctctttggttaagagaaaacaccttgttctttctaacaggcagcttttcagctcaaactctgttctggaccagtcttgggggtaggaggagcaaaatccagggaggaatggttgaatgggagaaggaaaccaaagtggaggagatttttgagaggtaatgtcaaggaggtaaagagttttttccatttggtttgtggccgctasaccttcttgcccatacagaactgaccctgggaagctgttctttctgggcctgaaaatgacttctctcattagtgattaatgttacctattcaggggtcttaagagagatggcccttcgactttcatgttctcagctcaacattcatttattccttttctattttttctttattcatctttttccttttatttatacaataactgtttttgagcacctactaagaaaaggcactattacagatccctgttctcatggacagaccatgttctaaatagagcttctgcccaagcagctgcttcagagaacccctctcaactgaagatacattttagtttgttccgattccatgttaaagtttatttttcattattatatttgagataaaaataaggctaatatatcactgttagcattttggtttaattattttcwgcatttttgttttgtatccatttttgaatagttgtgatcattatttaaatgttattttatattcaccatcttcatttaatgctctataataagcatattttcatgtttgttagactttatgacttcaaaaatatataaataatagtccacatgagaattcctgtaatttgcttaaccaatcgcctrwagtagaacatttaaatagtttctgcttttttctatcataaataatattttttctattataattagtagtagcaactttgaaaattataaataaatagacgtctttgggaggggtagcttttggatggtttcattcagatcartcctaagaggttggacaactctgccaaaggatatgaactttttgttttttgctctgctacatgctgccaaattgcttcccaaaacacatgttctgttttgtgatttatgatgattccagcagtgtttgaaagtatcatttcactgaaacctcataaaaattggacattggaagtttttaaatactgcctaattcagttgttctgaaaaaaaaataagtagatcctttaaatttgtatttctttatattctattgatgtgaaactgaggaggattttgttaacataccagaatttgatcttgggacactgggtggcatcatctctctgccatcgtgaaaccatctactcaggcagtggcggtcatcagagctgttcatgggcattcattcttgtctccttcttctagtcacatgatgagattacacttccctactccctcaagttaggcgcggacatatggcttgctttgtctaatgagtgtgagtgagagcaacgtgtcacttctggctgaagattttacacatcattgtgagaatcaccatgttcctgttttcttgcgtccatgatcccaggcactttctagcctgggtttttgggtgaggataacatgaagcaaaggccctacagtggtctgtgatggacaggcagaataactgagaagtaaatttgttctaggccactgagatttgaagattgtgtgttacaaagcacagccacctgtcctgactgatttggscaacatgaacagttcagttgcctgcattgccgtgccacagcactagggtgccaggccattgcaacactacagagcactgcagcagatcttggagtcaggtgcttttccaaacaaggaaagagttcagcggtatttatgtataatccattcaattccaagcaacaaagtgggtgacaacactatgccatctgccagctcaaattatttttgtcatctcagattaaaaattctgttttaatattcagcagggaaatgacttaatgctggttggctgcgggcaactttttaaaaatggcttttcttttacaacaggcccataaaagctaataaaaagagccagcatgtattgatcattcattatgcttcaggggccatgccaagcatcctgccaacataatccccttcatttcttttcaaaaggtcatggggtcagtgctataatcattgctggtttacagatgaagagggaggctcagagtcagtatctcttgtcaaggtcatttgatggttaatggaagtgccaggatttgaacaaagccacttgtaattccaggggctgtgtagcagccactgcacaataggggacacactggttcttctgaagctttctcaaggcctcttgtgtggcccatttgattctgccaggttgttgtcctttgctgctatcttctttccctatttcctgcctttgctacattggcaccaagacttttatcctatgcatgatttcatccatccaacactcaccaaacggacaccatgcagatgctagagacacaaaaatcaatagaacctagttcctgccctctaggagcttacactccaaccaacagaaatacaacataagccataaatgcaagccgcagaagtacatgttaaaataaccaaaagaaacaggtgaccttcctttaactaatatatttcatttaacccagtatctctaaagtgttatcatttaaatatgaaagcagtatagaaaattattaatgagacattttacattgtttttctttttactatgtttttgaaatctagtacattttattttgtacttgacaccccatrtgaattttgactagccccatttcaagggctccgtcacctcctgtgactactggctatcryagtgctcagtgcaggtcttgagggaaagataaaggcatagatggttatttcaaagtaatggggagagygatgggacagaagtccagcgggcattgtgagaccacagcaaagggacacttagcccaacctggaactccagggaagcttccagaggaagacacctgggctgagtaaaagcagaatgaggctcagtcatgaagggccttgtaggaggagccaaggagtatgattttctgtgcatgaccctcttcagctttacagtgttcttccaygtacactaggacatttgggaagagcagcggccctcaaagtaggcatttgtggtgaccaagactgctagttgtctccccgttctattctctccttccacactaacagaagtcctatatttttaggtgtggcaatgggtggagttaaaaatctgcacctcccagtgagccttgcaagtaaagacagtagctaaagttgggtagggtttctgcaaaatttccttaacacaggctaactcagagaaaaggtatgtcatttcttcattgcctcttcctgctgcttgctgccgggaatgtagacatgattkccagagctgcagcagtcactttgtgacttccaggcactctcagatggaaagtgtgctctaagcacatcrgagaagtatgcctttgccttgtycttccttgtgtctgcmtaactgtggaactgctgaactgtctaattctggacttctgttatgagagagaaaaataaattactaattcatttaatctactataattttggggagctttttgttgttatatgcatacaaatctaatcttgactcatatacaatacataactcacaaatgagctaatattaactatattaactcattttatagggaagttcataatattaactatcttagctcattttgcagggaagttcaccaaaaatctgaaaaattaagtgaccaaacaataatcatacaaggagtagtagtgtcagaggtaaaactcaagcctggggcttctggtccccaaagcctgtgttttacttattgtaccattttgttttccaaggaggtggtttctgctactctcttccctctattactgcacattttcaggatagctgtgcagaacagtggctgtagagtaccagatcaccatgagttaccctcctgtatggagcatctggtatgaactagtgtagtggccactttgtcccagcccctactaggacatgcgtggcctttggcttgaccatcggcaggaggtccataaaatatcggggcaatcatgcgaccatctcttccccttacctgagcccccaaaccctggccttcagggttcccttctgcttccactgggttctcttggctgagcagagagaaggttcaactgagcccttckcatcctgcaggtactggattgtgcaggcacctggcttgtacctctctctcccttcctgctatctgcctcctggctatggcattcctcaattaccatccctagcacagggtgataatactcaaatctgtcaattctgcaacttgtcagctgctctacagagggcttggtgggaaaggaggttgctgactcaaagctaaaygtaattttatatcatctgcagaactcagtcaaccgcaagacacatattgcttgcaagttgaccrcatcagtcaatggtttattgagcatcttcattgaccttcagaactaccattagctctatcctcgctgccaagaaatggcctgagccaactgcctggtgctgcctgcctcactggtttcaggtgcggtcaggctgtagccatggcctttggrataggatgtaagtaagctgwcctggcactcatcactccaggatttctctagccttgcatgtcaatctgtcttcacttttggacagaggagcatgtctgcctcttagtgcgtctggacctagagcagggatgaaaattttttttctgtaaagggtcagacagtaaatactttaggctccatgggccatgggcttagttgcaaccactyagctctgtcattgtagcatgaaagcagccayagacaatatgcgtagaaatgaatgtggctgtgctaccgtaacactttatttatggacactgaaatttgaatttcatatgattttcatktgtcacaaaatattattcttactttgattttttaaaccatgtaaaaaacatgaaaactattcttgactawtatgctatacagaaagagacaaggggctggatttggcctgtgggctgtaatttgccaatccctgatctagaagcagaggaatatggtggttaaaagggatggccttttgcaaagcctgtggatgtctgcaatcagctgtgtaacttaacgtctgctgcctcatctttctaatcttcagtgtcctcatttgtgagatggggacagttccaatacatagtacagagggctactggttgattaaatgagataatccagctactctgsaggatctcctgagcccaggagttcaaggctgcagtgagctgtgattstgccactgcactgcagcctcggtgacagagcaagaccctgtctcaaaaaaaaaaaaaaaaagaaaagaaaaaagaaaaagatgtatatcactcaggacactgtgaggctccactatgggcccagtggtgagcgaggcactctaggagatcaaaaaatgaaccagacacagctgcacactccccaggaacgtggtgtctagtagggaggtggccgtgtgccccaataattgtcacgcatggcagagtgagcttgtctgcaagagaggcacagcagtgacaatttgtcatctcactgtgtgcagtactgcttcctagggttttggaatgctcagggtgtttgctcaaagagacagcagacccacctgggactgccacacaagctcagtccttgcacttctgctaatctcctacagcccacaactgtgctgcwgcattctcartccagcatcaccattacctttgccagcaccccttgccctttcatctgctcacagtcccttggcagccacaggggtagaacttccactttccatcgtttgtaatgtagtccagttcagcttatggcagatagcaccttgtcactgatgaatttctattaaatagaaggtattctaataaaatrtatatagttttttgataagtcatttacaagcgaggtgagaaatatggtaatctatgtttttatgtgttagcattattttaacttctacttagaaatgaatcatacccttacctctttctgtaagataacttatttcacccaatctggccaccaaccagaatcctaacggggctatcacctggggaccacctagactttgttcctgtctttagttatagaatttttaagctcagcccttaaagacgaagataacaaagtgacttcttgtaaattactggaacctccatatggttttaatagcatacagttctccaaattgttttctgttatattaygtataaatcataggacatacttctgagactaaaataataaaargtgatattcagatgctaacagctaatctcacttccagaaagaattgataaatcctataayaacagtactgataaattcagtttgtttgtctcctgaagtcttcctggatcaacattacccacgaattctttcatgtgctgtctgctcatgtcctgtgctgttgcatgccccattcacctctcaggatcttgaatcagggattttataacaatcgcagagcttttttatgtgtcttcgactgtagttactcaagttcatgcttttaaagtagtgatctctccactcttcctttttgcaaaccctttaggagagttcttttcttccaatacacttttaaaatgctgctgcagctaccagttaccttgggaattacttctctcatttttgcactgttayagtttctttctgctctgtccactctttgatctgccttctgctgtgatggcaggaagggtttttgaggttattctaggatgttgaagtatgaaaggagcttccaagttgggtatgacatgaaaagcttgtctgcacagggctgctgtgtaacatagttccaaggaacactattctcttcatagcctatgtgagtgttgtaaactggagttgtacagtgcacaatctgtatggtgatatccagctgccctgggatcccaagggacaggactcatttgagaccatgatgagtactctgtattctattggcttactcatgaagaaaaaggaggaagaggaagaggaggaggaggaggatgcagataaagaggataaaagaatagcagtactttgatggagcttcttttgtgctaggcactccgccaagcgctttatatatatatatatgtgatggttaatattgagtgtcaacttgattggattgaaggatgcaaagtattgttcctgggtgtgtctgtgaggctgttgccaaagaagattaacatctgagtcagtagactgggagaggcagacccaccctcattctgggtgggcaccatccaatcagccgacagcataaaagcaggcatggaaagagcagacttgctgagtcttcgggcctccatccttctcccatgctgaatgcatcctgccttcaaacatcggactccaagttattcagcttttggactcttgggcttacaccagtgatttgccaggggctcttggaccttcgaccacagactgaaggctgcactgtcagcttccctacttttgaggttttgggattcagacaggcttccttgcccctcaatttgcagacagcctattgcagacacaatcacaatcaccttgtgattgtgtgagtcaataaaatctccttcatgtatacatctatcctattagtcctgtctctctacagaacctttactaatacaatatattaaattttaattactaaataggtggctggttgtggtggctcacacctgtattccagccctttgggaggctgaggtgggagaatcacttcagctcaggagtttgagatcagcctgggcaacataatgagacctcatctctactaaaaaataaaaaataaaaataattagctgggtgtgatggcacatgcctgtaatcccagctactctggaagctgaggcaggaggattgcttgagcacaggaggccaaggttgcaatgggccctgatggtgccactgcactccagcctggatgacaraatgagactcctgtctcaataaataaactaattaattaattaataggggatttttttcttattcatcatgggaatgattggttttctggagtacaccagttactgaccttggtaatggtgagcaagccagaaacaggcttccttccctcatgtaggctgcaacctaatgaattttgatggaagtgatcataaagtcagctatgctattcatggcaggaccaaagttcagcacaaagaaaactgctaaaattgccatcagaaccttctcaaaaacccacacaggctaccagttgcgtaaaatgacaaatccaaccttacatttaacattacatcaccaactgggctttctgtttagcctttatttttttctgtaactctgcatctcagttctttcacactggaaaatcaggctacacctttgcctgcataggaactccaaatttccccgctggaagctttgcctcaagtccttgtcccccttcctcctttctgcctacccaaatgtctccttcttcctttggttcacagttcacctcctctaagcagccttccytgatggaacacacagagctccgtcccctggatctttgaatacaaattattctaaaaacattttgtgtgtaacaatgtattsctttgcagtagttctcgtgtgtgtccgtttcttctgtctctctctctctctctcctctctctctcctcgtcacatattccttgatgggggaagtctcatttctaattttgtttgtagccatcctccatatcccctactcctgtgcctagcacacagcaggtgatcaataaatctttttaataaggagctgactcaccgccagcactctggcccccttggctcaggttgttctgaggcatgcagccttccaagaaaagctggctttcttggcttccttccatagtgctggtatgaatttcaatgctagatcttcaaagaaaaaactcagaaagggccatcctaccctggggtaattgtgaaagaaacagatccccagtagagacctgggggccagttggataaaattcacacttatgtccattttcctttatcaaaatgaaacagaatttccaacctaaattaacactcwtttaagttcttactatatgatatctatatgggtgtgtgcatgcacacatgtactcatgtataaataggtattaacatwtaacacatgtacatatagtatgtatgcatgtggattttatctatctgtctacctagcaagagagaaagagagagagagtctgagctctctgcctctgcactgaatacttctatactacacctcttagaattaatttatgtatttgtttgtgtgtgttgtgtgtgtgtgtacatgtgtatatgtacctgtgtataggcaacacagggagcaatttaaggtgcagtattttataaacatggtgttcttgttgctttacggtgataaatcacacattgtataattgatagatacctgctttataagtacaggaggagttcagctagagtatttttcataaatttctggcaacactttaccagcccagaataatagataactagttttcaaataattatctccaaagaaaaaacgtctgcagttacacagagaaattttcactgtcttgattttgtaaactttgggatcagaaaacctttccctgtctagccaatctttctggttggagctgaagccacttccctgttagttacgttacatgaatatgttacatcttaattttgtgtgtatcttttcttctcagccatcgtcaactgattcactaacagcttattccgaggtagaacatgcccctcagtgttgtcctaggtttcagaatttcccactttctggaatgcagatattggtgctggaatgaacagtggcctggctggtttgtctcagagcaaactgtgtctgtagttctcttccatctgtatgatggagatcrtaatatctcttggcaatggggattggattaagtggcactatgaatgtgaaaatggtactaaatggagcacttcctgagtgcgtgtttgcttttgaccctggctgagactggcagcaggaagtatctcctctccactcccgattgttcttttgtgtttccccttgtgctcctttcccccagcctcctcctcttcactttggttcctgggcagctgctactgtgaagacagtgcagctcccatctgctttcagcatatgggaccaaggctgttgcttccaaagtcctcatgtttgctgttcagagcagggtgggttattgtgtggaaagtgaggcagaaaaattgcagcatgatttaatcagtctctgttaaagcttcatgtagtattgatgggattaattgatcagtctttctacctatctgttcatctatccatccgtccattcatccatctatccatccatgtatccatctcctaacttttaccacagaaagtttgagtttcstcacacatctctatagtaaaatataaacagataaagttcaaaattagagaacatatagaaagcacagaagtctgaggccaagagcaaattaaaacacagatctgcatattagaggactcrtaagtattactgccaacccatgattttgactctgggcatcttgacattcaagcaaaaggggaaacactgtgaatttacatgatctccagagtccataaaagatagagcagtggcaggagggcagaatatgtcaaacaaagcttcttttggcatttggatctgaagaaaatttttatatgggttcccaataggacttggaatatgccttcataccagagtgtcaaggaatctagactcaacagtcactcaatagctacattctcaataagatttagaatatccctttttatcaaagtatcaaaaaattatagatttgacactcattctagagctggattgcagttaaagctgaaggtaagccgtatatatacaaagatctgctggttgtggttataaaaatattgaatgataaccaatatccctggattgaatcctcctggctttcagtccatgttatcccctcttctgtgtaaggaaagtgcagatggatgtcaaccaggaagcactaatttaactattgctggatctattagttgcttgtcatagagtagatggttgatcactttgttagggaaggatgataaagcggtgggtggcataggcatcctctctgagtggaatcactcttcaatrtagatgccatactccakgatcccatggatcattagtaattatacaggaagggtggggaaatgaatggtttgagaaaaactcrttttcatagctgaaatcagtcaacagtaccatattcatataaaaatatgttgtttgggaatgatagtgactgactcaccagaacttatctgatagctctagatttaagtttgaacctgccctaatgagtgtctgcacaaaatgaccaaataaggtcattgccaagaaacacaactacttctcatacacatttaaaataaaaccgtcaattgattgaaataagcatacaatactatgtttggctatcatttttcttagtttttatgattttgtggtgctcaaaaatagaagggaagtacttgatattttaagttgcagactttttgtccatgaagttttgtaatggggccttgagtataygggaagcacagactcaaatgcctatgcagcccaagcaagtcatggaaatgcatgaagagggctggttgcaaagaagagagaatggggcaactatggcaactggaggtctcatgtccattcaaaaggttgcagtagctacttccctcatgtcggttgttgctacacagtaattcagaccccwgtgtgccctgtcatactatttaaggtagaaatccttgtttcctgtgacattcttctgacttttaaaacacatcatggccaaattaaatattcctacagaccagatttagcctctgctcattttgcacccagttgactatcaatataaatatgaaagagaaaacaagataaaagcaaagagattgagctaagaagacagatgcacatcacgcttttagccaattatagattcacttcactgagaactaccgtgggtacattttgctctctaaaagaatgaatacaagatgaatttcttaaataggattaggtagcacaaccatgccgaattattgttaaatgcrtgttagaatgggaagagagctagatcttaaaaatcgcatggcaaaactaacaaagcagttacttgtcatccaaactggtctttttaaatttgaaatctcaagtcttccaggtacaaaatactttctttcctctgtcttgtaccagctatagcatttctcaactgagtttgtaagtgtttttgtctsattcatttatggataatatataaagggaaagcccagagagattttgaagtctacgtattatgcaaagtttcctcttggcaaaataaagtgccccaagcattatgtagtgaaggtacagactgctgtttcagttttttaaactgaatgctatataggattacactaatgcttctccaaagttatttgttaggggaatggagggagtatggcataagcaatcatgaaaatgttcatttcagttgtcaaatgtcattttttaaacagtgtaaatctaatcaaattggaaatgtgcctgtatgccacctgtttggtgtttacctgtgctgctttacttgctgggaggcatgcagaggcctcaggaggctatgagaactaattgaataatagctcatgctacaacataaataaattagtccctctgtgaatacatgttaaatgctccagaaggtgcattctggccttacgtagtgaaygaaggtaccatttatctttctataagtctggtgaccttcaaatgactaggaggttgtctgaaattccatcttcatcccaagtaatattaatatggggtggtcttcactggattggttaaagcacagtggtagaaataggcctaattgcaaatagactgattcacctctagcgttcagaaaagcatggtgcagattttaaaagcacatgaaatgagtaagacattaaaatatataaaatttttagtaaaaacaaatgaaaataatacactctcagcaaactctagtgtctggcaatgacccaggaaaaaaatacattattgtaaattgggggaatttctgttttaatcaaagctacctatacaaagtagctcaagtcaaaaagaaaaagttatcgaagtgaagtgtctcctggaatgtaaggcattcaggcccagacagtgtcttggtaccatggtggggaaggaggtatatcgtctccagctttcaagtattgcatggtctcctcataatcatctttctgtttccccatctctctcagttgtgagtggctacctcccccaaaattacatgaacttataggcaggacgactcaaatcatttctcatccaaatcatgaatcttttgaatatgaaaggcagtaggattgattatttctccaggacagcaggtataaactgagatgttccgggtgaaccaagacataggattgcctgactaccaccaacaacattagagcttcagaacctgtccctctttggttacagtgccttagtcttttgcttcaggctgagttaccctctggtcaacagctcattcttaatctactggttggctatggggtccaatggtgtaagcagaacatcagaagcttggagcagggccagctattcttagtgagtgtggacagagaaacagtgctggcaactgtggcagtgtcagagactcaacatgttatatgaccagaaattttccaccaattggcttgtagtagcctgtcacaacaaccaccggctgctggaagcaaaatcggggtttaagctaatgcaagcttcaagatttcagaagctgatgagctgagtgggtgttttccatgactcaccttcctcccatttgcccctgaagcatgcagattttctcagtcctgtttcctttcttttagcttagtctacaatgtttctacctgtttttcagtagtagttaactgtgattttgcttacctttaatatatgctcctttcttcggataatggaagcccagtcttccttttgggttagataaggctggctcaaggctagtccattggcattgatcccctggccacagaaatggattcagagatgggtctttaattgaacrtggttcaacaagactcaatatggggcttttgttggaacactttggagggactgaggttgctgagcttgtagcagtgttgttttagagttgctggtaatcatcttgttctatgagggggaagcctgcctaacggggaggcaaaaacagagaaatgcagagcaagaaaacaagaaaaaacgaaaaagagcaagagagtgacagcacacacaagtgagagaacaagtcctaacaacagcacaggagagcttgaaaataactattcttgaaaatggaactttaatcctgtatttttcggttttttgagccataaagctcctattcaagttatacgtagttgagttttccaccacttgttaataaaagagttttcacagatataccttagaatcttggttctgttctggttcagtcaattattcctctatttaaggttgacctcctgttccrtctgtttattggagaccatgaagttcttacatcttgagccttctttgttgatgggtagagcatcagggcaagtctaccaggattctacagggattagggatctcactcaatgttcaaacaaatgaacaaactgcccttgcctttataaatgtttaacattactattttactaatgtttaggtcactacttgtcatctcaataagtgttctttggttttgaagatatgcatgaagatcatctctgatttgaaaaaacatgatctcaattgttttgccataagattcttgacagttaaagacttgactaatacacraaatactcccaacaatagtcctacccagtgctttgcaccaatcttttggttggacaaaaatagtgttaggttagtgttacacaacttatgaactgtaggcttggttgttaattgtaaggctttgrgtgaagaggaaacccaaataatatattcagtttcttagaacttataagtaactttgttttaagagagtttgattcgatggctgcttttgctgacaaattctttttaaagaggagaaaaaagcactaaaagggggaaattagcttgaagtttgatgaagctgtgcatttttctagttttttcatgtatcagtaggaamatacagtgtcttataataatgctatttatgttgggcactcagagaatctgctttatatctaaacgctttttgctactttactaagtaaacaaacccttgtataaagtgtaagaagggccacccgtatgttgaatttcactcagcagcagagtcccctgtctatatatacatttggaacgtattcattttcctatactacttcaactcttaccacctgagatatctgtgcctttctctggaaaaacacacacagcatatctgtataggaaaattcctaaaatttggtttatgtttatctaactttgagagttgggatgaagaaggtgtgggaactgtcttatgcaaatatgtccctatccattgaaaaaaagagaagcaaaaatatattgtcatatttaggagtttaggtaataaatggattttgacttgaaaaatataatggatcagataatttggttttgctactgagacactaactcaaagaactttatgattagactttttaagtaaatagatggagcccaaatatttaagtttacacacctatgattagggaagaaataagtaaatgagaaaataaactccttatyctgaagtaattgctttagaagacgtgaaccagtcaagaggtagaagtcgaaatggatcaaaaaaggagaaagaggatgaggaggaaaaataaagagaagaataaaaaaggagaaagaggacgaggaggaaaaataaagagagagaagaataaaaaaggaggaggaggaggaaaagaagaaaaaggagtaggaagaagaagaaaagaagagatgaggaagaagaagaggtagaagaagaaggagaggagcagaagcaggagaaaaggaagaagaaggagaaggaagaggaaaggaagcaagaaaaagaaagaatgctttcattaattcatttacttacgcattcaatgatatttattgcatacttactatgtgccaggtatcataacttgatctaggatttgatggtgaatgaatctttgtactctctaaatcttttaagcttacattccatggagcaagatagaaaaaactaagtaactagacaaaatagtaattattatcctatatgttatacgaagaactaataagaggcagacacagagaaaaagacaagtattccagctgtagatatcacatccatcctgcttgaatgatgttctgagtgtaattccacttctctcagcactgaccaggtcaggagatcgagaccatcctggtaaacacgttgaaaccccgtctctactaaaaatacaaaaacaaaattagccgggcctggtggcggacgcctgtagtcccagctgctcgggaggctgaggtgggaggatggtgtgaacccaggaggcagagcttgcagtgagccgagatcacaccactgcactccagcctgggtgacagagcaagactccgtctcaaaaaaaaaaaaaaaaaaaaaaaaatgggggaagaagaattaaatgaagcaagtggttagtgttgctctcttctttgtacactgattaaaatggtatctttttcttccttgagtgtccagtaaagagagcttaattggggaagctcaatctgatggactagagagaactgaaatgagctgtcggcaaattcttccagatagcccagaatcagttttgcagcaatgtctagagtttgacattattttataaaaatccacaccatgactattctattgtcagttgtatattttctggtataatgttgggacatgtggccagaacagctggggtagtcagacaggtattaccctttcctggcacggaaagaagctagtgtcttggtaaataatctctttgtatggaaagcaccacagacagtgtgacttgtaaatagcagctatttaagagaagcaagcaaacaaaaacagatcccttcaatctggtcttttaggagtagcagaacagaaagaaaatggtacatctgagtagtctgtattgattcgtgagtagaaatacatactaaaattgaaaagtaatggtttgttatgaagaagcctaaatcaagcctgagaagggaaggaaagtaattggaatcatggctgtagcatggagctgctatgtccttggtaaaatatctacatgacagagaaaattacatttgtgtatttgtgatcaaaaaaattacaagacacaatggtttacagcctgagagcttataatagtagttccaccaggtcattccttttagaaacagtgtgggtagatgtgtcctttgaaaggagttctcattttactcatgatgtgtgctctaggcataggaactgggcttttacgaataactgagggcagttccccatccttatatactcagcccactgccctcaggcttctagacaatatccccatagggacctctttattccagagcagcaattctaatccatgtcttcccacctctctaccctgagcagctgaaggagccactgtgcaaatgtggacatccattttgactttcttatactctaaatagctggcctttcttccctctcctctggtaaacattccagctctacagaattaacagcgttyttcaaacaaatggtacctgcagatcaaaagcctcctccacatcaaaaaaaaaaaagaaaaaaaaaaagcactccttgccaaaatcttctccaaaggcaaaattacctgctggatttaaagagcccttcacttctcttaccccaaattctgtccgccagtttggagaactgaggaggagaggaggataggctattactgctcctttccttttgggttctccaaagtcgctgaggagaggggagaaatcaacaattaagtttcttttcctttttacagaggttttttttatttattaatttttttgactctttacacaccrtgtggaaacatagacacttttctttatttatacacatttatttaaccattaaaataaaagtgagggtaaattgtgaaaaaacaaaaacaaaaacaaaarccttttgacagaattccccacggggaggaattagctgatgatggttcctggacttgccaggatattcctgattttctaaatcccatcaatcccataaatacatcttaaacttgtcaaacaagaggctgtgattttcggtttgttaaatgtggcccctgtattaagattataaatagctgtgactatagtgtctgccgtggactgaattgtgtcccrtccagattcacatgttgaaatcctaaccccagtgtggctgtatttggagtaaggaagcaattaagtttaaacgaggtcatgaggtggagccttggttctgcagaattcacgtccttataaaaagagacatcagagagctcaayagcttgctgtctctgccatgtgaggatgcagtggaaaaggcagaaaactgcaagccagaaagggaacccttgccaggaacctaaccatctggcaccttgaccttggacttcccagtctccaaaactttgagaaaataaatttctgttgtttaagccacccaatctgtggcattttattatggcagcctaagcagactaacaytgttaataatataataaaattggatttttaaaatatcaaacacaatagaactgacacatccagctcagtacttactttgtaggctatttatgtattgcatggatgctcgtgtaacacaaaactttgttggagcttctcttttacattttctttttggagataattggcgagccatacaagaccagctgtgtaactttatagtcaaaatcttgttttttaaccaaaaatgatatttttcaacttgccatatatcctactaacttaattgggcagccattattttgggtkgtattaaggtctcaaatttcccccaaaggatagagacttgcaactgttgagaatattcaaaagattattkgttaaacaaattaatttaccgtaggctttgaaagcccaaacaacagagactcaaagaactcacagatgggtgacaaaaaccactgctggcaatctctgagaactcagagagaattggagaggtgccaggaaactagagctgggtaaatattgtccaatatctttttaaaagagaaaaacgcaaatataggaaattgtagcttaacagacttgatatttttgactcccaatcaaattttataagcaaatagttgggtccagaatttaagggaacatagtcaaaaaacaytgttgaaattaagataaattaagttctacttagtctctgatgttgcctctgagaacaaattggagaaatgagcaaaatgacatgacaattaaagagctttgaagctttatgtgtagttgagtgaatctctatgaaaagtgttgacacagaawaaagctgacagtatattgttaatagtgaaaaagcaggttgtaaaccaatggagtacaatactattgttgtatatattatagagatagatgtgaaaatgtaaagaaaaattcctgggaaaatcccaaaatgttatcagtgattatatctgggaattatttttcctttttgacttttctgcatttctaaattttatacggttaagtaagagacaaattttttcaattgcaaaagaaaatggttaaggcygggtgtggtggctcacacctgtaatcccagcactttgggaggctgagaaggatggatcatttgaggtcaggagttcaagaccagcctgtccaacatggtgaaaccctgtctctactaaaaatacaaaaattagccaggcggtagtggcacacagccataatcccagctacttgggaggccgaagcaggagaattgcttgaacctaggaggcagaggttgtggtgagctgagatcgtgccactgcactccagtctgggggacagagtgagactgtatctcaaaaaaaaaaaaaaaaaaaaaaaaatagaaaagaaaaggtcaaaagaaaaaatataatgggagaacagaaatatcaaccaatacattgatttttatgtgtaggaagatgctgtgaagaaatggcattgcttttactgtaataggatattcttactatatgaatgttgccatactttattggctgaaactctcttgttaccagaatcaccgggaatacagattctgggttttatcattctgatacaatagacttggagtgaggcttggaaatttagccacagggaattggtcaaattatggcacattactgagttgaaatcatatatccattagcagtgaggtggagaagactacttaatggcctaggacgttattcatagcatcttaaataaaaagtgctggttataaaataatacaatgtaattttataagtaagaggcatttttacatacacacaaacgtacccagaatgttaagcataattagtcacttgtataatggaattattmtttttattgtattctttttgatttgtggcatttttctaaattttttatacttttcatttgttggttttgtagttatttttaaaccaycatttgcatcctttcctttatagggatataactgcaaaagatagagttgagagaaattttataatgaagatacatttttaaccaaagaatccttctgttttcatttaaaaaaatccacatggaaacattagctaggtgaggttaattatttgggatgagcccttacaaattggtgaaatagtgattgttcagggtatactgtaaatttaatcctgatctacatttccacctagaactgctccctttatccctttccgggtcctttggaggagatggcattcccctgtgcaggaggggcagtggttatatgtgtttgcatgtttatttttcaacaaggtctttttttcaaactatctgtccttacatgggatggacccagggccttacagggctgcttctcaaattaaatagtttcaccaagttcattagtcatttttccaaatgtattgaatttacatttcagacttatttattgggatggctgctacattagcactgtgttctagagactagcgataaatgaggcttaaacttctgctacggtttaagtgtcacctgcaaaactcatattaaaagttaattgccattgtgacagtattaataagtgtgactttggctaggcatggtggctcatgcctataaacccagcactttgggaaaccgaggtgggtggatcatctgaggtcaggagttcaagaccagcctggccaacatggtgaaaacccatctctactaaaaacacaaaaattagctgggcatggtggcaggwgcttgtaatcccagctacttgggaggctgaggcaggagaattgcttgaaaccaggaggtggaggttgcagtgagctgagatggtgccattgcactctaccctgagtgacaagagtgaacttcgactcaaaaaaataaattaaaaaaagaagtatgacttttaagaagtgagtaagccatgagggctccactcgcatgaaatggttaatgtcaatagagtgggttgttataaaagtggccctctctgtctcttgctcttgcacttgcttgccctctgccttctgccgtggtaagacacagcaagaaggtcctcaccagatgtagttcctcagccttggacttcccagactccagaactgtaagaaattaactactcttctttataaattacccagtctgtggtattctgatatagcaacacaaaatggactaagacaccccctaaacagtttcccaaaaacttgatttaggtagagaaatggagatttttttaaaaaaactataagttcagtataacatgaatgatgatggtaagcttagaacatgaggttggagggatatttgtcatccttggctccacgggagaatttactctggaggcttttttaaaaatagagatgccttgtctctaccactagaacatttaattactagatgtagggtgagggcccattatccataggttaaaaacacttcccaggtgattcggatctagagctgagtttgagatccactctattacagcaactaattttgtctgtgatgttccagaatatagcagtgaagaaatgctagttgaatagaatctgggaggatgaatagaagtttgacatcaaaagataatctaacagaaaaaaatagggggattcaaaatcaagatgcctggccaggactgggttgatgtgggaatttgtaagtgttcagcatggtggaagcatggaggtcacagggcaggtctcatgtgtgcaggaagagagcacagagagggttctggaaagtgcgtacaggttactggacaagatcatctagaacgctaggttgggtctagaatgtgaggggccagagcttatcatgaaccaagagtgtgtgggcattagggatccagccaaggctataatataagggagagaccgggtcacagtgcctgtggtggagtggaaagaggccacagacagtagagactgctgggcagtattcaggagacatctctgaggcagaagtyacaggaactggccactgtgaacactgtgttgtctatcagcaatatcacttctggaattttttgagctttcacttctatattctttcctcaaatgacagagcatttctttgygttcacatattcccagttattttaccttttctctataaatctagataatactaaatgagagagaaaaaactgtcatgacaatagaatgagattagatgaatgtatatataaaatatatgtgtgtatatgtacgtatatattctatttttttgtattcacatatatgtttttttttcttatcatcaacaatcaccttccctagagcactttctgagtataaatctrtgagctttgttaagcacagcactgggagaatttctggagcccagtctctgcctgtgtttctttgtgctctctcacttgacatttctgaatgcaaatatgtctgacaagtgtaaataagggtgtcacagctcggaatagtacccatttccgccttgccatctcttatcatgtatgtgttcagggatgaatgtgccattttcatcttctaatattttcacagttrgaattttttacagagtgcaatggtgagctctatggtttcsaaggtgaagaratggatctactttttatccttgcagaattcagtgcatttgcaaatactttgaaaatatgccaaaataaaaaaaaggaatactcagcgttcagccagtggaccgaagcagcgtctgttgcacagtacttccaggtcaggagggtgatcctgggtggaataaactgatttgtttcaaggtgtgcctctgaacacatcraggcagggtgggtggagaggagataatttctattctattgcagtggttctcaaaatgtggtcaccaggccagcagcatcagccttacatagatttaaatccccattctgccacttattacattgtcaggacttgggcaagttgctggatctttctgagcctcagcttcctcatctgaggaacataattcacctgattgtcatgatgctttaatttaattagatgagactgtgaagcacttagcatggtacctggcccatagaaagctccacaaaatggtggcaattacaacaataatatttcttaccagcgttcagcgctggatttatatgcaccagatcacccaactggcttgcctctgtttccatcaggattaccacaatcattgccttctgccccacttccacctccaccaggatttctatccaagttctgttttcctgtcgaggctaatggggctcatcagggcaggccatcccttttggtcctggctattttctctcttgcctcttttcttttttttttttttgacagagtctcgctctcttgcctaggctggatcacacttgtgtgattatagctcamtgcagcctccaactcttgggctcaagtgatcctcctactttaacctcccgaagttctgggattgcaggtgtcaaccatcccaacttgtctattattctcaatatgtgctctctcacaacctctgatttaggaagggaccttgagtacttatctcatcaatacctaggtccaaatctattgaatctatgtagtcagaagtctgggatctacttagaattctatgctttacatatagggccaacgtggccaggtcactatgtstctcagagcctcagcttctctgtttgtgaaagatcatgycttccctgaccaaagtgcctgtcagaaccagatgctcatgatcgtgctgactttgtgggttgtttactccccctcttttctctttcccttatagttttatgrctgcatttctcaacagcagaacatgatgcaagattttgtgaggacagccacttaccacagagccgtcctccrgaatcacattgactttagagacaaggtaatgccggcagcaggttatgaatctcatgcatttcagaaacgttttcaagaccagaatcaaaatgaagctttagtagaattaccatatgacccagcaattcccctcctagctatacacccaaaagaattgaaacaggcattcaaacaaatacttgtgcacaaatgttcataacagcgctattcaaaatagccagaaagtggaaacaatccaaatgcccatcaactgaagaatatataagcaaaatgtggtatatttacacatggagtattatgactattattcacatttgtattattcataagaagggatgcagtgctgatacatgcatcaccatgggtgaacccccaaaaaaatgctaagtgaaagaagtcagtcacaaaaggtcatgtgattccatttatgcgaagcatcagartagataaatttatagagatggaaagtgcactagtggtgtggctgccagggttgagggaggaagggaagtaggaagtgactgcttaacggggacggagcttccttttggggtgataaaaatatcttataaccagataaaggtaatggtcgcccaatgtaatgaacgtctgaaatgacgccatactgtatactttaaaatagttaatggttaattggatgttatgtgaattyatctcactaaaattattaacctttgagtgccaggaactcgagagactgaatgcactgttttggtgcatcgaacagtttaggagctttattgctacataatraatagctcttcatgagacactctatttcaattttttcatagactccacaagtacatgcgtttatttccttaatgaaatggatatgaatgatgaatggttgccagcacattatacacctgttgtccagggttattctacctgttaaagagacaaactgttcagaacactcaacagcttatctctcaggcaacagtactagtccaaagactcggcagtatgggatctagtttcatattttctccttaactagctgtgtgatcttaggcaaaatgctgaagttctctmagcctcacagtctagtctactgacataacaattgtagatccatggtcctttagctttgcagcattacttcccagggaggttgttgtagaatattgaaataattattccaataatcatgcctccctgtatccacacatacatagtcatgtagctgcttctctcatcaagagcattctaattttttggcccttatctctgtgctggctttgtgacttgctttgaccaatagaatatgacagtggtgatgttgtgtgagttccagagcctaggccctaatgagccttatagcttttgctctccatttcttggaacccagtgattaccatactgtgaaggagtctagcctgctagagttcagaggtcacagggagaactgaagcacctcagccaacagccatcaccaacaactgccagacctgtgagcgaggccatcttgggtcttccagtccaacccaccctcctgccggatgcagaggaatgaacaaatccaagcaagaccaggagagaaactgcccagccctcccacagaattgagagaattcataaattgttcctggtttaagtcactaaatattcttgcatctttccctctgttttcactaactattgttgcataacagtagttatagttgtatacaatacaattatacaaccgcatacaagtatatacaactgtacagtattattatacaacaatatttaatgaaaacagagggaaagatgcatgaaaggtagtgataaataggcccccagccagaagctggtttgcacatggctttctattctttgtcatgtccattctgctattgagcccatcagtgaagtttttattttggttatcatatttttcagtgccaaaatttccattkggcactttgttatatcatctgtttcttggctgacactttctattttccattggttttagtggtattcatgattgccggttggaactttttaaataatagctgctttaaaagtctttgtcagattgttctgacctctatgtcayggcagtgttagtttcagctgattatcttttcccataggaattgaggttttcccawttcttcttgattgggttcgggctgcaagttccttccccatagttggtcttctgagggctatgtttcctatgtcagttcatttttcaaagccttggcggtgctatttggatctgtcctctgtgtatgtcacccagtggtcagcctggcacctgggcagagttctcaaagttttggtatgctaattagtaccagatccatgcatgcaccggctgaggatgaccccaggaacttataaaagaaactgtatggagctgctttgccaagctccttcctctctgtgatactttttggttccctgtgaccacttttcagtctcttgccaacaagtttactctgccatgtacttccacgactttgcctgcatattggccaagcagagagagaccaagagagaaaaaaaagcactgggggtcagcccaggcttgggaatgacagctccactgaatggggagaaaggtttccttcccttatagttttggttaatgcaggctgatgttgccaataccacaagattcttggggacgggagtgtggaagaaggaaggaaarggaagggaaatagagggaagagaggagggggagaagagagcaacacagagaattttcacaccctgactattagaaatttacttttctgctgctaaagccagaactacagggtgtctcaggagctctctttgtaccctggtgctcatttctggtgtgttgactttaggccagggtttactgggggaagaaaggagttaactcactgttggttgggtaatatttcaaatcccagtcttatttcctgatatggtttggctgtgtccctacccaaatctcatcttgaattgtagttcccataatccccacatgtcctgggagggacccagtggaggtaatttaatcatgaggtggctaccctcatgctgttcttgggatagtgaatgaattttcatgagctgtgatggttttataagaggcttttccccttttgctcggcacttctccttcctgtcatcatgtgaagaaggatgtgtttgcttccccttctgccatgattacaagtttcctgaggcctccccagccatgtkgaattgtgagtcaattaaacctctttcctttgtaaattacccagtctcaggtaggtctttagtagcagcgtgagaacggactaatgcatttcctaatctgcctgacgttcttaactcttcggagtcctcaagtagttgctctaggcattctgtccaggtgttacagctgtattcaattcagtgcgagagagagagagagagagagagagagagagagagagagagaaagagagaaagagagaaagagagggtgaagtgggccttgtccaacccacctaggactggactctatctaaaagccacctctgtgtgctctgatgggtgagagtaatgggtaaaaggcaaaggtgagaccagaaatggcggggtttagccaaagagtcttatatatcatatgtcttgaggtgcccagcaaacaaccttactttgccagtgggacaagcctgttaacagttacgaagtaaacattcccagtgaagaggatctgctaggatagatgggcaggatgaagacaaaggagaaaaactagttcatttttgagcttatctggcctttaaggttgtaagtaagcaatcttgtcaacctaaggtaggttttttccgattaaaataaaatttagctctgaattgctgatttcttcttcacggtttgagcatgtttcctggaggtattagttttatttagggaatattctctttctgtatagggacttagttttaatctacaatctattttctatgttatctatgatctattttaaattctggttacaattttaaagaccactccctaaactactaatgacactgataacttacattataaaagtctttcacagacttttcacatggatcgtatcacttggccatttcatttttgtatcttttcatctataacaatgaagatattgggctagattatctttaaggtcactcccagctctaacttcctttgattttacaaaataccctttccctgcctgcctgaaatagtttcatctgccaatgaaatgaaataggcatccatctgttaggggttatgaaggtgataattaatcacatggttgataattaattatatccctttccttctttgagttctgaaccaatttagaaatagacacagatgtcatgaagaaatcacaatatcaatgttattgttgctgtttggagaacagggttcagacctattgccaaatgcagtttcctaaatcttctgctccgaaaccgaacttttccactcacttacatgctgaactactggtctcccaaacaagtccagagcctgccccataaggttctcacatgggggactcaagggcacacacttggtttggagtgggcaggccgacccctcccaagcgcatgcactatgcttgctccatcctatttcccaatgtcaccatcaaggtgaatcattcctgctaaggggaaaaaagagggagggtaaatgaccactcttaattccattactgccctctcctgggagtaaatatttcctccattctgaaaatgaatgagaaaactgacccactttagtgtcccgggaatcctctggttctgaacaaaccaggatggttgggacccctcactccaaatccaccaaatccatcgcaaatgcaaaatcttttttagtcctttttttgtttgcttacatcatactgaagagcattctggaataacgcctgggggtctgtggaggatgctcctttttcactaaatccttgtgttcttcctcattgaaattgactatttaaaagggcattgaaattgactgcctaaaagcacaggggtttagaatgatcaataacaatagttattatttattgaggagcttagtatgggcaagcaccatgctaagggctttccacacaccgtttcttttaatcttcatcacaactttatgagataaatactaatattattgcccttttacagatgagagaataagggcccaggaaggttgatagtttacctgattttatacaactagaaataaaaaggccagaataagacccacttagtctaactttggagcctgtacacataatccctgaaaggcattgcccatgggaaggttggctaaaattgctaagggagatttttgttgctccaggcctaaggatgggataaaaacattttggttacttaaacattcccatgaatacatgaggttgccttgcacaatggttacattcatgagttctggagccggagagctgagtggaaactcctgcttgaccacttaccatatacctgccatagacctttgtcctgtttgtcttgagatcttgggcaggttgtctacagtttctgggctttggcttctttgtctataaaagtaggaaaatgataagagtagtagctactttctagagctcttacaagttcaagatgatatagtgtctatgaactctgtattagcaaggattattattattgatggtcacgggtttccacctctgctataactttaaagcttccaaatcttgatttttcattctgcctcctccatgtagttttaatgaaaatcatttcttggccagagcacactgctggctgagaactccatttggaatccttccaggaaactgaccccactagaatccaacccatctccccttcttggagtttctgttaattgccatctggctatttttagtttctttaagtgtgcactgggcacaagcagggaaagtccatcctgctgagggtttggggctgtgtgagctgtggggttttaatttgaaaatgttttgacacttcatttgtcagggcaccagttgctggaaacttgtgagagtgagcaggagctgagagcttattattttttaaaatcagtgttttcacagaggagagaatccccagttgcaacagctgcttagtgcctccaaatgtgagtttggcttaggcagaagggatttagggatttgaaagcttaaaagaaaacataaataacaacaaacatggaaagcaacctgttcagactgtcagctgatattcagatttgcagagcctgagctttggttcttctgatgtgagttttctttggtgtgggcttatcatcagtttggtcaaaggcctttgagtccatttctaatcctgttctgaaatgatccctcactttaacacaccgcacacactaatgaggcctgaccttcatcactgactggaataaaggctatagcctagatctgccgcatagggctgtctgtaagtgcttgcttccctccatttctactgaccctctacttcttgaccagcatagatgttaaccctgtggtggcagaatccttgttcagagcctgtgggtaggagtagaaagaaaaggaaattacttatgattcctgctaggggcttcacatatcctatctaatttcatctttgtgtgttagtcaaggttcttagttgccagcatcagaaactaattctattaatttaaggtggggtgagaggatttctttaaatgttacaggaacatcagaaaatgagtcttagaagctaagtatctggaataattttcaaaatcgtgttgcagaattgatctcaggaagacagcaatgcagccagacatagacactgcaacgtgcacagctttcactaaataccaatcttgagtgttgtcctaagaactttccctctgatgctctagggtctggaggttactgtgacctcaccatagtggactccatgtagtccctacatcttcaccgtctgagctcccatgcaaagcacgtcttcctggcagagcctgggtcatgcttgtgctttagctgacaccttcgcttccctagcaagaggctggtgctgccttagaatgtggggcattccccaaacataggaagggagttctgatgctgagaggcaccaaagaatggcaaatgcccactgcgctgtacaacaaacaaatgcaatacatattgttaggctaatagtatagacaaagagattggagctacagaaagttaactaacttgctttagcataaacaactgctatgtggcagagctacatacaaactcagttctgtctgtatgcaaagcctgtactgcagggtgattttaggggtgacagaaagtcatttgttttgtgttctaggttgataaactgacatttcgctatgtgatttttggaatgtgaggggagcaggctgtgatggtaaaaaacagtatctgcttacwtatatatatatatatataatttttttctatagcttgggattttaagtctgattcagttttccagggctaccataacaaattaccacaaagtcagtagctaagcgcaactgaaatttgttctctcattgttctggaggctagaagtctgaaatcaagatgtctgcagggccatgctccctcttaaggctttaggagaggatccttccttacctcttcctggcttctgctggttgctggcagtctttggtgctccttggcttatagatgcatcattccaagtgctgcctctgtggttacatggcattctcccagtacgtgtttctgtgtaaatttctctcctctcatagtgacaccagccatatgggatttagggcccaccctaattcattacaaccttatcttaacttgattacatctgtaaagaccctatttccacataaggtcacattcacaggttctggatagacatgaattttggggaggtagacactattcagtgcagtatagagactagtttcattaagttagatatcacaataactcatttctgagactaattctctgtaataaaggtaaagagaaagtgatagaaaatgagtctaggtttaactgatctctttggtcccttaagcccaaaggggaccctctgaacagatcttctgcctgtgagtgaagcaggagtatatctgtgccagcatcctgagcttgagtagatttgcttcctgaaaggttactagagaaagatgccagagtcagcaaaaggaaatgctttcatttggtatgaaagcaaagtgcagctctccaggagagccaagaagactgtgaataagcattggtcacagactgatttttagggtaattgtgaaaaaggaagctgagggctttagggtacaatgcaataggtggctttctaaccaagatatgtgcactcaaagcacatctctggtcctttcaagatggcgacatgtgaccttgatctttttgaggttaattttaaattgcggtaaaaacacttaaccacatggtggctggaaaaatttagtaagcaacttcttggagagtctcagcacagctctggaatgctgccacacaactggggaatcagaatcagaaatcatgaaatcatcggaccctcaaagatacagcttatccaggcttgtgagtcagggctatgctgctgtaacaatcaactcctaaatgtcagcagcttaatccaacagagctttatttctctaatctgtatcattctcactccaggacccaggctgatggaacagcctccatgaaaagcgctactagttcctgttgtagaggaaaggaggacctagcaaatcacacagctagttcttaaatcttccacctgaaaatggccagtgttacttataactacattacgttggccaaagcaagtcatatggtcactcctaatttcaacaaagcagggaaatgcaaatctacatctrcccataagaagaaacagaaatatttggtaaatggcactatatattacctttgcaaactcattaaggtagggacaggttgataaggtgatattctcagtgcaccagctgtgcgtgggagggggttagaaaaaagagggacttgatggattaatacttcacttataggatttcattgaaattaacttctgcctggtggattgcctagccactgaacacaaagcattttagaaagttcctagagttgaatttccaacactttcactcttcctctaagacagtgccatgaagtgccaatttggggcaactactgactttctaaaggcttatatagaaggctctgtatgacatagtaatatctaatatagatgactttgttttaatgtctgcttgcaggctaagaatgtaagaaaataaagaggataaaatcattaaaaagcagttcagttggatgaagcaaccaactaataagctctttaaaatattgtattttcatcccttggtatccatgggaggttggttctaggatacacacataccccccaaattaaaatttgtgggtgctcaagtttcttgtataaaatggcatgatatttgcatacaatctatgcacatcctcctgtatgctttaaatcatctctagattaatatctaatacagtgtaaatgctatatgaataatttttactgtatttttatttgtattattttaattgttgtatggttatttttatggggtgttttgtttttaatatttttgatgtattggttgaatccttggatgcagaactcacagatgctgagggctgagtgtgctagaccctggtctttttttggcactgaaccagaaaaattctgatgaatttacagcttctgcctaaatcctcttttcacttaatttcctgagtctgtagtattggcatgtccactttaacttcagagtggtggcttagctttggaattgagaagttccagaaacccagaaaaagacagaatcacagggaaacgtcaataaacgtgttgattttcctgtaactaccgccaatttcttagcctagattccctaaattgcagagcacgaggcaaagacttctgggctggcactttatcagggagtattaatctcaggaaaacaggagtaggagaaaggagagtgaggcagagaaggagggagagcaagtggaaggcagtacattactgagcaggccacagctttatgaaaaactgattgcttggtgtcataggacatcttcaaaggggcaacatgaagctacttcatcctcaaatagttcttccaaggggagaaagggaaaatgatttattcattagctgccatctcccattggtcaaagtattccctcactgggtattaactcccttacacttcaagggtacacatgcatgagcatcaagtaggtgctgcagtgctttctctgccttgacagaaacaagggaattccactataggaagcacatggcacaaacaaattgtgcactgttttttgtgctaatgaacgatatgaggacctagaagaaaccattgcaacaagttcctcaggcagtagtgaatatagcagcaacagcagcagcagcagcagcatcagcaataaaacccagctccaggattcaaagatcagtgcaagcaatttctaggacccctctgctacatagcaaggcaagcgttctcttctggcatgaggcaaaaccagaaggcattataaccagccactcaaaccaggaacctaggagtcaatctatacttttagtctcctttcaaatctaaatcccttagattcaatggtctcagcatttctgcaacctttccacttctcctgtcccacagcaagtccctagttctcattcttattgtgtctttcctggagtattgcaaaagttttgcaactacttttcctgcttgtaccagttaagatatctttgactcgaaataggaaaaatcctgactcaaattggctaaaacagtcaaaggtaatgcgacttcatggtgttttaatccatgaagtcacattacctttgactgttttaaccaattactttgagctttgagcatcacatccgaatttaaccacattcaggaaataggaggcatcttttctgtctctttaagagggaggaaatctttcccaagaagtctttctcagtagactcataaagaaagtcatatcacatccccaagcctaaacccatcactggcaagaggaatagaaccacttatgattgccctaaaccaatcaagatcccctccctggatctgcagatggttaaccacatacaggagggtaaataataaaactgaagttctgattggaaggaggaagggagaggggactgatgctggttaggaattactaggttctgttacctttgatgttgtggccctccaatccatgccattagtatgatgttgctgaaatgcaactatgacataatcctatgaaataatacttctatttaaaacttcctgatgattcttctttgctgaagaatcaagccaagtcttgcacaaaagactatttatgatcaagcatctgccagtttctccagattttgctcttgccatgttcatgtcttaaccatgccccacttctacctctaatactcacatcatgctcctgatgcaatttactgccttccttatgcaactggctctatcattcttagatgcctttgtccacacttcctggagctcctgcatttcccatcatttaaatggcacaatattgactcacttttcaatttccagtacccaggtcacctcaatgaaatctttccagaccctgcggtaaagtagcctctttgtccttctgctcacactgtgcccttatataattctgttattgccactgtagcacatgattgtacttctttattaatgcctattcctcctcccagacagtcctgctctattcatctttgcattctcagcacctggcagtgcttggcacattggtcaatgaatgaaggagtgtttaaggatctagagctgagtgatcatgcccaggtctaaagcagggttaattgtgaggagataagctaagcatgatcacatgttttgaatattccctaattagagaggaaaatagttacagaactggtagaagggtggttaaaaggttggtaataagtttttctgtcctctgccagaagaccaagcaaaatgtgctcataagcattaattctgcattatttaaatacaggcaaccctctgggtgcaagcaagtttcactgcacagcagatgtagagttctgtcttaggaggagctatcactgcagaattttcctgccataatgaaagtgctaagtatctgaacaagatttaagtccaagctgcaaaggccataagaggatgtcttctgtagtccttgagatgctttggacattttcttctctgataaaagctggagtaggagatgcgatgcactgcaaaagtctgtgcagcctcctctttctgttactgcccagaagttgctcagttaacctgtcagtccatagttcggatattggaagatctggatactggatgcagtctatgggggttggcaacctgtggcagccaacagtgatgatgaagcacatgatactgggcacgagcctgagccacatgtggttttgggctgtctagtgagctgactaaagatggaataaaatgagggcaggaaggagtgatggctgtggaagtaggacacagaacgtaggaatataaggcatacaacaataacaggtatagcaattcagagcagccactgatgtgctcaaaaaataaagaagaattagtaaatgataactgatgtcacttgaggaaccaattgtgggataatcaaaaccttcatatttgaagacaattataaaaagctggagtgaaaaataagactaaatgtggccagtattactctagtctgaatagaacaaataataatttagaattgaagttgagacaacgatagactggattaagaaaatgtggcacctatacaccatggaatactatgcagccataaaaaatgatgggttcatgtcctttgtagggacatggatgaaactggaaatcatcattctcagcaaactatcgcaaggacaaaaaaccaaacactgcatgttctcactcataggtgggaattgaacaacgagaacacatggacacaggaagggggacatcacactctggggactgttgtggggtggggggaggggggagggatagcattaggagatatacctaatgctaaatgacgagttaatgggtgcagtacaccaacatggcacatgtatatacatgtaacaaacctgcgcattgtgcacatgtaccctaaaacttaaagtataataataataaaataaaataaaaaaagaattgaagttgagagagtggctaatagtttaggactcaacttagataatttaaaaaatctcatctctgattctcagcctccttatctacaaaatggagaaaataataattgttatcacaagtttaaaaggtaatgcctacacagtactaaacaggcatagcatataataagtatacaagaagtggtagatacaataggtcctccatattcgtgtgctctgtttctgtgggttctacgtcatggatacagccaactgtggaacaaaaatacttggaaaaaagatgggtggttgtgtctgtactgaacatgtatggacacttttttcttgtcattattccctaaacaatatagtacaacaactatttacatagcacttacattgcactaggtatccctttataagtaatctagagactcaaggtattcaggaggatgtgcatatgtcatatgcaaataccacactattttatataagggacttgagcatccaaggatttgggtatccaaggggattcctggaacaaattccccatgtataccaacagatgactgtatttatttttgctcttttattcaagggtaattttgtttcatgctttcataaggatctatatattccttgttaattttaacctactaaatccaaatgaatagttttgaatctacttggagctatgtaagccctgtccaagtactttgcaggatttctttgcccaggaagccacaagaacatgtaattaaaataatccggaaagcaaaacgataactctttctctctaatatttttaaaacttttcttaccaataaattcccaggacatttggccacgattacatggaccagttgttgacttttcccagttagtcctgccagggatttcatactattttcgggtgccactatgtataagccaaaaaagagycatatctaccatcactgcctgtgtatccaacagggagctgaggatgaattccctctctagaaggtaattgtccacaagacgtaactggatggtaatatagggagaatatggcaaggtcaaaagaaagtcatcctttgaaagattcttaatttaactaggttggagaggacttatgctggtataaggtggcttctcagcaaggtaacagatttttaccatattttctggatcatgaatctgtcctctatttgtggtagtgagggatattttcatacctcagtttgttcaataaagatttagtgagtgtctctactgtgcacaagatcctgtactacattcagattcaatagtgagaaacagatggggtctctcctttaatgaagattactatccaggagagagagcagatattaatcaaataatcactcattacatgaaaaattataattctggtgaatttatgaagaaagagtatgaagagatgctgataagaaagtatacaacaggaggacctagcatggtaggacagcaaagaccaggggagatgtttgtgacttagccaagacaacatctccccacctccttgcacctacatgcrtggccaatggaatgtaagaggaagtgatttgggaggccgaggcgggcggatcacgaggtcaggagatcgagaccatcccggctaaaacggtgaaaccccgtctctactaaaaatacaaaaaattagccgggcgtagtggcgggcgcctgtagtcccagctacttgggagrctgaggcaggagaatggcgtgaacccgggaggcggagcttgcagtgagccgagatcccgccactgcactccagcctgggcgacagagcgagactccgtctcaaaaaaaaaaaaaaaaaaaaaaaagaggaagtgatgagtgtcacttctgggccaaggtggttaatggtccagcatactttccctacactgatgattaaaagatggaggtgtttgtgacattaaggatgagttggtttaacagccagggtccctgcaggagagagacagcacacatgacagggtgtattagggtcctctgagagggagagagctaattggaaatatatccatatctatatctatataatctacctatgtatctatgcatctatctatctatgtatctatctatctaaaagggagtttattaagtattaacttacatgatcacaaggtcccacaacaggctctctgcaagctgaggggcaaggagagccagtctgagtcccaaaactgaagaacttggagtctgatrtccaagggcaggaagcatccagcacaggagaaagacgtaggctggggggctaggccagtctctccttttcaagtttttctggctactttatatttgctggaagctgattagattgtgcctaccagatkaggggtgaatccaccttcaccagaccactgactcaaatgttaatatcttttggcaacacccacacaaacacacccaggatgaatactttgtattcttcaagcaagttcacactcagtattaaccatcacacagggtgttttatgagagttaaaaataacatgactatttacaaagatgtaggcagagttaggagaataaagaaggggtagtgaagcactctgttaccagcaagawtgtggacctgttattctatctggacctaaaggtatttactggaaatgtgacataatatcagagctgtaagacatgggagtccaacaggaactgtgacttcagtaaagtcacaatccatggagacacagaagaaagggagccaaaagaataaataatctgacctcactgtcctcaccccctctgatctcctattgtcatttctcttgacgtatcccaactagaatccagtggcaaggaagcccattgtaacagtctrtatagatcaggctcctgccaaagaccaggatgagaagagtggaggatagatctggagaagcaaatagaaaatatccagcacaatagtcactgagtaggtgaaagaaaatgaccgcagactgaaagcagatggtgcgtaatggagagcatagcaagcaaaaggaacagtatgtactaaggcctgtggcaggaatgagcctaaagtcttctaagaaggcctgtgttcaggcaggaagacctggcagaaggctacctcagctcgtcagaagggtgatcgtgttccartgatagtcaaggaagaagagtagagatcatgaagatcaagagtgaaaagtgtcagatgcatggggtgayttggaggccaagaaataagaaagaggcccgaatgcagaagacatggaaggttgagtgaaacatcataggctgtgaatcttgaataaggcaagggcatcctgagctcaacctctttgggtgctgccttgtgatgcaagagcattcccggagtccaaatgttagacaaaagtcataggccttttccaaagatatttcaaagtgatgttggaattaaaagactgctatcttgggccatcccattcagccatttaggcaacaagtatttattaatggtttttatatttcctactgtgctcactaggttctgagaggtgatgtgattcctgtctttggtaagctcacaggctaagcaggaaagacaaccatgtaaagaactacttgtcatatcctgtgataagtgctgttagagagtgacatgcaaaggtsccagagggcccagcctaccctgactggggaatcaggcatccctgagatatgagatttgagctaggtcttgaagggtgtttcccaggtagaaaaatgagaggagggaatgttatctaggggaaatgtattgatcaatggatgccaactactactaaaatgatccccaaatctcagctgtttatcataataaaatttatttcttgctcatgacatgtccagtgtgttctgagtggctcttcccaaagtggtgatccagagattcaggctgttttcatcttcagtgcagggaatgtatgctggaactttaaccaccttggtccagaagtgacactcatcattttgcctcacattccactggccacgcatgtagatgcaaaggggtggagagatgtagtcttgggtaggcagctgcttcctggcagctgcattctgagagagcgtgaacatttggtatggggtaatggctcccactgccacagagaattgctcatgagggagcacagaatgaagtaaagggacaygattcctggcccagggtgtgtgtggaagaagggagagaagtacaaaagaagaggccagaaaggtcagtcattactggatggctcaggactaaggacaacgtaccagagagaccttctccttcttctcctccagatgtgtggaactattagaagtgtgacatggccagatatgcatctcttcacagtccactcatttcttttttttttttttctgcacaaaaagagagcaagagtggtgcaaagagctaaacactggattttcatcccaattctgccaatgctacctacttgggctggctacttagtatctctgagcctcagcttatcaataaaatgggcacaaaactatatgtactctgtattcccgagaggcatgaggatctgatagataatgtcaggcaaacatcctttggaaactgtaaactgctctacatatacaaggatatttagttactctattttgcctctgactgaggggagatattttttcccagagcatgaaagtataacttaatgtctgccaagttcctgaaatatatccacttctgtgatgatctaccaatggtagaataagaaatgagctcaatattatctctataagaacaaataaatacaattagatgcagctccaatgcttcctaaggtgctatgtaagaaagcataatggaataatgttaatgacttttcttcttccacagtcttggaaaccacaggtggaaagggctgaggtggtgtatttccattagagcctaaatatttgctttgactattagttttttttttttcacacagaatttatccttggtcctccaaggctttgttttccaaagttgcatggcttatgtagagaaggggaaatgtccctctacctcctcactgtctcttcccattgcatgactgaaaatttacttgtcaagattttttaatatccacataagtgggcagcagatggacttatctggacagtgctagcaaaggattggattctttttcaaggcctaactctgttttgaaatagccaaatgattaaagttactttggcttgcatttttagaaaattttctcaacttatgatttgtcactacttctctagatatggcctgggtctgttgaagtatctttttaccaaatggaccaattttccaaaagcctaaccacataaggctccctcccatctctgtctctttttctttctccctgtttcctttcccccatctctctgctaatggtaagatgttcctttagtttttagtctgcagcatcacgagaactggaaaacactgctctaagatgtgcttcgtgccattttaataaattagataaagaacttcatttacacattccagggcacctgttcccagagcatccaggtgcaatttccattgtctcttaactttgcatccataccttgggctgaacttgaaatctagggtgttgtacttttaattgaagaaagttctagaaagtttcttctgaatgtagtacatttttcttttctttgggaccatggattgcattctccaacttaacagcctccrtttcttaaatggcagttgtgagcgttcttgtaacagaccatggccacatgaagatgatgtatttcctggggaggatgaggaaaagagaatactaaaatttctaaaagtrtagacagcctgatagccaattttggagtstggatgacattttaaattggtaatgctcctaattacccaaaccctaggaaactgtatggaatacagccacagctctagattaatataagtgagcactgtgaacccattactaacagcatgttatcttagaataatggcacagtatctgtgtcatcacagtgtgatattgcagttaaaatgcgmacacacacacacacacacacacaccccttaatatttcttgttttttggcaaatttttcctgctataatttttttaacttttctaaattttccaacagaacatattactttgtttccttgtcaaccattgtctaattggtattgccgtgttgaaatgtcagttttatagaagatgaatgtcagcaagcaatgtattataatacaaaacatgagcatgaaggcagacatgttcagagtcaactcttagcctccctatttattgccagctgaacttgaggtgattgttcgatgtctccgattttcagggtttattttttttcctattacatcggcataataatgttgtctattcatattgttattgtgaggaggtaaagccaaggaaaatgtcttgttcaaagctagtgccaaaagatgctgagactaaaaggcatcaatgcgacagaaatacagtaacttgaaatttcaatgatcaggctgagattcaggccttagctccagcagtgcttgcggaggggggttgaccacataccatccaccccttgcatgcagggttaagtgttggcctttttatgccagtaaatggtggttttcttgatctaagatccaggtctgaacacagagagtggaagacaaatttcgtcacttcactaccttcatctgctcctaccctccatagaaacctccccagctttatggagagggcctggtataaaagcgcacccttcatttttgaatttttcaagactatcttcagtgatttctaaacctaggtatatcattccaaaagttatttgccacagttttcatttgttcatgctgatagaattggtggagcaagcccatttgtgacactacttctcttggccctaagcatcctcaaagcaatccatgttacaaagaaactataataatagcaataatttgtgaaacaccaattatgtgccaagtgctttgcatactttcatattatttaatctctatatccaattctaagagtgtttgttattaaccccatttaacatgtgagaaaaacaagtctcacaaagattcataaccttgccaaggtaacgccactagaaacatcaaagctagtgttattataataagtctgacctcaacacccaaagctggctttgtgccagtaagccaagcccttgtttgtgttttcacactttttttttttttttttgtcttctttccttttaggtggttctagatgttggttgtggatcaggaatcctgtcattttttgctgtacaggctggagctaggacagtttatgcagttgaagccagttcagtacagtagcacagtatgctgaggtaagtggttgtattttttttttttttttttttttttgagacggagtctggctctgtcacccaggctggagtgcagtggcgtgatctaggctcactgcaagttccacctcctgggttcatgccattctcctgcctcagcctcccgagtagctgggactacaggggcccatcaccacgcccggctaattttttgtatttttttttttttttttagtagagacagcgtttcactgtgttagccaggatggtcgcgatctcctgacctcgtgatccacccgcctcagcctcccagagtgctgggattacaggcgtgagccacggtgcctggccagtggttgtatttttaaggcaattaccaagtgggtctttagtatacctcagggtacccagtgatggagtcttccaggtaggtcatttagaataatttattttatttaaccagtgatatggtttggctatgtctccaccccaatctcatcttgaattgtagttccctttattgccatgtgttgtaggagggacccggtgggagataactgaatcatgggagcagttttctccatactgtttcatggtagtgaataagtctcacaagagctgatgattttataacgggaaaccccttttgcttggctctcgttctctcttgtctgccaccatgtaagacatgccttttgccttccaccatgattgtgaggcctccccagctacatggaactgtgagtccattaaacctctttatctttataaattatgcagtcttaggtatgtctttatcagcagtgtgaaaatggactaataaaaccagtttctaatttttgctgtattggaatgttactgccaatcaagcctgatttccctgtagtgattgatatgaaaaaattaatttttttaattgtcaggatactgaaattgtagcaaaaccttctcccttcccatccactgggtggcagatggtgctggggcagaggaagggagacatgaatgttttctttaattatctgggtgaggagtaatgtttcactgcagctagatttatttttttctttttaagtgctgtaatgacaatagctacaccattcactttaaattttgcttttggtttaaggggctgttgctacatggttgtagtaagaggaagagacaggtgtctgtgtttcgaggagctttttaagatttcaggttctgactggaggagagggagaagatttgttttaaatgtagtgctctattatcattctgaaatgtgtacaaatattataaaataaatcaaagtcaagagtcaggtaataatggctttcagtaatatttggatgtaataataacccaatcaaactgcagaaattggttatgtgtgcacccgtgtgaacagggtaatgtgcttgtcattcatacctggaggaggcctgaattttaatgagggataggatgacagatagagagaaaagcttggctgctgcttcagatgagcatcatgaaaccctcctccaggcccggacaactggtacctctgagtgatggttggttttgacgtaagtgagcaaacaggaaccaagagacaagtagacaactctggcatgtttggagggaaagattgtcagagcctaatggatgggtaggttgttgtattctcttttctgcttccagcaagtcctgaagaaaatattttcagttatttgtttctttactagttcttaaatgtcatttttattaaatattgactacacggcaaacaatatttgtaaatatatatagtgtaaagaatagcaatacaatgaatgtgtgcctacttcctgttttaagaaatagaccattagcattttctttaaaggcccatgtaccttgtcctgatcgcattacttttttgccctgaacagaggtagtcactactgtgaatttttgtttattgttctcttattctttatacttttaccacatatatttctattcctaaaaacatatcacttatgaactttccatgaatgggctcataatgtatgcattctcctgcaatttgcttttttttcacccaacatcgtgttcctgagggccatatttgttgatgcatacggctgttgtttacacattttcagtgctgtagagtgtctcgtgatatgatatgcctcaagttgttagtcctgttggcagactttggatggcttccattataaaagtattattatgaatatttttgaacacagtctccactgcgtctttgctgaagtttctcaggcatacacaggagtggaattgttggatcctagggtgtgcataccttcgactttgctatataatgccaaattgttttccaaagtggctgtgccaatttttattccctcccgcagtatatgggtgccatcgttccatgtctttgttagcactttgatattgtcagactttgaaatttttgccaatctagtggttatgacaggatctttgtggttttgttttttccacttgcttatgactttgaacatatttgcaagtattttggccatttgtgctttctcttcagtaaaatgcctattcaggyttttgacaatttttcttttgaattgtttgtctaattctaatttatttgtaggaacgaattctattttctagatattaatcctatgtcagttatgtatgtagcaaatatcttctcccagtttgtaccttacattttcactgtcctaatggccctagtaagctttagatagagaggtctaaaaaagaatagagaagaggaggataaaaatatgtagagagaacttcatagataacaacgcctctgcttagatattagtagattttaaaatgaatttttaaggtgaggggttgtttaggactttgttttaggtgctgcttattcatttattcatatctttacccaattgcactctacatttctgttgttgggcaatacaggagaaacagtaataatcaaggtctcttcctatattcaaagagatttgatttttaataaggtattgatcctgttgtatcttatacaagagaccaaaaaataaaataaaagagtggcgtaaataatttgggagttttctttccttcatatagtttgtttttcatatattttaaagtggttggagatactttagttacttttaaaaccttaaacatctaatatccttggatatrgtactttaaggaaaaagaggaaggaattagctagagatattctcacctttctgagccataatcctgtctccagccatagcaggtgcaagtacactgtgactgtgcctgtgaatagccactgtactccagcgtcagcagcatagcaaatccctatctctaataagcaaataaataaataaaaatagctcaaagactactcaaattccctttacctagattcacctattgtttacatttcaccccgtttgctttatcttttgttctagtttgtcttcccaccacatgcaaacatacattaatattaatgtgtatacagatatgtatatgatcacacacrtttatgaacatatacacacatttatatgaacatgaatgtatatatgaaaaatacacacatgtatatgaacacatgagcacacgtgtatgtatatgaacacacatgtaagtatatgaacatatatacatgtatgtatatgaaaacatacatatatgtccagagatatagagacacacgctttttctatgggtcagttatatatatcatagccatagccctttatcattaagcatttcagtgtgtatttcctaaaaacgaggcttttctcttatataaccaaaagagaayttgatttaaagctgaaaaagaagctatatgatgacttgctcattgagtctttcagttttggtggtaaaaggtgtttggggtggtcccagcatgagcagggagactgtcaccatggtgctgaggtgaaaggagtctatacttaactgcctcttcccttcccttacctagtatttctaggaaggcttgattttttgggtaggggcagtggggggacggagtcttgctctttcacccaggttggagtgcagtggygcgatcttggctcactgcaaactctgcctcccaggttcaagcgattctcctgcctcagtctcctggaggcttgatttttaaaacattaaaaccaaagttctaatgaawtccaaagcatcatagtttatctttggttttagcktctgtagaggatgtgtgtgttacagtaatctttcttttctatgtacaactggggcaggttggggacaggggtggctttccaaatgctgtcagggactgcygggagcccttgaaatcctcgctcgcaagtctgttttgctcccgaggcttcccctgcatgtggtcctgagaacaggctggttaaaaatgtattcggcaccaaggatgattagaatcttctcaaagtgtggatttaacaacagactggtccctcctgaaatccatggcctctactctgcccatcactcctgcgtgggtgtcatgagatgctccccagggaccaagaccctttcaccttgtggaggacgatctgtaccagctcgtggtttttgcttctcacaccaacactcatctgtacagtttgtgggtggcaaaatgcgactgtgaacagcacggaaaagaatttyactctaagaataggctgatctagcagcacagcacacagtgcatggtgctcctttcgaccttttcattatttggtaattgaaccagcagacatttaattcttttctctggagtcttcattaaatttctcggaaaagataaaattgcaacaagaaagaaaaatgtacaaatttaactaccatctcctgtccctggattcttcttcacacaccagccttctaggctttaagtaaataaaatattttcaaattgcattgaattcaacttcagtttcacttagtagaacagcctgattttgtaagggttggtccttggtaggcaggctgatgccaacgacttcttatctatacggtatgcatgtacatgtttttgcaggagtggtcacaaggttggcaaggtgtggctacgtgctctcactgtgggtcccatgtgacatttctgggtcagtaaaamgatrycattcctgtttaaggaacagggcaggactaaaggtctcccgtgggtctccaagctgtgaaacttcccacctcaagctggaagctatctcttgctccttttttccttttcttatatacaaaacataaagcaaagtccccgagattatagagaccaaatggaaaagaagtaagcattcatcaaatctatacaagtataaaatcgagaaaagggaattccttaatttaaatttatacacagatagatgttacatctctctacctaaatgagaaactcctttaagggccaccaggataatagaaattaaagtgagtgattattactagatttttgcgctgcaatcaacttaaacttacaacaaagttctctgggactcagatttaacaatgttcagaatcattattgggccactttataattagacatcactagtacacagatcctagatatgcctcattagaatgatttttaagggtcagaccaagtgtttccagatcatggggtggtggaagtaaaggcatatggaaatggagctgttgtgacattccctctgtaaagcagctcatcatcttaagctgctctgtgcaatatggtaaccatcacacacgtgtggctatttaaatataaattaattaacaataaaatttaaattcctagctgggtgtagttgctcacgcctataatctcagcactctgggaggctaaggcgggtggatcactttaggtcaggcatttgagaccatcctggccaacatggcaaaaccttttctctactataaatacaaaaaatcaggcggattgcctgaggtcaggaggtcgagaccaatctggccaacgtggtaaaaccctgtctgcactaaaaatacaaaaaattagctggatgtggtggcatgtgcctgcaatcccagctacttgggaggctgaggcaggggaattgcttgaattagggaggtggaggttacagtgacccgagatcatgccactgtactccagcctgggtgcagagtgagactccacctcaaaaaaaaaaaaaaaatagccatgtatggtggcaagcacttgtagtcccagctactcgggagactgaggcatgagaatcacttgaacccaggaagtaggggttgcagtgagccgagatcacaccactgccctccagtctgggcaacaaagtgagactaaaataaaataaaaatgaaagtaaaaaattaaattccttagtcaccatagcatttctagtgctcagtagccacaagtagctattggttattgcattggacaggaaagatgtagaatacgtttccattggcacagaaagttctactgggcagcagtgatggagaccaggagtagccaaacttcacctttctggcatgtgatggccaggatgatggctgtgttcactgcgaggaattggtagctgtggccagattggtctggcttgactttaggtgaggcaggcatccaacaatccttgttgctgtggacactgtttgtcttctcatttatacgtaagatctgtcacagagcagcttctctaggaaacagactcaacgtggaggtttgtaagcaggaagcatattgggaagagctctcaggagcctcacttctggggaagtgaaggaagcaggatagattggcygaggggggagttaagctgcaatatagtcatactaaagtactcagccaatcgcacagggagttcttgagctggggtggcccttcagagttgaaccaccttgaggtgggggactttatgttccacatttttttaatgcacacacactgaggaagaagtgtgaccttgggtaaggtggctctcctgggcagcacttagaacatgactcaccgagagccatcatctgccaatgttcccagcagttggggaaatgggtgccttggtccagaagcaaggatttgtctggtatgccacagcatgtgcttcaagatccaggattctgactttgggctaccaaaaggaagctgatagaggataaagaaaaartgacagtaaatcaaaggaaaagagttagaatgagggagccagcaggatgataccaaaagcttaggaaaagccacaaggcgacaggttgtgagtcctttagttgtaagcaaaagctttctagaaattgaatacatcacctgatccaatgtagtctgtattattctaagccctgggaggacatagagcacacagcttaaaatccagttggttttcaaacaaataaaattcctgacacacagtgaatgccaagtgcccatgaatggcagagatgaaacatggcatgtctacacaatgaaccattcccgtgagctggggtggttagggaatccttcagaaaagatatgtgacttcaattagatcctgaaagatgagaagaaattaaatgttcctcttttcatttttcacatcttactgccagcaatgagatttttgaaaatgcttaggttcccatggggttccccatcttaaatgtgttgataatgtcttcataaatgctttgaaggccaattattggaaaggtacttctcattttcaatcttgaacactagaaaaagcatatactttgaagtttttctgtatgaatttatcctgatttcaactctttgagctagggtttttctccaatttcttaagtgtctccarttgctaacttctccttcctcctcactctcccacagacaccaaatgcctgagtcacaagattccatccagcctgtcaacactttttatttttgcactgacaatgaagttaaaaggtggcaataaggaatctgttaaggaaacaataataagcatttggcagagctgaagtttttgagttttgaaagcatttccacatctataaactcatagatcttcaggaagagtctgtgtggtgcttggagcaaacaataccatccccacattacrgttaagaaagaacctcagagaagatagccatgaaggtgggacrtgacttgtgaaaacaattccttgctgcttccttctagaatgttcaggtaagcaggaactggtgattcccttgaaagtgaagaagtgaatgtgtttgactagcacctacccctgtagattgttcattcaggaagcaagagaaaaaccatctttcacttagcaagcaacctattgtgaagcacttaaacatggagacagttctactacccaaagaggaatcctgctccatttgcaaattcagctagtaacacatttagaggaggagttaaagtaatccatgtggaatgtccccgtttgccacaaagcctcatccaagaaataaagagccttctcatagctagattggggattgatgaggaaagaagacgacatgggagagaatatccatgtgtcctcatctcacttgacattcacatccctgtagggtagatcctaaatacctttgcaaggattcaaattgagggtgggttctggaatcagacagtgtgaggttatatccctgcccctatgacctaatggctgtgtgaccttgacaaatgtattatgtttcctattgctgctgtaaaaaattaatgcaaacagtagcttaaaaaaatacagttgtattactttacaactctggaggtcagaagtcagaaatgggtctcatgtggckaaaatgaagatgttgcagaaatctgttctttctggacgctgtaggggagaatcagcttcttgccttttccagcctttagaggttgcccacattacttggattgtggctacatcactctgacttttgcttccattatcatatctccttctctgattmtgaccctcctgcctccctcttacaaggactcttgtgactgttttggacccttctagataatctaaggtaatctccccatttcaccatttttagtaacatctgcaaagtccctttgataggtaatataacaattcacagttttcaggcatcaggatgtgggcatctttgggaaaccattattttgcctactacacaagttacttgacctttcccaaccttgttttttttaacctataaaactgtagataacaatagtccctcataaagatattataaggwttgaataagaaaacccatataaaattagcacagtgcctgccattctctagctagtgctattattgtcatcacagttatcatcgacattattatggggcctcatttcatccatatctctgtataaattaaccaaacaaacatcatggaagggggatcactaggcaacagtggggaggacagggccaggcagggcacatttttttcaagagcatgttgtttcaattgcatgttgaaatgtcctttgtcactgctttttaaaacccagacattacagatgctgaggatgtacttgtttcccaactcttcttataggatctaaagacttggcagggcagtgtcttgagcagctctctggtatccgattctcaggagaaattcacagttgttcctaagttctttctccacttgcttcttcccttgctcaccccagtctactcacttctctttggttggtctcagtattggcaactgttcagaaggaacacagctctttagcatcagggagcaatacaatggctctcaaagaggtgcactacaatcccctgaggggcttttaaaacacagattgctggggcccatccctagagtgtctgactcattaagtatggggagtcacttgaaaatttgcaggtctgataatgatccttctgggatcacactttgagaaccactaggattatataacattgaaactgaaacaacccctaaaagtgatttaccacagtgctattgaaagatgcaccaagaagtcccttctgggactaagttagagaggtaagggagcttgaacttcaacagcaagcctacctccccaaaaacctctatcatgagaacaacaccccttctatctgttttacttattgggcttctggattaacttttgcttgcagaaggagatcaagaaaaactttagaagctgagacccgatttcctcaattaacagagggagcctagagaagttaagtggtttgtccaaacccacagttgsttttcctttttctatagtatcagtgcccccaatattcactaytgaaacttaatctccattgtgatggtattaagaggtggggaagaccttttaggcagtgatcaagtcatgaggggtctgcctttatgaatgtatttgcaccctagaaaagggctggggataactagtttagggtgttcccttttgccctttcatttctttgatgcatgaggacgctgttcatccccttttgcccctatccatcccttccaccatacgaggacacctagacagagctatctttgtaaaatgggccttcaccagacaccaaacctgcagcacctggatcttggactccccagactccagaactgggagcaataagtttctttatactcagtttcaggtattttgtataagcagcacaaacagactaagacacctctgccaagggaagttgttcttgtttccaacattgacatacctgtcatttcagtatttaaaccacaattcaagaaacttccttagctcactttgtagcttctgaaatctacttttcttaagccaaagtctttctcttagccacctaccttcttcttttagttctctccttacccatctgctcctagaagccactattgtgcattgctgtcatggggccctatttaaggacccatttcattctaggcattagaggagagaagcagcgtgtttagagaaaatacttgttgatckaaagcatttttctactgcagcagccacacattctagggggattgtgattaggccacatgttttcttggcaagaaaagaaggaacgttgggacggactataatttaagtacactaaataattgatatggcttcaatgactggaggaatactaaggtccttggtctcacaccaatttagataaaacaacacaacacggatacacatggagtggtttcaaggagcagagagtttattaggcaagaagaaggaaggaagaagaaaacagctcccctgtacagagacagagagaggggagactcgagtaaagagaaacctcatgtgcggtggaaaagtgattgcttatactgggatgctgtaggaggcggtgtctggtttgcacagggcccagggtattggttttgatgaggtgtgtcatttatgtagcctgtgaaaaacctggccctcctaccttacccttttaatgtgcaaatatgagtcgccatgatgttctgaacacacggtgttatttggaggtggccatgactccttggcacacctggtgacaagaaggaggcaggaatcgccatattgggtggaccatttctaatggccatgatttgcatatcaaatcttgccagcctggcccttcaagccattttctgttagaaaataaatggtttggggattgcttttattaaaaggaaaagcctttataagaactccttttgccctttctatctgcctaaaaattatttcttaataattcctgtattataatgaaactaaaaagcgttcagatggttgatcactaattattgctaacaatgtcttggaactcttttcaccctagcagggaactggcctcacatcccctcaacttttccttttccagctgggtacctcaagagttttatcctatatgtacaaggtgctgcaagagagagaaaaacaggatcagtgagtttgggtgtatgagacttttcaagactagatcaacatctgaaaagcaaaatcagtcaaatcaacaggttggcacctgcacaatgccaagtaatcacgttgactccatattttccacggaattgatgaaccctcttttgctctgggctgatggttttgccatcatgtagccacagattggtgtccaatcttgctcttttatctactgcagctgagaaaatgataactggttttgccacctgggtcactttttaatgatctgaaagaccacaaggagccagcatttcttttgtgcagttcctcattcaacaacctaatagctatctgaaaagcgctttcttgaaaagaaaaaagtctcttcctctcaggcagaagcaataataccrcatgattctctgattaaactatcacactgcgcatattacagggcatctgacctgcttgaaactgacttactgctgaggtttcttggtatttgcactgttgtttttctgccaacaagccgtcaaatgacagatgagtgtccctaaactttagtgtgaatggcaagtaaagtgcccaagaaactgctggggcccagctgcctcctgggcaatgctggaaggggaaatgtgtttttcttcaggggcaccctctgtgcaaatgaacttcaatcacaggtgaaaccaaagctgtcactacagggtrcaactctggagcaaaaacacgctgcatagtctcctcactaccccagcggacaggcagcctctgccagcacctaccacagttagaagtaaaaccaagaaaatcattctttctcctccctaaactccttaaaaatataatattttaaactctaaaaccttcatgctgtagtatctgaaaaaacaaattcgtaagtgctgtggtagctggcacttaaggcagtgacctggacattactgcgtatatctccaagggttttgttgtgtgtcatgaccagtgaacatttggggcgatcctgccaatatatatatagtgatttattttggaagctgtatgtgtattaccgtattcacactttatgtatgttagaaacattctccaaagttaaaatgttgagatgccactgtatacccacaaatggctaaaatttaaaagaatgacaataagcaagtagacaaggatgtggggccagtggaagcctcatatattgctggtagaaatagaaaatgacacactttcaaaaacaactgggcggtttctcacaaaattaaacacccactcccctatgacccagcaattctactcctttgtgtttccctaagagaaatgaacatttatgtccacacaaagatttgtacttgaaaacatggaaacaaccgaaatgcctattaacaaatgaaagaataaatcagttgtggtgaatctaaacaatggaatattgttaagcaacaaaagtgaactatctatgcacataacaatatagatgaatcttaaaaacatgatgccagttgaaagaagcgtatattgtatgggaatcatttgtattaaattctaaaacagggaaaactaatccacagggacagaaagcagatcagtggtggctgagggatggtggatgggtaaaggggggtgggatgaactgtgaagaggcacgtaggaagtttgagggggacaggtattttctatatcttgattgtggtggtggttacatggatatatatatagttattaaaacattgaactatacacttaaaattagtgtttcattatatgtaaatcatacctcataaacatgatttgaaaaaacaaaagcaaacttctggtcaacatgtacttctagtcatccatgttgtagcctgtgtcagtattagtgcaataatgtacaaaattaaaggatttaaagagggagaaaatataagaataaaatgacaatattttaaaaatctatagatttcactaatggcacacaaaaacctatagtgttatgtaatttaacatattgatcgactggtgatattatgatttaaagatctggttgcatgttaagtttattttgacacttggttataagggctgttgcagctgttaaaaaacaaacatcagatatacaaattcaaatggaagaaaagtaaaatagtttgagctaagtaaataataatattcacttttcaacccatccaccattatgcaaagcatgtgaaattcagttaatacatttctctttgccctgatgtcagtcagaagctcttacaaatgaatcaggatatgtggcatttttacatttttaagaaatagatttaaaattatttattcttttggaagattgttttaagttataaaattatattgccaagtttttaaaatttgcagatataaggtttttatatcatttttagcaacaaaaccgtataacagtgaaatattccaatgagccactttcaaaatgttctttccacagcatgaggtttcttttgaaaaatagttcctcttgcattcattactaaaaaatcatcatttcagaatggcaaaagaagtttattttttcaaaaatacttcctggatgggataattttgacagctacttgtcattacagaaactttcaactcttatctttaacaagaaaattccatgattgatttgtaagtggagcaactctcctaaatactttgctgttaaacagccagtaaaggcccattcctgaaaagattttcaaggacatctacacattattccaaagtactgtaaacagtctactatctcttaaaggccatttttttcagcattcttgttgtgataaagcacacacaccataaaatttaccatcttaaccatttttaagtgtacagttcggtgataattactacattcatgttgttatgcaaccatcaccaccatccatccacagaacttttttcatctcgcaaaatgaaacctctctgtccattaaacagtaagtcactattcctcttcctctcagcccctagtaacgactgtctctataattttgactactgtaggtacttcatatatgtggtatcatacagtatttttctttttgtgattaatttatttcacttagaataatgttctcaaagttcatccatgttgtagcatgtgtcagaatttccttgctttttaaggctaagcaataatccattttaggtatatgccacgttttgcctattcatgcatctgttggtgaacacttaggttgcatcttagtccattttatgctgctgaggtactttctgctcaacatatggagactaggtaatttataaaggacaaatttatttctcataggcctggagtctggtaagtccaagataaaggtgccagtcwgtytggttgtctggtgaaggctacatcctctggaggggagaaacacttgtgttctcacatggtggaaggcaggtggaaggacaaatgagctgaatactgtgtgaaatctcttttataaaggccttaatcccattcacaagggaaaggtcctcatggcctaatcaccttgtaaagggcccgcctgttaataccatcccaactgaattatagagggcacacattcaagtcatagcaggttttttcactgtttcacctatatgaataatgctgctatgaacatgggggtacaaatatatcttcaagattgtgctttcagttcttttgggcatatactcagatatggaattgctggatcatatggtaattctacatttaactttttgaggaactgccatattgccttcaacaacagctgtatcattcccaccaacagtgctcaagggttccarttttcccacatcttcaccaatacttgttattttcttttttatatatatccattttaattgtggttttgatttgaatttctctaatgactggtaatgttgagcatctttttatatgcttagttgccattcatatatcttcttgggagaaatgtctattcaagtcccttgcctttgctgaatatgttcattagttttaacagttttttgtagaatacttaagatttctacatagaaagtcatatttcctgtgaacagagatcattttgcttttttatttccaacttggatgtcttttgtttctttttattgccaaattacttgttaggacttctagtactatatagaatagaaatgatgaaaatgggcatccttgccctgttccttgtcttagaagaaaacctttccatctttcaccattaagtatgatgtttgctatgggatgttgatatatggcttccattatgctgaggcactttccttctattcctgttttcttgagtgtttttatcataaaagagtgttgaattttgtcaaatattgtttctgcgtcaattgagatgatcacgtgggttttctcccttttattcttttataataatatggtgaattattatacgttgatcagttttcttatgttgaaccacccttccattcaaggaataaatctcacttggttgtggtgtatagtacttttaatatgctggtgaattttgtttgctagtattttgtgktgttgtatcagaccaggatcaatgttcatgatactggtttatttttcttgttttattttcttgtggtttctttgtcaggctttggcattcagataatagtagcttcataaactgtgttatgaagtgtttcctcctcttcagtgttttggaaaactttgagaaagattgctgttagttcactagtgaagccatctggtccagggcacatttttgttcaacgattttttattgctaattcaatctcctaactagttacaggtctactcagattttctattccttcatgattctgtccttgtaggttttatgtttgtaggaatttgtctatttcatctaggttatccaatttgttgccatatgtttgctcatagtattctcttataatactttatatttctataaattcagtagtaatataccaatttcatttctgattataataacttgagacttctccttttctttttcttagtcagcgtgatggttattattgagtgtcaacttgattggattgaaggatgcaaagtattgttcctgggtgtgtctgtgagggtgttgccaaaagagattaacatttgagtcagtgcggtgggaaaggcagactcaccctcaatttaggtgggcactttagtcagctgccagcatggctagaataaagcaggcagaagaaattggaaagagcagacttgctgagtcttctggccttcatctttctcccatgctggatgcttcctgccctcgaacattggactccaagttcttcagcttttggactcttggacttacaccagtggtttgccagggttctcaggcctttcgccamtgaaggctgtactgtcagcatccatatttttgaggtttggggactcagactggcttccttgacagcctattgtgggacttcaccttgtgattatgtgagtcaatattctttaataaactccccatcatatatacatctatcctattagtcctgtccctaataggatagatgctattgctctccagactgggtgacagagtgagaccctgtcttaaaartaattctctcttcggctttgattttccacascttgattataatgtgtctcagtgtgggtttctttgagttcatcttatttggagatgaaccctgactaatacagtcagtctagataacaatttgtcaattttgtttatctttttaaagaatcaaattttttattttgttgattgtcctctattgttttcctattatctatttcatttatctctgctrtaatctttattgktttttattttatttttattttttgctagctttaaggctagtccttctttttctagttccttgtcattaaggtaggttgttgatttgagattttgattgtttttaatgtaagaatatatagctataaattttccatcagcattggtttcactgtatttcataagttttggtatgtcgtgttttcattttctttcaactctgattgttttctgcttttccttctgactttttaaaaatccattggttgtttaagatggtgttcttcaatttgctcaaatttgtgattttcttgttttcctttgattattgatttctaactttgtatcattgtggttggagaagaagctttgtataatatctctatttttaaatgtttgagacttaatttgtgacataacatctgatgtatactggagaatgtctcatctccactaaagaataatatgtattctgttggtgggtagagtgttctgtatatgtatgttagagctagttggattattgtgttgttcaaatgctctatttccagctttgtctccactccttttgattcattgatgtcactaaattacatccttgttatattaatttgcttgattatgacagtaactcacaatgtatatacatattaagccatcatgttgtatacattaaatacctgcaatttttatttgtcaatcatacctcaataaagctgaaggggatgattgcatccccttcccatttattgtaattgtaatgattacgattacattattgtgcgtccaaaaacataaattaggccaggcgtggtggctcatgcctattatcccagcactttgggaggccaatgttggcagattgcttgagctcaggaattcaagaccaggctgaccaatgtggtgaaaccccatctctactaaaaatacaaaaattagccaggcatggtggcaggcacctgtaatcccagcttcttgggaggctgaggcaggagaatcgcttgagcctgggaggtggaggctgcagtgagccaagatcatgccactgcactctaggctgggtgaaagagcaagactccatcttaaaaaacaacaacaacaaaacataaactagaaatttttttaagttaattatcctcttaaatcatgtagaaaatgaaaagtagagttacaactattgttaaaacaacgctggattttataaatctccgtgtatttacctacattgatatgtttttcttcatacgactttgtgcccctgtctaatatcttttcattttaacctgcaagaccccctttggatttctggtaggacatgtctagtggtaacaaattccttcagcttttgtttatctgagaatgtcttaatttctccctaatatttgaaggacagattttttgggtataaaattcttggttaacaatttttttttatttttaattttagcacattaaatatatccaccaatgccttctggcctgcaaagtttctgatgagaaatctacttgtaatcttattgatgatctattgtatgtaatgagtcacttctgtcttgctttcttttcttttttttttttttgttttttgtttgtttgtttgtttgtttgagacagagtcttgctctgtcacccaggctagagtgcaggggtgccatctcagctcactgcaacctccacctcccaggttcaagcgattctcctgcctcagcctcccaagtggctgggattacaggcatgcaccagcaggcttggctaatttttgtatttttagtagagatggggtttcaccgtgtaggccaggttggtttcaaactcctggcctcaagtgatacacccacattggcttcccaaagtgctgggattacaggtgtgagccaccatgcctgtaccctcttgctgctttcaagactttctctttgagactggatgcagtggcttacatctgtaataccagcactttgggaagctgaggtgaatggatcacctgagacctggtctctacaaaaaatacaataattaggcatatgtggtggcacatgcctgtagtcccagctacttgaaagtctgaggtgggaggattgactgagcctgggagttcaaggctgcagttagctgtgatcgtgccattgccctccagcctgggtgacagagtgataccctgtcttaaaaaaattctctctttgtctttgattttccacagtttgattataatgtgtctcagtgtgggtctctttgagttcatcttatttggagtttgttgagcttcttggatatttatattcatatctttcatcaaatttggaaagttttctatgacttttttttttcagataatctctccatccatttctgtttctctttctgaactccatcagtgcccacgttggtctgcttgagggtgctgtataggtcccttaggctttagttttgttcaatctttttccattttgttctttaaacttgataatttcagttgtcctatcttcaagtttgccgattctttctttggcttgcttcaatctgctttgaatccctctaacaaattttttatttcaattgttgtgctgttgagttctaaaaatttttttggtttcttcttggttcccccatcattttactgatatctcagttttgttcatacattttttttactttctcaatttcttctttagttttttgagcatctttaagacacttgctgtaaagtctttgtcttctatgtctgtttctagcttttcttggggacaatttctgtccccaagaaactgaacatttgaatttaatagtgtggtagtaggaaatcagattacgctctttccccagggtttgctgtttttaaaatttgtgttttttattattttaatctgtctccataccaagaatcagcctgaagtgtaaactttcactgggcatatgcagtaacttactaatttcccctatgtatgcagatgcttttgaatgccctagsctttaatgtctgactcccaaaaggggaaaatagaaaaatgatggaaatcagggtgtcaacctttgaaatctcctggaagttttggagagagaagcttatgaaaattggaaggaaggggccacagtgactgcctgcctctgtgtctgcacctccataatcagaagcaaaaatcaattatcagaacatagaaccctgatatttggaggacagagtttctattgctcacccttgctcccacaggctgcataaaagcttcttcagcaacacttgcacagctgcctgctactaggctggaggtagggaatggatagctgttgctgagctaaaagttccaactgaccaaaattaaccacaatttaccatctaagccttctcctggaaattgcaagccttcaatttacaccagaattttaatatagttacataaagcagattttgcctatgcaattattttctaggtggggacgttggattcatggtgcttcctacttcttcatctttcaaaaattctcttgaatataaaactaaccacatcacatagtcccctatggacttgtaaccttaaattcttatctctaataacatgatgctgtgaataaatatcacatgtagagctatctctacaactttctctttgtgtgagtttttcaaaatttccatccaagtcattgctctatcagtagttatggttatacagttttcccatgaaacactgagtttattaaagctcatgagatcttcttccagaactccttcatttagttgagtcacaaaaaagcagttgttcttatatttgttattgaaacacatttttcttaagaagatctatactaaatacaaatatatatatatcaaacctcccacataacatatatctgaatttttctaaaatcatcagtaatgctttctctgcatcatcaataatatttgctgacaaatgaatttatttctgttttttgccacattgattccatgtattattttagccatttttactacaaggagaacaagtatttctcattgatatttggcttgttgtctttttttcttatgtaaggaatatcaaaactggcttataaagtttggggaaattttatgaagaattgaactgagtaatacaaaactttcaacattgctttaaaatcttaagtttgtcttcatatctcagatgataagttgtttaaatgtcttgcaaattctgatgatttttaatggcacaatatgtacccttaagctaagatttgttgttaatgatatttagtgtaaatatatatttcaaataagtttttttataatatcgaatattttcaactgtattcttgtgacagatatccatgacctttggatcaaaatgggcctaagagccaataatgaaaagggtcaactctgccatttttttattgttgcttacttttgtattatgactatatagataatgtcttagatgtctttgagccagaaagtgggtgaataaagtgctatataggaggaaaataggtgcctagagcacctcaatttgctttgttcccccacctaggctgccagctttttattggcaatataatatagacatgaagagtataagcttgaaataagtgtctgggtatcatttactagctctgtggtcctacaaaactgcttaaactcttgctctttggtttcctcatctgtaaaatgaggacaatcatagtgcagccttatcatcaactccttttcctctttctccatattcaacacatcaaatctaacaaactccacctttaaaacatacccagaattcagccacttctcaagccctctaccattmcccttcaggctaagtcatctcctacctaaaatactacaggagcctcctaactagtctacttgcttcattcctggctcctcttattctgctttccacaaaacagccagataaattctttaaaatgtaagttaggacctgacacttttgttctggaactttctggtggtttcccattctaatctggataaaatccagagtccttgctgtagcctgcaaagccattcatggttgaccatccattccttctgtttactctcatgcttccctcactcactctgctccagcatttctggccttattgctcttctcaaacacagcaaggacacttctaccacatggaccttgctctaactcttcccttttctagaaaaattcttcccccatgtagccacaaggctagcatttactctattcagttcccttcaaatgttcacttagaaggtcttctctaatcactctrtgtaaagaagaatctccctttggatcattctcttttcctttatcctgctttatttttattaatggcacttttatatcaaacacatttcaaatcaatactctgcttatctgtctcctaccactagcccactggttctcaattttgggtgactttgcctcctggaagacatttggtaatgtctggaaacatttttgtctgtcacactgagggaaggagtagaggccagacatgcggttaagcaccctaaaatgctcagagaagttccctacagcaaaaaaaaaaaaaaaaaaaaattatctggtctaaaatatcaatattgagaaggccagctgtagggttcagcagcatgagagcaggaacctggtctatgttgtcccaggtatttacaacctggcacataggaggtccacaatacatttctgttaagtagctgaatcagatgagaatatggtaaagaatttagtacaaaatctggcaaatagtaactatttcttttaacactgaacaaatatttattgagttttatgatgtgccagacactgcactaacttcttaggacaaaacattaagcaaaacatcctaggcccctgttcacataaaggttgcctcttactggatgttaatattagttgttattaacagtgttatcactttaatttacatcagtcmtcctagctttacccaggatttgccatgagaccagggttttttgttttattttgctttgtgttttgataggattcttatttttcagagatgcactggaagacttggagagtaggtttgccagtagcagcttggtatggtgtaaataagaactggagaatttgaaatccaataagctaggtcgatgttggggtagcacttagtataggtgttatcagtcaggataggcaaggtctgctacatatcaaaggtcttcaacttcttaggcctaaagcccattttttgctcacatacatgtccatgcctatggcttattttactgactaaagcaagtcatgtggctcaggctgatgtgaatggggcaagaacgtatgaytttacctgggggaagggaagagaatatttttagatgatgggaaaaccctctggttttttcatcttcaaaaatctgtctgattttctaaaatccattggctagatatttggttgcaagtcacagaaaggtatattggcgtagaaaaaagaaaatgtactgggtcatgtaaccaggcagtctagagagggagtggttagcaactcaaatgagtttttctccccagccctgcatctctcycccgaccttgttattgaggaagaggctcgctgcccaacacacataggagccactactgcagcaccgactttcaagaaaaagaaaggttggggggttgtgttgcaagctgactagcaaggaaacaggaggcaacagtcaaatmtgtctccctaatctaagggtgggtcaagcttttatggcatttctaactagttctagataataccaatgtagccaatctgccaggctgatggtgttagcaatcagaaggcacgtgcccaggcaattttggctctgtatcatctgtaacaacttaagcaatggttaattggtttgagctggtcctgtggttacaaccttagctytgtctccttctctctctgttggattcattcttttactatagacagtccatctacatgtggagkagatgactgacaatctctgaataacatcctttcagatccatgactcagaaaacaagtcatcttctcctccacatctacaatgaaaaaaatctggggaaggattttgattagcctggctgcctaccctcccagtcattattctgggaggaatgggagtacagtgattgcctggacctgaatcacatgtccatttctgtggccagggtaagggaagttgtctgtaattagcagcctccccagcatcatatgatcagaataggggagaaagaatttaccagaatttaccagtggaagaacagatcctgtacaggtgaagttagctgcaacattgaacccatacctaccctactctaaatacaatgaagcatgtaaaagccttttttttttaagctttaaagcattgttcacatgctaattgctgttattattcttttcaggttgaataaaaagccacattatttactagggtaaattaatgttggtggcagccaactattgttctatacacatagttagttggaagtaaagctgtaataaataggcaagaggttaccagcaaatggagtaagtcaatgacaaaagctgtttagtattaaacctagaagtggtgcttgttacttaggaatgacactacatctgcaagactgtacctatacagctgtaatgtgaaaaattctgcggtatgtattttctgagtgctattatgtttctggctggtgctaggggatattcaagaagagtaatacacagcccttctcttggagcaatgttcaactccaaccagatcccaatagctccgaatatgcagattatgtcaaggaaggatcaggacaaattgactgaatttttcacttttcctcctgatgccttgacagcctgtttctcatgcttactgaatgatgtttaatttaattcatgtgctcgaggcagcacactctgtgttgcagctgtgcacagtttgtttgaaagggctttcacggcaaggccaaaggcaggaagcacactgccgtgatgccttgatgaatagaccccttgggaaagaagcgcctttataatgaagtcacaaaagaaatcttcataaatcctcagaagcccagcggcttgcatgtgtgagtgcaactaaaatacttccaaaacgaccctgccaaaggtaaataaggccaatagtaggcagaatttttataaatctgactgctgtgtctccaggcaccattcctatagtcatttctctgtacacagccacacatgcacgcacacggacatgcataaacacatatgtgcatgcacacacactgtatccatcactgttatgaaccctgctcccatttctaggtcccaatgcctcctgcttttccaatcaaaacagagaaaaagaaataattgtcactctcccttgatgattgatcaactgggttactcttgtgttaatgaatttgaccttcgcaatcagtgttgcaattttaggccttgaactctaactgtgatagatgacagcctctgagaaaaggagagaggtgggttgatgggaatcatacttaacaatatcatgacagcagtcctgaaggtgaaactgattcagtctttttagcaagagcggggtacagtgatatgggatccatctctctgtgagcccatatcacttagatatattccttctagatgcccagttccaggaaaatgtccccagccttacttagctgaagtcctcaggtgctaacatttagacttattagctggaggctttttcctgaaaccggcatcaaaagggcactgtctcttgatcttcactccaggaaccggagctgcctcagaggtagtgaggctgcactgatgaacagcttcctttcctgtcctttattactgtgggttagtttgctgggcctgccataaccaagtaccacagggtggtggcttagacaacagaaatttattttctctcagttctggaggctgggagtccaagcttaaggcatcagcagggttcgtttcttcagaggcctctctccttggcttgaagattgccttcttttctctgtgtcttcccataagctgtcctctgtagttgcctgtgtcctaatctcctcttcttataaggacaccagtcrtattgaattggggcccactctaatgactttattttaacttaatctctttaaagaccctgtctctaaattcagtcacattctgagccaccaggggttagaacttcagcatatgaatttggggaactgcaattcaacccatactgacctgccactctctccttaccctgactggtggcctgggtactggtggactggttcccttcacctgccttaactgcctcatgcagggcaggtttggctgacccaggctccgtggaacccaagagaagaattgaaaggtgtccccctgaaaaaagccaagggacaaagccaagaagccttccaaagcaggaggtaagaaacttggcaagctggagagggtcctcaggtgctaacacttagctggaaagaggctgccagagggaggaagacggagaaggttaaatccaaatgacaaaagagggtggtctcggtcagcgccacagctggcaggctccagtccctggctgctttctggatgtttgtggcagcaaaacactaagatcacatggacacaaaggaggaaacagcagacaccaaggcctgtgtgaggttgaaggctgggaggagggagaagagcaaaaactacctattggatactatgttcgcttcctgggtgatgaaataatctgtacaccaaactcccaccacacacagtttacctatgtaacaagcctgcacatgtaccctgaacctaaaataaacgtttttgtaaaaagagaacctgagagagcataggcattaacccagctttacacaatttattcaaaatctgggcattcccgtctttgccttgctgtctctagcttgtgattctgtaacgttacacaytttgctttctctgttcaaccttctttctccccatagttactgagtgagctcatcatccttccagattttactaacatgtcacttctggtgtaaaggtttcttgactccrtatattttagtagttcagagatccaactaaattttcatgagaatagagacatgtctttgcactttgagtccccacatttgtaaattatcaacaaatgtttattcagtgaatgttttcaattgggaagattaaaatctttgaactcagtttatgtgctccttcctgtgtctcccgtccttatatgtagggaagtgcttgttataatacataggtcgatgccttcagcagtgygagcagtttaatgattgcgaaggcagattctggtgcctcattgcttgaacttgaatactgatttcactgtttcttggcttggtgaccgtttcagtttgctagggctgccaaaagaaagtagtacagactgagtggcttcaagagacatttattgtctcacagttcaggaggtgagaagtccaagactaaggggtcagcaggttggttccctctgaggactgtgatggagaatccgttccaggcctccctcccagctactggaagattgctggaatctttggcattcctcagcttctgctgtatcacactggaccctgccttcgtcttcacatgatgcactcgctgtgtgtgcagctatctccaaatttccactttttgtaaagacaagaggtatattgtattaggggccmaccagaccccagtacaacttaactaattacatatacaacaaccgtatattcagataaggtcacattctacagtcctgggggttaggacttcaacatatgaattttgggggaacacaattcaacccagtaacggtgacctttgacacactgcctagtttcagttcccatattagtaaaatagaataataatatatcctaccttatgaggttgttgagcaattaagtgaattaatatatataaagcrcttaagacagtacaaggcacaagtaagccctacttggcattagctgttatttctggtgtgtatatgtctgtctattccactaacctatcacaggtagagactatgcttagtcctacgtacaacggtattgcatcacatatagtacaacacatagcagagcactttgtgcctgatacacaatctttgattaaatgtaaggcagagatagttcagagtgatactggggcaggaactgaaagtctgtctgcatgtatgagacagtatattcggtatattaggctttgtcatcccatttatatagttagatctcaaagccttcccctaggaggaatttgaaactgctcctctttcttggtctctccctgaggtttccttgctttcttaaaaatgtgtagggattttggtactgcatacacaaatgctgttttgtcttcaggtatagagagataattcagcttgagcatcttacctttagttattggcataactgaatgcggcagttatgtggtgctttctcaattgtgatattatcagtgcaaggcaggataaagaagggaagagcaatgtgatatttcttcctcagaggcctgggtgggccatctggcaatctttaaatctgggtgccagattgaataacatgctttgggtgactttttaaatgcattattcaggggagatgttgttttaacctctgcacttcacacagctttctagctgatggaaatcttttctcccctttgcttgaaaattacatggaacgtagcccagtagagactaacaaatcagcaggagaattcctcagctggtctgaatagtacctaatgatggaaaaggtggttgaatcaagctacctaaagcaagagcaaggaaacgatgtgcaattgttcattccccaaatatgtgagacacagtctggttcctgattcggcaactcctcttgttccaaaaataggggaggtccaagtagtggaatgagaaaatagctgcacggggcacagtgggtttggcttctagccttgatcggattgctcattggtttcttgaaatcaataagatgtatcacttctctaggtgtcagttttcctttttgtacaatgcgattgttgaactatgactgcaatctttgaggtcctgcctctgcttttacttcctctataacattgtgcaaacctatagattctcggtcttctggctccagggtaaatacttttactctagtttctgacagcccaccacttaattactctgttgaagctcagtaccaatacctgtgttttctatattttattgtctcaaactgaactctaggtttgaatgagactctgatcttgctttacaagtaaatgaaacaaaggacaggtggggtcaaccctatttcttaattctgagaaattgtcttaatgactcaggaaagaagcatttctacatgaaagatagaggactattcatcatcattatgcatgtgtgttttttgtgaggtcttggcatgaaacagaaactgatagaaggaaatataaaaagtgaaaagcatgcctggaccttccctttaacttaaggcatcctagccggaaggctaaggtcactgataactgactgaaacagaagaagggactgtcagaaatacatcagctgctcacttttcaagtacagatcttgtttaaatgctttgaggtggtmacaagtcagttaagggactaactggctagggatgaaatgatctttggcacacttacccaagacaatgtgttttgattatcttggaagaaagatgctttgtaagggtgcagtgatctgggtcaccctacccaaatcatcaccaaatatttctctgaagcaagaggggatgtggatgtggaggaaattctgaaacctccagtcttgctgaacaatccctgtaacacaagtggggtggcgtggagaaggaggacggacacataccaagatccagattctaaaagcccatgatttttgagacttgtagtaagtgtattttcattcagacctagtttcttattagagccttgctgccgtagtgtgtttattctattaatcctaacggtatttacttcataatggagttccacgtgagttaacgcttccttaggtgggttttctcttaccgtgaatatttccaaccattcatagcactacttgcttgacctttcagaaaaatgattttttcatgagcagctttcttatactaggtactctttttcttaagaagggcctagagaaaagaaaattcagaatgccttagttatgtttttgtggtatatgcattttatcagcccttactgtggaggagcaattccatttatttagctgtggcctcctcaacgcttcatagaactggttgcagattggacttctagatattcgtgtcactggtggccattaaagccagggatgggctaattagctgaattgtacatttgaggagaaatcacttaagaagatgaaacatgtgaggtttgataaaaaccaaagacagtttttatacttacataacatttgatggaaaataaaatccagataatcccaatttcttcatatttaaattgtcaaaatattgctttgtcagaattgtttcatagacatacagttttttttttttttccaacaaagctcctcattttgtttggtcctatcaccagtactttattatttgtataaaagtttgaaactagcagggtcaaacataaaatttagcagtcatttatattatcaaaactccaacttcaactagtcctttggtaaaaattttatattcacattagctataaaaaaaacccagttgagtcaagagctttgtaaagtgactcattgctataaagaaactgagtaaccttaatagaattgatttgaatttcagttttcctatctaaaaaatgaagataataataacgcatctcccatagtgtcatggggtagacatgagataattaagggaacacattttgtgaaaggtaaaagtctaatattatcattgatttttaaccaaaagcaaatctaccaactataatkatgtaactaaactctaatattattgattttatccaaagcaaagccactaaaatatcatataactgtaaaatcacataacctaactataactctagttatataattacatactgatttagctgcccagaggaggcaaatcagaaatttttttatgtattaatatttagcatttctctaaactccatagttatactggttactcacagtcctctaccccttgaaaattgctcttgggtggaaaaaaatctccagtggggaaatttacacatttgtgtcaaagggggctgtaggtagaagagactctccactctttaagacaaagttctctagcactgcacgttctcttgaagccctaaggtaacacagctacagatggcaaaagggtagaaattggggcatgcgtgggggctcacacctgtaatcccaaaaactttgggaggccaaggcaggaagattgcttgagtacaggagtttgagaccagtccaggcaacatggcaagaccccatctctacaaaaaatacacaaattagcctggtgtagcggtgtgtgcctgtaatcccagccacttgggaggctgaggcaggaagatggcttgagccccaggaggtcaaggctgcagtgagctgtgactgtgccactgcactccagcctgggtgatagcgtgagtccgtgtctccaaaaaaaaaaaaaaaaagtcggtctgagttctgagttctcagaccatatggttctgttatgactacctaccatgggtaagaggctcctttggttaaataagacacccagcatctgtccattggttcagctgtatctaacagaaaacccaaattaacactggcttaaatgcacaaggacttttttttttatctcttgcaaaagaaatctgtaggagggagcctaaggcaatgtggcagccccacaaaattcatagagccccagcttcctgttatgttttcctggtgtacggtatatggcttatctgaaggtcagtcacctcaaggttcaagatggctcttggaacttcagtcaacgaattcatgttctggaaaataggataaagaaagggaggacccaaaaatgtcttcccttagctttttttcctccttttaagtaaccttcctggaagcccttcccaacaatgtatgctatcttgaaggccagaactgactaaatagatagctgcagaggagactaggaatgtaatattttagttagtgcatttttgcccccagtaatataggcattttattaataagataaaaggcaagaataggtgttggatgggcaactagtagcagctgccacacaaggtataaattattttggactctgggtaaagtgtacaaaggagaacctatggtcaaggagaattgctgccagtggcttgaccaacagtctacgtccacactcccgtttctgctgggaaccgatcactaataacctggctcgcctaccataggaaaaaagaaggagtaatagctcatatctattgtgtgcttactatttgacaaaaaatgcgtaatcgttttgcatgcattatttcattaaagcctcaggtcaagccataaagtaggtactagcactattcctattttacatatatgggaactgaggctctgtggttaattaacttgaccaagattactaggaagtgtgaaagtagagacttgaactcaggttctttcgtcttagaagcaagtgctctaccactgcactgtgctatmcacacacacacacacacacacaaaagggaaaaggaagaaaaaaagagttataaagaggtaacagaataaattaaatccctgaactaaaatgaaaaattgtatattaaaatgctaaaagttaatttttaaaaggtaaaatgatgacttatacaaacataaaattaacatgtgtcaaatattttaattaactgagtgaaccaataggatgtcaaacatgttcaaaagagaattcaatgaaatgcagatatataggcaatgaggaatgctgggaagaattttcaaatagatacaagactggtctattcattgggcaataatcaattgcattccaccaggcacaatttctttccatttctaaggatgagaatgactttctattatctgttttacatacagagtgaaggaaccaaaagataaaaaataacctggaaaggtgtgctagaaaggacactcagtaactttttgtctagttcaaagtttttcataatttaaaagtttttctagtgaacctagattatcttctccccattgcctgatataccagtgtttagggggatgtaaagaatatctcagagattcctttttcctacctaccctccaatttattcactactagatgtccagcagagagagagggaaggtcaaagaatgatcttttctctttgaactgtcctagtgtgttggtaataactttccaaactaagatggaaaattggattccagtggctgtcatgtcatctttcgtgaagtaattagcaaatgtatgttggatgccttcaatgtgccagagactctgctagatggacaaagtaggcatggttcctgctgtcagatacttaccgtatacaggggaaaacttaccttccagtagagggcaaatatgctgtccaatataacctacaaatgtgcactccacccaaccctgtgaattgcttctatgcacattatgtattttttaggtcttacattataacttgttcaaaacatcctttccaagcctggacagcttgtctgcctccttgttcttccccaattgttgagcagtttgtagcatcatcagaggaaaaacactattgcattaaaattgccagtgtggttttttgctgacagccaaactatgggtttggcagcatttccctcttaaaagcttcacatgacttccctctgtcacctttagagtttctgcagtgataaagaggcatcaacttgctcagtacagggaagccttctggactcctcaaattctgcccttaaatcggctcaaagacaaacagggaaggatgtttctgtctttgcctctcttcccctcccttccactctctcatctgtcatcctctgtctgtgtgttgtcctcattgccctgcctactaattctcatttgcaaaggtttttttgttttgttttgttttgttttgtttttttacagtcagatctcaggctgcttcctccagggattcatttactctttcctggcagcagatttcggagggctctgccttctgcacactgataattaagaaccagtgggccaagaggcatcttgcgcagtgctgagcaattcccctgaattccaggcaggaggcaggtgtacactgagggagagaaaggaaagagagagacagcgaccacgaccacatctatttcttccttcgacctttctcagaaaggagccaagccataatgttactgttgccagttaatagtcatgagctcaactgatgtaaacactgatgatagtcactttccttcaagtctgccactgcctatagtatttccttgttttgaacactgacctctctaggactcagtttcctgatttataaaatgacaacgtcggaacagttagttaggaaagagcttcagcttaagcattctgtttaactaaaataaagctgttgagtttttttgacagtaaagttaatgttgctttttataaatgttcaagcagatgttcagaattgcctattaaggagtgggatttgaaaggagagaataaaaggattggttaggtattctgttgtttggggagcttctgacttttttcttttaartgaaagtaaacacccgtacatggggaagagaatcaaacaacataggaaggtctaaaatttaaaaataaatcgtcccccacctaccccactcctgcctgtccacattctccagcgytaaccattctgagcttatgtctttttagttcttccattgattactatgactttatgtcataatgtatgtatttctgttttctgaattaccaactttggatatattgttgactcccaaaagakaaacttccctcttctggtgtgactcccaattttgtttggttatattatttctaggttgtcaagatatggaatacatcactgtctttgatgctttgtctatagattgcttctgaaaatctaagcccctaaaaagtcatattaagtataatgattatataaatactcttcactatggaatgaagttgattccttggacccatagaaaaggaaatgggatcctttgtcactgaactcttgccactccaagaggaatgttctagggctgggtgcggtggctcatgcctgtaatcccagcattttgggaggctgaggcaggtgggtcatctgaggtcaggagttcgagactagcctggccaacaagatgaaaccccatctctactaaaaatataaaaattagctgggtgtggtgatgcacgcctgttacccaagtactcggaggctgaggcaggagaatcgcttgaaaccaggaggcagaggctgcagtaagccgatattgcgccactgcactccagcctgggtgacagagtgggactctctcaaaaaaaagaaaaaaaaygttctatatatcaaaaacagataaaacttttccctgtcagattgcgtcccttctttcccttcatagtctggttgccactgtttcttttatatttctcttttccttatatttttccttgtatgttgtcatttgtcttatatgattttaaaatctttgaggtttttcatgtgtgaaaatgttttatattcccttatgatttacaagtttttgactgggtatasaattcaagcctcaaaatcgttttccttcagaagttgcttcattatctgctaatatcctgagatgctgatgagatttctgggattagtgtgattttagttcacccaaagcttagtgtaacttttttttaaccatgtaagatttaaggacttttctctttatctctagggttgtccagtkttgccgtgatgtatttagatgtggactaaggaactttatcctctctgcttcatatttagtgggccctttccatctaaagacgagtatctttcttgatttctgggaattgtttaatattatttatttatctattatgtacatgtcaacttgactgtttcttttacggttttggttgctacattctcagattttctcaaatttaccttctctattagtgtcttagccttaagctttgacaattcaccaaataagagttttgttcacaggactgaaactttaggtggtgctgtttgatagttttcttctctcagagtctgaaactagactctaaagttaccccaagctctactctgttaacgtttctggcttcagtatcctaagatctcttctaaggcatttcatcaaaaaaacagtgccaagagctttagccaggggacaaaacccagtgatatcagcctcacatactccaaagacccaaggtgagggaactggaacatgccagctccaatgatagtcctgggggtttcttctgctcctggaatttgatgattcaaaatttccattttactcccaaactcctttacagggaatctttcttagctctgatatttaggagttcagaataatatgttctggttttttccatcaatccaattcagtctgctttctgtcttttagagttccctcaaaatttctcctcctatgctagctttttaaatatacatgcatattaaggttttcttctgatttataacatttcctacattgctgggcaatataagaaaagagaggaggtagatacatttgcttagacctctgcttttactaatattttttaaagaaaaataaatttgctattttcataaaataatatcttattataaagaaagtaagcaattcagaaatttaataaagaacaaaaaatgtaaaccaaccataataatcattattaatattggtgaacagcactgcagacatttctaatgcaaatatagagaagaacagatagagaaaagtacttgtaggaaatttaacagaaggaaaagaaactgagataaaagaagagaaattgctaaactttaaacaaatgcttcttcaccataaaagaaatcactttctaaaggattcctctaaagttatggaaaacattagggaatttgaattattttttctactttatgataaaaatgttattttctatgaaagagatgaagtcatgaacactctcatatatttcccttcctcctctcccttttgttagctatatatcatttttatattgtcaaagtgtaaggtaattcccattgaaatatgaccaaatataacaaaactccatgtaattgtttagtatttgttctataatttgataggttaatttataaccattggtttttaaattatagcttctttattactaatttctttagattcatctcttatttatgtagattttgttgccactttggttcagcattttttmaaggaggtctcatgtgtgctacatgtcctgagttctttcatgttgacaatgtccatttattatctttataggtgaataacaccttctctggatttaatcttttggccacacttttgttttttctaaatattgtaaacgttgttttattgccttcatagaagaggctaatgacagcctgattttctttcagtttttaggtgatttatttttctgcctgggtgctcaaggaattaattctttattctttaaacccaaaatctttagcagaatatattttcataatgcataggaacattactgtaggaaatgttcttatggcccttatgtattttgtctatcagcaaatcgcttttttattttaataaaactttcttttaatatatcaagttatttttctattctatttttctgtcattctgagacattaactttatgctacctcattttaatctacatgttgtctgttaatttcttgttacagaaatcagtttgcttttttaaaatctgcactccttatgattatctcaaacttttctactaacagcatagtttaaaattttcaagtattcatacatacacagaggaagtgagtctaaatataaggaacaaagagtaataactaaatgaactcccatatctctacaacccagcctaagaactagaataatattactatatattaaaattcctatatatgaatacctctcctagattccatgctcctctgtttattccccaaagttactaacatcttaagttttatctwtagcataagagttttaaaaaattataccctaattaatacagtttacttttgaatacgtttgaccatttttataaaataaatcacactatatattcttcagcaacctgtctttcttctccttaaaattctgcttgtgaaatttatttatattaatacatgtgcctttagttatttctttatcactgttaaatactattcatagacagggtgtgtggttcatgcctgtaatcccaacactttgggaggctgaggtgagaggattatttgaggccaggagttcaagactagcctgagcaacataacaagaccccatctctaattttcaaaaaataagttaaaaataatattcataggatggatacagtatcatttatgcattcatttccctattaatgacttctagtttgtttcaacattttattattatcartattatatatattatatattatmtagtacacatgttcaaattttttctagaatgtatgcttctggggggtggtatttccaaattataagtacatctttaacttgacaataatgccaagtgattttctaaaatagttacatatatttgaacgtaatatattctctacctggttgatggctattattcttttattatgtcactttgcttcttgatttgtttccttgagtcaaatcttccttttaatctgagttctattgctttatcatcttttcttgaaattcttgttttatttcatctatattctttgacttatgtattcctttgcactttctcatttgatttgatccttgaaataacactgaagaataggtactattatgattcccattttataggtaaagwaatggactccmaggaaattatgcatcttggccacaggccacagctagtaaatggagratctaaactagcaaccgaggccttcacctccaaaatgcttgcttcttttcatgctttgagacagactataattacgtgctatattgtgtagtacagcctctaagactaattcagcttctaaactgaacaggaataagtaaacaaccatctatagtacatgtaagttattgaaaacccttctaaatgagacaagaacagcagcatatcagrtggaattactgccctgatctctcttggaacttacccctgtacctaaaaggatgaattctgctgctaccacctgaagtgtgtgtgtgtatgtgtacgtgtatgtgtatgcatacgtgtatgtgcatgtgtgtgttttaagcagctgatacaagtgacagtactattgacatagactttagaaacccaatttaatcacaaggaaacaggattaaaacaagaatatgatgtgcgtttgcttgggcctcgatgatgtctgagaagagcctttatttggaatatccctccatcctgagctcttagaaaaaaaccaggtcacacagggtaaacgtgtgcagcaattaatgtggtggatggtagaactttgccctgtgttaggggacttttctagcacttggaggggcatagtgaagttcatttattcctggaaaggatctctctcttgagttacagttttagaagaatggcgtatgaaatgacaggctacccgaagataatctatactgagaatgttgtaaaccaaagatgaggggagacagcaagactgactcaaagaacagtcatgcatctagacttagctgcccttctgtattagatcaattgctggttgagtttatgtcttattttcaaatatctttgtcaaggaatttaatcaaacctaggataatcaaataattattttcattgtttcctaaagattgatctaaagagatgcatatatatctggtggggaaaaaatacctgcaaagtattcaaataagtttgggtgtttttaatttaaccaagccaagagttttctcttctgtagaatttctcaaagctattaatatgctgatgtactctgaatttgtaagagggatgtatattacaaagaaattctaagttatttgatcatgaagcccttgtattcatggactcctggaacatatttcaagaaattttgctttcttctaattataaaatattcaaactagagcatgcctcaaaacaactccagttttaaaccctaattttacaagaagggaaactaaattttagaggctttaagtgacttccccaaggtcacatagctctttggtgataaaggtagaactaaaatttgtatcttcagattcctgatcttgtgtgaaactgatyaaaaatagattaagtcacaasatgcaatgacctgaaggcaggcctatttgctcccttccaggcatgtgatgtgtccttctttgccagtgagaataatgagacctaaaattatttcctgtggacccaaaattgcacttctgacagctcmtgaaatcctctctctgaaaccttattacatctctgctctccctaaagattcaagagtctagggatgtcctctctaaattctgcatataaggcctacatcacagatattcacctgaatrtcttattatgttgtgccctccagcaacacttagagagcaactccccttccagcgtcctgttccaagttgacaagtctgtggcaagaggcaatttcttatcctgaggttatctggacagcctcagaccccataagcagaatttagagagggcttgaaatttagaaaagggaccacctttctggtaagcagtggggcagtgtatatcaaaaacccttaccagcttcatgccctttaactttgaaggaaatagcagaaagtgtattttcagatttaattgcactagtatttgtcaatgcactattttaatagaaatttgaaataacctgagtatccaataataggagataccaaacaaatcaatatacatctattaaatactatatagccaataaatgtatgttacagaaccactcatggaaagatgtctagaacagagcttcccaacaactttgctaggtattgaaattttgatgtcctttgccctcatggcaggtagtcagggtctagtgtggccagagtcccccactcaaatgtctcaaaatgcaagcaggctcttctttcacccaagtgtaccgtaaaattatttggttttaaaaatgtgtgccataatgtaaaaatgttcagaaaactgatctaaaacatattgctgggaaaaaattataaagtattattacattgagttttgagatatactccaatgtctgattgaaaacataccttgcctatatctggaatactagtaatttttatgtttttgtttatttgttaatttacatttctctttttaagtaaaaasgttttttttttcttgacagagtctcactctgtcacctaggctggagtgcagtggcaagatctcagctcactacaacctccctcccctgagttcaagggaycmtcccacctcagcctcctgagtagctgattacaggcgtactccaccacgtccgactaactttttttgtatatttagtagaatcgagtttcaccatgttagccaggctagtctcaaactcctgacctcaagtgatctgcccacctcagcttcccaaagtgctgggattacaggtgtaagccaccacacctggccaaaagtattatttaataagaataatataataataattttaatgcttacatagctcttaatatattttatttggtttgatcctcaaacctatgaagtagtcacrgccatcattgttttcattacataaatgtcattttttaagtccatatttgaagctagtaggaactggacaagttgatgctggcagaagaaggtagaaacaaaatatatctgaaaggtagaaataagaaaatataataactaattacctgtgggaactaagtacacctccaggacactggggattgtggtattaatgaccaaaacagaatcatggaaatgcagtattttacaaaggttttaagggcaaactcagggaatgattcatgttcaagaagcggctgagttttgctgtttacttgttatttaggaggtgcaaaactcactggtgaaaatgtccaagttattgttgaaactcagctgagaggacgaaacaaaagatgcaatctggatagtcattcacaatggagccacagtcagagctgtgcaggagaactgattctcctgggaagagtgtagagagaaaagcaggacaccaaaagctcgagcctttagtctttgtctctgcagaactcccagggacttgacttctatgtgtggaatgatgatagaatagcattccaagagtcgctggccatggatgaatactgacaatggatgacatgttcaaatagttttcttcgttattcctccatagatcmgagattacttgattttaaaaaacaaagtaagaaagacattttgtatgctcacaggggatttgttggtgagcagcaccctagaagataggattaatgtgaaaggtatcctagccatttgaagaagtgatcagaaattaagaaggtgccactgaattataacaagtgcatagtacattgcacttaggatgggyaaagggattaagctacaamartacaaaatggaaggactcwgacaggctgtaaatacaatgagcaaagatctacaagtctcagagaggaacaactctctgagttgtttatatatttatgctggcaaatataagatgtttactagaaaatatgttttcaggcagtagaaagacataaatataataattcaatcaccctgtcatatttggcwttcagaagaaatacattagaaacataataaatgtatttctcttcagggtgcctcttttaaaagagtttaaatttattaaataaaatatcaaggacatcaaaaaattaatacatgactgtaaaaatgtattcctaaagaaaggtcagtaatcatggtatttatttttgacatcaaaagaccaaggaaaaatttaataaggatcaagatcattggcctgcgtgcagtggctcacacctgtaatcccagcactttgggaggctgaggtggcaggatcactcgagctcaggaggttgagactgcagtgagccatgatcacaccactgcactccagtctaggctacaaactgagaccctatctcaaaaccaagaaaaataaaaaagatcattaatctgtagaagattattgtacagagttgtttggcatctctattgcaagtagaacaatgggaaataaactgaagccatgaatttaaaaaatccccccaaatatatatttatatgtatacactcacacacagaccacacatactggcatacatacacatatatgtgtatgtttgtgtaaagagtctagaagagaatgcagcaaaatattaatagttattatttctatgcaataggattgtaggtgttttatatctgtatcttttccaaaattatctacattaaacatgcaatttttgtgtagtaagacaaataagttctttttctttagaagtgtttctagaaacaaatgttacttctttctccttcctgtcacattctcagcccttaatcgataaaactcatttttcataagatcctgaataacaacagttctggcaccccattttatctttttcagatgctagtgaaaaacaatcacctttcagacaagatcattgttttgccaggaaaaactgaagacgtctcacttcctgaggctgtagatrtgatcatttccgaaccaatgggatacatgctgttcaatgaacggatgctagagagttatcttcattccaaaaaatggctaaaatcaaatggtaagttggcccattcttggtttaaaaaacagtctaacttctstgtaaaattttgccactctctgtcccctacatctggttctgtacagaaagaaggagagagcatttctgttatactcaattatttgtttttctcatctcattcttccataacaaattaactcatctccaatcgtaagaacacaggtatgctgcacagtattcaacatggtgtagagagccaggtctgagttctgtgttttttgtcctagttcaatcccttcattccttaattaacttgggctaacacttgaccttttggccttggtttcctcatctgtataatgacattattacacataatctccaatgtcctttcaagtgttggccttctgtaattgaggaactgtctggggtctgcttgttctttttggtatattttttccctactgtatttctctctctgtctatgatcactacacatagtcaagataatattaaatctaatatgctttttgtgctttccaagtgactgcatgtgctaagcaatttgaataaattattttataaaatccttataaagtctgaatgatgaaggttttcaatttatttgaggggttatccttgaagctaattttgcaaccttccccagggacatttgacaatgtctggagacattttggttgtcacaatggcagcaggggctgggatcctagcatctagtgaataggggcaaagatgctgtgaagcatccttcgatgcacaaggcagtcccttacatcaaagaattatctagcccaaaatgtcaatggtatacgattgagatctgggttagcgggggacgttgttatcatcccattttataaagagaaaactgagactcaatgaggaaaagtaacatggcgagaacaaacatctaacaattggcaggccaagaatttcagcctacatccatctgacactgaagcctacactcataacttgggcacacacactagctttccactcttcaccagagaaagttggcacattccaacagcaggtgttttcaawtaaagcatggcagataacttgccaattttaagttgcatctcatgagaatttcagctccttccccagttgtatttacttaaattaccaatgttgtagctccgtaccttgatattcaatgaaaacgaaatagtgaacaaccatgcaactcatacataccaacatgcatataagtgaagtttgaagtttataatttcctacatgcttcaaacttcagaaataggcactaaaagaaaactcatgtataaataaataaataagctcaggcaaagtatacctaacatcaagaacttcattagcaatcttgctgtaaaacagctcaggacgctcttggaagccttgtgtgtatgcgataaaattgaactgtgggagatgaaagtgaaggtacaaagtggcttggatttcctcctcaatgcctccaggaagaatttgtatgtttttttcctggacattttcagatggttaggtgcttctgtatgatgagatttgtaatgtagttaattcacgtgcatcacctgagcccctcttaaactgagtatttagataatatctaggtatcttttctccccggrtatttgaaatgaatatgacattttatactgggctatatatctttaggcaagtagaaatgaatactgattttattggctttctaggctatgtattcctcagggaagggtgattgatttttttctaattatttatatattccatcaaaataagacatagtttaaaacatcaattaataataaaaaggcttataatgaaaaatagtagccttctgccacgcctccttctatcatcagactgctccccaaaggcaactgctttcaactctatctgttgtttcttctattatttacctacatattcctgtctaagatgattacattgctattctcgtcactctctgcttgagaatttagctttcctgaatagcagctccttccttcctgatgcacctaccccacccccattctctcartatatttagataggtcctcagttcctttatcccaacccttggtgccagatatgtttcagaattcagaagaaggactttggaaagttaatatcacctaccatgcattacttaattctccccagtgggatctgaggcaacactctgtaatgaaagacattatattgctgcaacaaaacataagaatattgatacaaagtggaataaataaagactacaaataaactgtcctgtcagttcaggtcaggttttgccatgaaatgatgctgctgcaaacttataaaaacctgttgcttttcagatctcagaatttagcataaagaaatataggcctagatcattatttggttaaattaagaatcagcgtttccagtgttatgatgtaatgtaactattgttgaantctgagtcagttggtatagtagatgctctatgcttatgtatgttttctcatatagtcttttgtttttcctggagttaattgtcttggtttctttcattagcttagcttttatatatttgtggctaaatgtttctacgctccagtagatctgacagatgccaatcaatatgtgttcctctgttgctcccctctattcagtagtcctctggccttccctagcaacatgaactgagtgttctccagccccatctcatgactgtcatacattgactttctatcatcatccttttgtcttcctctttgttggtttacgacatcatttcggcaaaggatattctctaccagcttctgcagaaaaggagcttgagaagttactttttatcgagcccttgtattattatttggtcaagaatataacttaaaaacaatttttactcaatatttttaaagcttggtgttttggtttttgtgttttgtttctgtctgcaaatcttgctattgagaattccaatgccattctgacwcctgctcctttagagtaacaaagttttcccctctagatgcttttagtatcttctctttatttctagtgttctaatgagaatcttttttcagttcttgtgctggaaattcagtgaacatgtttaatcaggagtctgattttcttctgctctcagaattttcaaaatattttacatttgattttctcccctccattttatctgacattcttagaattcctattaggttgaggctcataacatcatcctctaaatcttcccaagtttacacaagcagagatacatattacttctctgaggttatttaatatccttctatcatctcgaaattgaaaaaccactaagcaatcattattgttttgataccaatgcctgagatttagatggggacatattaatgaggttatgatcatgctttgcccctgaccacttctgaaaataccccaagtaaaataatctgttttaacagatatggaaagccacatagtttcaggatggggcactgactatcagatgagattccactccctggattttgctccgctatttgttagctctgtgatcgtgaccaagtaatgtaaatttctctgttttcttgtttataaaatgcacataataatagaacccactttatcttagtatgagaattacataaattaatgcatgggaagcccttggaaaagtacatgacagggttatcataactgagaaattttagctattattgttgtttttatgacaacatctctggtgtcttaagtcagccttatttctgaaatatagttaatagttcctctttctttcatgtgcaatttaataaatggctataaaaagattttccctaaaattgcaagagtaacaatgctgatcatcaggtctgcctactcagaaaggcccgacttcaggcatgccaatctaggtgctcatttgcccactgaagaatctacctttcctgtggtgattgtggatgccaagaaataagcacaaatgtgtatttcccagcataaagattggtgagcatccataaaaacataaatcccaacagcacctaagaagacaggtggtcgatctgattctacatggacaaagtctgagaatgagaataataatgtgatggaaggatgggattgtgattatttttaaagctaaattattgttacaataaataagagattaaataaataaataaacatatccagaattcataggacatacagaaaggaaaaaaaaagccagtagctgagaaggcaactgccaggttaaacggcttgcctaagtctctacaagcttttatcattgtattgctttctgacttgctttgatattcttttctatagcccctctactcttctgcctaattttttatacttgcattgagacaaaattatattttatgctgtcatgtcataactgaagcaaaagaatggaattgctctcaggtggcaggtgagtatagccttcaatcagaaagcaatagaaactgacttctgggtctgttgtgttttgctcattaggaatgatgttcccgacattcagcgacatccacttggcccctttttctgatgaacagctctacgtggaacacttctccagagccaatttttggtaatgttcttttctcctcccttcctttcccttcaaagtaaaccagagtttttaaaactattgctaattggggtcatatgcctcttgtttggtggggagaggggaggcggcggcagtgaggcacctatcccgtacactgtagwatgtttagcagtatccctggtctctacctactagatatcatcttccccccagagttatgacaaccacaaacgctctccagacattgccaaatgtccccttgcaggtcaaaatcacccccagttgagaccactactcataaatcagagacaggtgaatcaaggagccgttcatgcaacatcaaacatccggaaagctatcctgctgctaaaacaatatcctcccctgcctgctgttkctctcttcccatttttcaccatccacttctttgactcagggcaatggcttctgttaggacttgaccttgtcagagaacatatcaatcagtacacctgataaatgagttgatcaaaccctttttgagttttaattggcggttggcttttacacccacctcacccgtctgagattgaatttctttatgtgtagaatgggaactgatacaaaagctcctgccggttttaaaccaccattgtttctgggattcctttctgagaactggtttttacaagaagaaggaaggaacgagaatgggagggagaaagagagcagatctcatccttgttggaatgttacatgtgtgggagcacaggcatggcctgcaggggggtcaggatcctcaaatttaaggtttgactttggtctgaggtatacagggccttataatacaaagaggtccaaagttgatttctgggtttttctctttgtaatcctagagaagggacagcaaataggaggtactttggtttcctgggctactaaactctttgaggagtggggtcaaatggctgatttttctttccattttttttttggcaaagtagactttcctagcacagattcagggcattttgtggttttgttgaatctacaattctgagattctaagccacaggctttcccgtgggggtgaatggcttcttggtgtatatatgtgtcagttggggcagggggacggtgggggagcttttaccttaataatcattgttctgtgagattatgctgaccctaaatgattacatttgaattatgacctcctgaggaaatgcagagatgaaagggttacgaattttaagtagcagaatagaccagaccaacaaactagwggtttgttgtccaggcagtccttgygtgaccttccaaccataccatctgctgccatcttactaacttgaggatattaatgatcacagtggtttggctcagatttccaccacgtaccaacatgctgctatttattgcatctaaaaatgaaaaacagaaacaaaaacgaaaacataatcttctctagatgtcgctttcccagtcagccatggccaattctctaagcccctttcagcaaaattcctcaaaagagttgtctatactcagtgtccaaytccccccttctgtttctcactggagccatttctccaaaaccactcttttcgaggtcaccagtgccctgacctccacattgctaattccagtgatcaactgtcacttctcaacttatttaacttaccggcatcatttgaaacactctttttgccccatgatcttttgatttttctcctcccttgctggaactttctcaaccagctatcccttcgctgttacttgtctccataagaccctgatgttggagtgccccaagacgcagtgtttggatcttttctctgtgcaggctcacttggtgagctcacccattctcataactacaaataccatccatagactaatggttcccaagtgtccctctccagtgcagacgtatcctccaaactttgtattttcctagccaattgcctcctggatgtttccccccttgcagaaatttactgtgtgcaaaattcaacttctgatctcccaatgtctacccaaaacctactgtactcacagtttttctgtctcagttgataacaactttatcctctccatcattcaagccaagaattttgaaggcctctctttctttatctcctgaatccaaaccgtcaagtaattatattggttctattttcaaaaygtatccagaatcacaccaatttttattatattctctgtttcctcgttttctcaacaccatcrtctctcatctagattactgcaatagcttcttacctgtctcttctcaacagagccaaagcctcgcaggagcttcttcatagtctggctcctaggtactctctagtctcatttcctactaccatgttcatttggctcctgctgcacaggcctgtgtgctgatcctcagacacatcaggcatgctcctaagttagggccttcgcatttgcagttttttttgttttttttttttactttgaatactttttcctcaatgttcacatggtcaattcttttaactccatgaagtctttgtcaaatgccaccttctcaatgaratctaccctgaccatcctattttaaattgtacccataccatgcccaacccttctttttcaattctgtgtttttcctcgaacacttacagcatcctaaaagatatataaccccttcctattattatctatggtctgtatccctcttgataaaatgtaagcactgcaaggtcagcagtgctgtcagtttccactgatgtatcccaagcacccagaacagtgcctgccacagggtaggctctcagtaaatgtttctgaatgaataaaaacttcagtatgcccaaacatgcatgaaaataattattaagattgtaggtgatatatttccggtttttctctcctttctttacaaaaacagaatcataagtaccattttatagcttggttttgttttgttttgtttttttactttcacaatactttgttgacatgttctcatatcatttacatacttttggctgaagagtattttgttactcataatttattaactcaagtttcaatgttgaatattaaattatttgaattgctattttagtcctatagattctataacaaaccacagcaaggtttcaatattctgtaagaatatagaatcctatagaattctatatcctaaattctataagacacaacactaaagtgaacctcctttcatataaattttggtgtacattctgattatttccgtatgataaattgctaaaagcagaattactggaccaaaaaatgtgaagaagcaacttataaaaaattattcttatatattgccaaattgccctctagaaaagttttaccaattaacacttccaccagtggtatttgggaatgtctgctaactcttgcccatacgggatatgctttttaaaatgccaatttgatttgcaaaaaaaatggtggccagtttatttttaatctgtatttctttgatagctggtgcatttgaacgattatttttagtcaacaaacagaaaaatattttaaaaaatatatagttatcaaaattcacagcctttgctttccttctaattcctctccctttgtgaggtttctgcattagatgactggcatttgagtatcttgctgctttgatccaggaaacaggtggtgaatgcttgcgtgatttctgtcagaagaagcaaagaagtggatatgtacgctgggagcggggtgaggagtggtgcgaaaaataagtctgggtgagatctctcagctgagagattaaggagcaaccaactggctaaaccagatcatcagatgcagtcagttttcagtcctcacctgattttcctattatttgcacttgacacagttgactctctttgctccgcttctcaagcctgaacctggtttttctcctacctttctggctcctacttctcagtctcctttgctgattcttcctcatggcccaaatctttaacattggagtgactccaggtttctttcttacatgtcttcccctttctgtcaacactcactgtcttacttgatctcattctgtctcttggctataaataccatctttctgtctacaactcacatagttagaactccagcccagacctctgcccagaaccacagacttggatgtccaactggctgttgacaactccacttggatgtctattgggcatctcaaaattaacatgcttaaatgcaagctactgatcctcaccatctccccactgcccacctttgcaaaacaaaacacccctgtgtctactacagtcttggcaatagccttctaacttaaatcctctttttaaacaacaaccacgctcttgatgaaacataattcagattatattatttcactgtgtaaagtcttctagtggcttccctgtttctgcatagtgaaagccaaagttctcataatggttgggaagaccacacatgatctagttcctaccttgctacccctctgactctgtctcctactacttcctctctcactctgtctcccctctggcctcaatggctggcctccttgctttccctggaacaaatcaggcatgctcctgcctccctgacattcgctctgcccaagacacagacaatccggtgacttttctcacctcctgcaggtctttgctcacatgccaccgtcccagagaaaccttctattaattacaaactgcagtctctttcctcctgcaagcctgtaccacacttctcaattcatttttctttataccacgtatcaccatataccatattatatgtttttacttatttattgtctatctcccccatgagactacaagttccctaagtgtggctgctycatttacttctgtagccccatcatccaacctggttaacagtagttgctgcagacatttttgatgattagaagacaaatgcattgatttgtaaaaattctgtctatattaaggacattaagactgycgtattttcttcagaatttccagcttgctttgtgattttatttgtgatagttttgaccacaaaacaacttaaactttttatgtagctggatctaccagtaattgtattttcttgtttctttattttcctttgtaattttttagctccctgtccccctccccatgaattgggtattaacttccttttttaaagtttttacttttccatgtaacattttttaaaatttgcatttaactctgaaattcatcttagtacacagtctgcaataactatataactttatcctttccaaataaccaattatgaggctctctcttagtagaccaaattattacattctgatgctagtagcagtcacctataaaaatattaattatcttttatatgatgattccttgggccccattaatcaaggtgatgagaattatctcctgagagtaaggcccatcataaagaatcatcattcccaaatgtaattcttcttaatatgttgggtacctctggcattactgaaaataattggctcaggggttttacmccaaagcctgtagatacaattttaaatggattctcatatgaagaaaaatatatacataggatcaattaagaggtgtgccaaatattgtcaagaagcttgagactaaactagactgtttttttacatttattacagttatagaacataaaagcataaacaaaataggtagtagttaaaagccagatgattcagactctagatccagatggaactatgtttaaatcttggttctgtcaattaccaactgcaaagccttagccaagttaatttaatctccctgagattaatttcaatccataaattgaagaagataattttacctacctggagatgatgaaatttcagggatgggtcctctgcttgtacttttctaccataaaagccctttcttcatgggccaggttacccatggtgtagggttcttccagatgctgaatatrtctttcccaattacatattcagggaccaggaaaataatcatagggtttgcatgaaacaagtggatacactgtgagatggacttggtccaaaactccacttattacctatcctccacagccttcactaaccagagacattctagattttttttgtatcaatatcagctcaaacttctcatctaacatttctcaaaaaatcgaggtatccttccttcaccacggttgctttgtcatagaaaccctggtctctctggagaaggagtggggaatgttttctgtgtgtgcttgtggtggcagtgagggtccttcctcaagaggactgggactctacttaagtctggaccacttggatctggaatctgggtgagggacttaatatttccattgtgacagctgacatcattcttctgctcatgagctagccattttttgttatacaaattgagcactatcctagctgactttccatctattttacctctctagtaacactaggatctattaacaccaaaggttcttataggtcaaggtgtccgattgctactctaccctagctttttacacagtaattatgccattattgcctaggccagataattactgctttcctgctctgacattctgaaatgtcmtccaaaatgtgttcattcagagcacaatttaatggctacatcacctaccaccatctttcatctaccaaggacaactactctaaggctctcaaagatgccactgttacctaatcagttttttccctattaccttgtaaaaggaaagtttcctgtgctcygagaaaatagtcaggttgaatgttcttaggtattccatagtcaatccatctagaatttccatgtccctgagccttctgactccttcctcaatgcagcagaagttctgaaatctccacctcattgactgcaggccatcatgatgaccaagctttaaagtgacatccagtggattattaggactggcttctggtgtcttgttagaacactgaaactatgagtgcgccatttcaatgagttgcactctctcctcacttacatcctgccctctttatggacttaaaatctaatctaatacaatatttcctagttcttagcagaaaatattatctggcttctgcagttttttaggtatgtaaattatctccttctggaatgggaattgtgtttactgctctggctgtgcttgagttattggcctgacagctatgaggaactattagcctgaaggcaatgagtgatcatgaggcagatcttgaagagaataaaatcatctttcaaggcacaggctcttggagaagttgttgcatagtctttaagcaaggctgttttcctctggcaaagsgggaaagaattctgcctctgctggcttgaaagattcaggggaattggaaagatttcaggcttctctgctttgccmaccctattatcccaaccccaggtctcagggccataccctttccctgtcggggccacaattttaatacataagacctgtcaagagtgcatatccaatctcctctgcagctcttccactattaccgttttactctcttatttggagtagggggatgggacagtttcagttccaaagatgtggcttctacttgtcaaattctatacatgattttcagcacagcaggccttggagcaccaaagagataggaatttctttatatctgctagaaagcccctctggatttcacagtgtgtcttgagttgggagttggctgctctgagattaaaactttctttttgcaaagcttgcaatgctgtcaacagaggcttgcctgctcctcaattcatggaattatcattgctccaaaatttcaagcacacagttgccataaagcccaatgtttcaccttctacctttactgcatcctaattaaccatcagcaagaccattagaaattgtgatgaaaggctcggtgcaatggctcacgcctgtaatcccagcactttgggaggccaaggtgggtggctctcaggagtttgagaccaggctggccaacgtggtgaaaccctgtctctactracaaaaattagctgggtgtggtggcagscacctctagtaccagctacttgggaggctgaggcagagagaatcacttgaacctgggagacggaggttgaagtgagccgagatggcaccactgcactccagcctgggcaacagtgtatataggtgaagcttatatactacaactttattaagaagtgtatttctagtgaaacaagaattgggagaaagaagaatgaggcagggaatgaggggagtgctggtgcaaatgtgcattataattatgagatctttggggtgttgcttcgccagccagaaacctctgtggccagtggcacctttgactgagtttagcttggttctgcctactcagcctggcaggctgcattcggctcacactaccagcctggatcccaggatgccaagggcaagccaggtgcggagtggcaaggggtgtgtgagcaagcatggggtctggtctctgcgcatagccaggcatgccaactgctgctgccggacaggcagctccaggtgccagcactggcaccggctccctgcaaggccacagctggaccaggtgcactacagtcagcttccacggctggcactggggaacacagtagtgcccagaagcttagagccttccaggaactgcagggccccaaagagagagtcacagacctggctcaaggagctcccaggtctgggatccccgaagggctgcagccctcctcttctttttgcctgcaaaatggagagcaaagggtgtgtttcagccatgtttgtatcacggctcttttagccctggatggcgagtcctgagttcttgtcctgcatacaggaagaatgaggtattcagacaagtggagggtgagcaaaacgaagaggagctttattgagcaaaagaacagctcagaggagacccacagtgggtagctcctctctgtagccagggtgtccggaagagggttaagctcttagcagagagggtagctcctctctgcagctgttcatccagttgtctctccgtcctccctttgagtctggctgaatcccaggtttttacgggactcaaaggggaggaagtgcgtgctgattggtccacaggtggctatgggcccacccaggggaaggcaccacaagttcccctcaggtcagggtgactggcggcccagccctcaggtttcaggccctccctggcttgaaggtgaggcttcaccagggacccgtccccttctgcccaggagcctgtctgcctccagccactgtccatgccttcatgccaaggggcgcctgcaggccagtgctgggctgtcctcagccrcccctaagcctccctttcatgtttgtcagagcccaaagtctagaggaggtcgaggtggcagggggctggtgtgttaacactgccgcaatcgtgtgcacacctatccagactgcaacaccgcctggactcggccccaacttagctccaagatcraagtggacaccaacagcagggagaggccaggcagcagcagcaggaacttcccagcctgctgggggcaagsggatcctcctgggcccccaagagcgcagagatgcctgggtctgcagccaccctgcagcggctgcagctgcaccctagaagctcttgctccaaattggaaggggcggggytctcgcctgtctccaggtcccaccagctccgtggagcttgcagccctggtggcgcctccttgcagcctgaggcgggggcttcatgtcctcactgggcccgggcctacgactggggcaggggtgacgttgtcacgagttctccctgcggccyggggctccccctcgtcctgcttactaaccgctgcccccttgaacagtgtgtctggttcacccactgggctgaaactctccaatgaccaggacgcgccccctgcctcagtaccgcctcgccggctgacggccatgcctggggttggggggcgtctccaggagcagatggcaggcacggggcctcaccatcaggattgtctggcttagcggtcaccttaatgtggggcaggtcctggggatacggcctcaggcggccccatacggagcctcttcctgaggcrcaggaacttggcgccatcggcgggttgggcgcagtggtcatgccactgggcaggtcctcgaagtgggtgccgctcccacttcttgccctgggcccctgaagcggggccccagttccatgtctcgggcccggcccccatgctccgcgtgcaagcgcggcaccgccctgggcccagttctgtcttggggaccctctctgcccattttctgtgcctcacctccctactctccctccagggggtggctgggcccagccctattcccggggctcccaggggtgagttctcagggcagcaggttccgggggcgctcctaggtgcaggctccaggggctgcmcacctcagagtctgtacctgaggacccgcracctactcctgtaccccactgcagccggcgtcatggcagcggctgcttcgcacaggctgccgctgccatcgttaccatgctgaccatcaggtagtattaaacgggattsctggctctctcaggaccatcttcaaaagatcaaatgaactacatccaggacagtttatacrgcagayaaacgaatttatacactggcttttatctcctcatttatcaaatacccatcctgccaacattaactagcccttctgggtcttatggcgtctcatacccaaagttaacagggatgccccagggcaggaggagagaggcacactgtgcaggcctggggtgagacattgtggcaccgtgcccatgygaggtcagaggagcccatcctttggcatagctggtgcagaacacgtggctgaggattccagagacaggtaagaaagatctgggatggcacttaaaaggtgatrtaccacctaaggcaccaaacgatattttccagttcccttgtcagagtattatgcatggatagtatgcatctatcatgcttgaccagagcagagccaattgagtgatatcagggatcccagcggtgaatggcctgtagtcaattgttttttacagaaatcggaggtctgtgcttgcaaaggatgagggaagataaatgtaggtagaatattgccataggcaatgagagctccctttttgctcctttctactctgagtccactaaataccttgttgcccatggtactactgagaaacattatttktaaagaaatccattctactgagtggacaagctgctgaattctactgtgaagktaatgaacgatttgttcctagcctaattatgcactaacctaaatttcccactaaagtttcttttgcataattagagttttaggccttctggtcattcccaaaagtatatttgaccctgatggtcactagttcatagaaatactatgtagatcaaataaaaatatttcaaattagcatacgagataaccaaatttttttcagaagccaagtaaacagcgcaaagcatcacagagaaagaacttatgtaggaatattaccataaccaaaaaatcctgtcagtattttcatgtgcccctgtccttatcccattcatatttcagtgatttcttagtctctaatcctctttcaattacctagtactcattcttgatatatcctctgtatctctgtttatatctgcagctcttgaactcatctggcttatgctcttaggataagccttgatttctgtatttatcttgtttcataacgtttgtcaaactcatggctcttttataatattctgcctctatcaagctcatgcctcttctacatatcctgacttgtgttgtcagggatatgcagtattcccatcccctggcccaattatgtgttacaaaatttagttcagtcctggtagaattaggacttcactgaaccaggcaaagctattctctcagaattatgtgtatatagtacagtacctaaagacccattaatttttttcaattaagacgtttttgttttaagtggccaaaagtcccacaaaaagtcgcttaagaaaaaagaatatttctgactaatgtatctgaaaagtctaaggacagattcagcttctcagacacaaatggatttcaaggcacttatattggattctggtctctttctatcactcagcttggctccattcttaggtagcttttccctcatggcagcaatgtgttttctagagaatccagatttatagactcatagctccatccccacttctcctttgccacagtttaaacaaaagtcataggcttgactctcacygggtcacgtgcttaaccctaagtctgtcaccaaggctagggtgataagacgctgttattggctgagactgagccgcatgtcgaaagcatagtcaagaccacctaaaccacaagaactgtgagtaagaaagagatgcctcacagaagaaaatctggtgctgttactgtaaaggcagccattcaccaggtagaacagacatgagatagccatcatagtcgccttgactgattcactcttccctccgatatggctttcacaggtccaattcttaggccaaccactataatatctagtcttagcttgacacacgtgggaatgctccacagatttctttacagaatcacagactttcccttactttttgccaaagaaccatggtctgaagtgcacctgtttcccctctcatttatacttaaaaaagcaaaaaaaaaactattacaaatacgaaaaatatctaaccatagcgtaaggaaaatacaagccacgctactttgctggtgtttaaaccagtaaaatcagasacataacgagcatgcatctttgcacagataccactttccacagtggttgatatgcctgcattctgctggggtggaaaattgtatcaaatcaaaattacagtgagggatcagctcacacctttcaggatggctattattgaaaaaaataagacaagtgttggtgagtatgtggagaaattggaaccctcgtacattgttaacaggaatgaaaaattatacagctgctgtgaaaaagtatatgtaggttattcaaaaatttaaaaataaaactaccatatgattcagcaatcccactttggggtatttatctaaaagaattgaaatcaggatctttaatagatgttagtactcctatattcattgtagcgctattcacaattgccaagatatggaaacaatctaagtgtccatcaacagatgaatggatttaaaaaatgtggtatatacatacagtagaatatattttgccttaaaaagaaggcagatgcagccgtgaaaaagaatgaggtcatgtgttttgtgggaatatggatggagctagagggtattatccttagtaaactaatgcaggaacaggaaaccaaatactgcatgttctcacttataagtgggagctaaatgatgagaactgatgaacacaaagaaggaaacgaccgacactggggtctacttgagggtggagggctgtggggagaggagcagaaaagataactattggctactgcacttaattcacaagtgatcaaataatctggacaacaaacacgacttgagtctacctatgtaacgaacattcatatgtacctccaaacctaaaatgaaaattaaaaaatacaatcatacaggaagcattgtcaaatattaaaaacagaaggcagaacgtgacaacatgtctgcaatgtgtgataatatagatgaaccttgaggacgttatgctaaatgaaataagccagtcgcagaaagacaactactgcttgatcccatgtgtatgaggtatttaaaatagtcaagtttatagactcaaagagtggaatggtgattaccagcagctgggggaaacatggagcattactattcaatgagcataaagttttagtcaagcaagataaataagtagagctctgctgtacaacattgtatctatagtcaaaaataatgtaccctaactcaaagatttggtaagagagtagattttataagtgtttttgctacaattaacacataaaataaccacatagaatttaattttaaaagaaatttgtcaaaaacaagcaagcctcaagtcctgctgtatataaggaacatataagaaatcaaagattcaatttattcctagacacacacccttctcctgctagcaactaccaacagtactgttatgccacattctcaacaycctttgtggctatagcgacatttttgaatccttgcttttgtttcctcgttcctggagttacatatgtctcccatcaggttagtgtccccttggctgttaattctggtagagcacagcacattaagacacaaaagttgcttaactgtcaaacagcacaacctggattccgcacccccaacaccatcccacttctctctstctctctctcatttatctttctaccttccttcttctcttttttcaaaggaagaaaacttcttaatggggatgagtagcattttttttgtcagaataggataaagacaaaagattcttcttaaagtgtccgatttatatgaactgtattttcaggcctttccagatgttgcatgcattatacttgtagtgttggtaaatgtgaaggatttcccacgtgaagaatggtaggaaacgggaatatgagctcaggagaaaaaacacccagactctttctcttatgtgctcataaagacaccctaaattaacttagaaaatagaagccacagctgatgaaaacaatggaaactatccctagctccccattcaacagattagttgcctgatcaatctccccaaccccctgacacacacaatgtatctcaggagacccagagagatgccagattttatctgctttaattattttatgatgcattgcagaaggatatttaaaatttctaagaattagaaatatgaaatatggtccagccagaaattttttaaaaacccaggcggtgggctctttgcccacagctttccatctgccccagaaatggtgcccatctgcaccacactgtttgtggctgctgggttttaattggtactgaacatgcaaagcaaatggcacagacgcaccatcctctttgagagctgaggtggttttcagtggatagagagaagttttcaactcagtcatgccacgtggaggactatctttgcccttggggttttctttatggccaagaatcttttgggccaagaatctacttggccaagaatctagaacaactaacttagtacccaaccctggttgcactttagaatcacctgtttagctgtggaaataaacaggcactggggttatccctagatcaaatgcatcacaattcagaggcatcagccctttttaaaaattttccaataaattctaaaaaccatagttttctcagctagtgaaaaattttctttcggtttctccctccttttccccctccctctcctcccttcattctttccttcatttctccttttctccctccctccttcaaatgtaagtttggtgcaaaagtaatggcaaaaactgcaactccttttgcattaacctaataataggctgttgtgacatgattatttccccaaaacactcccattctcattctaactgtttaaaaaaaaaagccatttaaatctacagtgttctatttccaaacattttctaggattatagaggcttgttttcaatatatgtattaataaaatgatgtgaagcactatttggctttaccagtgagatatcttggctctggcccttggtagaagcagaagattaggaattgagtgatgaagctgaagaaacatggacaaatgacttttcccatttcctcttcgttgttgttgatgcctgcacccacatatagggccctttagagtaccaagccctccagttccctcactgattaatttattcattaaataaataaatgtagacagatctttttcaccctaacaatattcctggccccatgctaagtgttaagtatacactgatgaataagaaaattcttctgcttttaagtgaatgaagcatagatacttaatcgtaacacaaggttttgcattcttaaatggacatatttgagcacagtctttttttattattattatactttaagttctgaggtacatgtgcagaacatgcaggtttgttacataggtatacatgtgccatggtgatttgctgcacccatcaacccccatcatctacattagatatttctcctaatgctatccctccccctacctcccactccctgacaggctcctgtgtgtgatgttctcctccctgtgtccatgtgttctcattgtccagctcgcacttatgagaacatgcggtgttttgttttctgttcttgtgttagtttgctgagaatgatggtttccagcttcatccatgtccctgcaaaggacatgaattcatccttttttatggatgcatagtattccatggtgtatatgtgtcacattttctttatctagtctatcattgatgggcatttgggtcagttccaagtctttgctrttgtgaacagtgccacaataaacatgcatgtgcacgtgtctttagagtagaatggtttataatcttttgggtatatacccrgtaatgggattgctgggtcaaatggtatttstagttctagatccttgaggaatcacaatactgtcttccacaatgtttgaaccaatttacactcccaccaatagtgtaaaagcatttctstttctccacatcctctccatcatctgttgtttcctgactttttaatgatcaccattctaactggcatgagatagtatctcattgtgttattgatttgcatttctctagtgaccagtgatgatgagctttttttcatatgtttgttggctgcataaatgtcttctttkgagaagtgtctgttcagatccttcacccactttttgatggggttgttttttttttcttgtaaatttatttaagttctttgtagattctgaatattagccctttgtcagatggatagattgcaaaaattttcttccattctgtaggtagcctgttcactctgatgatagtttcatttgctgtgcagaagctctttagtttaattagatcccatttgtcaattttgacttttgttgcaattgcttttggtgttttagtcatgaagtctttgcccatgcttatgtcctgaatggtattgcctaggttttcttctaggattgttatggttttaggtcttatgtttaagtctttaatccatcttgagttaattttcacgtaaggtgtaaggaagggatccagtttcagctttatgcatatggctagccagttttctcaacatttattaaatagggaatcctttccccattgcttgtttttgtcaggtttgtcaaagatcagatagttgtagacgtgtgatgttatttctgaggcctctgttctgttccattggtctatatgtctgttttggtgccagtaccatgctgttttggttactgtagccttgtagtatagtttgaagtcaggtaacatgatgtccccagctttgttctttttgcttatgattgtcttggctatgygggctcctttttggttccatatgaaatttaaagtagtttttttccagttctgtgaagaaagtcaatggtagtttgatggggatagcactgagtctataaattacttttggcaccatggccattttcacgatattgacttttcctatccgtgagcatggaatgtttttccatttgtttgtgtcctctcttatctccttgagcagaggtttgttgttctccttgaagaggtccttcacatcccttataagttgtattcctaggtattttattctctttgtagcaattatgaatgggagtttgacaaaattcaacagcccttcatgctaaaaactcttaataaactttgtattggtggaacgtatctcaaaatattaagagagatttatgacaaacccacagccaatgccataccgaatgggccattccctttgaaaactggcacaagacaagaatgccctttctcaccactcctattcaacatagtattggaagttctggccagggcaatcaggcaagagaaagaaataaagagtattcaattaggaaaagaggacgtcaaattgtctctttttgcagatgacatgattgtatatttagaaaaccccatcgtttcagcccaaagtctccttaagctgataagcaacttcagcaaagtctcaggaacaaaatcaatgtgcaaaaatcacaagcattcctgtacatgaataacagacaaagagtgagccgagtcttaaagactaaataggaattaacagggcaaaaaacgaaaagaggcattccgggtagaggggaaaacaaccaaaagctcagaggtgagaaatggtacaatccctgtaagaatgtgtgagtgttcaatgcggctcaagtttggattgcatgttgaggactggctgctgactgataacaccaggctgctctcctcactgctgcctgtgtgcgcatttgaggctttgacttttgatttagagcctcactttgaatgatcctttcaacaaaatctaactgcaccccaattttttatgtttattccatgtttctgtgttttgtttttcttcttttttccctataggctggtgggtattgggtttgggtgggtgaggactgatgaattgagttcccatttgattcacagactatatagcacatatacaacacacccttattagggaatcttaatgagggatacaggctttcaacctctagtgataaggttgccaagcctttctggagtatgggcctgggaatctgaattcttaacagtttcccccaagtaaacccttagcacagtcagattggacagcacttccctagtgcccagtgctgatgtgagaaggttacattcagggcatactagctaacacttatctagtagtaacaaaatgccaggaatcattcaaattgctttttaaaaattaactcacttaaccctcataagaaccctgtaaggcaagcttataactatgtccattttagagataaggaaactggggcacagagttcaaatgacttgtctgaatcacacggctagtcagtggcagaactagaatgatttcatagcctagattgcttttctaaattttcaaggccattagccaagctgatacgaaatacctgctatgctccaggcacagtctatattgcagtggatacataaaggtattaggttggtgcaaaagcaattgcggtttttgctattacttttaatggcaaaaaccacaatcacttttgcaacagcctaataaaacagagccagtgtgtgctggtaaacacgttatatctggctctccgggtggggggaggggtggagacatgatttgtaatgtttgtcagtttctatggttcagatgtcactgaccatagaattgggaagaaatgtgcacagtgcgctctgaaaagctgttatgagctggctccagatcaccacctgatacatcctctgctcacttgtgacttgctgcctggtgtcaggtatcacaacaaatgccatcatgaaggcaccagccagtggctagggaagaacagagaaggaaaatctattttctcaaacagcaggagggtcaagcggctttggagatctaaagtcgtgctcttggttgggawagtgggaggaccaaggaaactgcatttcagcacttggacagcacagmacagcacagagttggggggccatctgtcaggggagatcaagggtaggagctcaaaggccttcctgccagcaaatatcattcttgataatctccttgcaagtttatttatttatttacttatttagagacaaggtctcactctgtcacccrtgctggagtgcagtggcatgatcttggctcactacaacctctgcytcccaggttcaagcaattctcctgcctcagcctcccaagtagctgggactatargtgcctgccaccacgsatggctaatttttgtaattttagtagagatgaggtttcagcatgttgcctaggctgttctcgaactcctgagctcaagtgwtcctcccgccacaacctcccaaagtgctgggattacaggggtgagcccaatttatttcaactcaacttcatttccccttctttctctccccaccccaggtcaaatacaggtctgcaaattttctagagagaatttcctgccacaccctatagaccagctgcccttcacatgtgcaaacattctccctagggctaacgcagagcacccatgaggcagcctcgaagcacataacagctatggggggcctggggactcagatgacagacaagatgcatggtgattttttgtgctattttaggtaccagcaatgtttctatggggtcaatctgtccagtctccagggtgctacagtggatgaatacttcaggcagccaatagtagtaagtgtgctctctttgcaggctttctcccatgtttatatattgattcattcattcactcgctcattcactggtatgcactgtgctgccagcttctgtgctaagccatcacagaataggagaaagagttccctagagcactatgttttcaagtcttccagctctaatctcctccatcaattaagaaaatcatcagacaatgatactattgaaagcaagggaatttttaaactacctttcagtaagtaacttctagttccccactgccctgacccaccccatacacaactcagcccttacatttgttcagtaattcacatcctcccattcattctcatggcccaaaacataatagaagagcaagcattatataacagcttagaacaggagctttgccgttaatcagatttaaatttcagccatggccccattttgctgtataaccttggaaaactttaagtttgcatcatctgaaattctttcagttgtaagtgggagaaaaatcaaattggcttaagctaaaattgaatgactgtctttcaaaaattacaaagcctggagacagagtttgcttctggcacctgttgcaggggctccaaaaatgtcaccaggacatgatttttctatccttgtcacttatctccacttcctctgatttaactcttttcctagacaggctttcccttcatggtagcaagatggctacagaaactccagcctctgattcttacgactgtaaattccacaggaaagcctgccttttcctaataacttaagcaaagagctccagatttagtttaggtagttcagtgaggttatcbtaccttggattatgtgctcatctacggatcaatcactgtcttcaggggaaaagtagtgctctgacttgccaatctggggtcatatgccacacctgttactgagggtagactaagttcacatggaactttttggacagaatgtggagaagagatgaatccgcactgctaaacaaattytggatagtcagaaaacacacacacacacacacacacacacacacacaccccaaatgcctgctccagagattttttatagagtaaatgatatatcctagtaaagcccttagcacttagtaaagcacgaaaagcactcagtgcttaacatagtaggtactcataaacgtttttattgttaacagtattctcattaagctcatgctttctaaatcccaactactgatgacttaaaattacaggagaaaagctaaacttcaaatttccttgagctcagtttatcttggcagaaaggtaacatctttgatttttccccctaaggacacatttgatgttaggattttgatggctggaacagtcaaatacacagyaaactttatggatgcagaagaggaagatctacacaggtttgtgcaaatcagtgttgctcttgatgtttaaaatcttccctctacatctcccacccacaaaacttcattgcagacttttgctactcacacaggggagagattttagatattrgtcacatatgggaatgatgtgtcaatattagcttcatttattgctaaataaagataatgatgtctccttcctaggatattatccccattttatagatgacacatacgaggcaaagtggaatgatatgttgcctaaagtcacagaattaaaaagtatattagaactaggatttaaacctttcagaaggctccaaagtctgtgcttttagccactctgctttgtgcctctaaagtaacagcatatatgtgaatgcacttaggccagtgaatgtatgaaggacaagcaaagagctacaacttgttaagtactttctacttactaggtactgtgctaagtgttttagaggcaccagctgatttctaaagagggcactcaataaatgttcatctgtgtcctcttcccctccattttaaaagactctgaaatgaggattcctaccttgacttggctccatttatttagatagtggtatgaatccatttggggtgatttttcactcatattttgtctttttctcccttagaagattaatagtcatatttgttttctggacaagaaagttaagacttagccagatggttgtttgcctggagctactgaagaagcaagggtgagaattcagaaggtgcatctggctaatgaaaaaatcatccatcttgatatcatgatgcacaaagggtatcctggatgttaggataggctagaacatgctgcagaaacaaaaagaaacctcagcggcttctaataacttaggtgtcttgttttctacacaatgtatccatcatgcaccagctttatctctaccatgcattacacacactagtaattgggccagtgcagcagcttctatctgaaatgatgctggtcactgaggagaaagaatgagtatgtcaaagtatgcaaggacaatgaaagcttctgcctggaaacggcacaagtcacttcgttcacatttgatcagttgaagcaaatcatgtggcagtacctgagctcaagtggatggaaaactgcaatccttccatatgctcagagcaagagaaatggcatttgcaaacgactttaataactatcaaagatccagacaaaatcgactttgrttagctttatttattgctctgaactacctcctgaatcctagggaatattttgaaaattatgtctatgtgggttttccaccgatgtcrttcattcatttgtgcatcaattcagcaaatgtttattgagatcctactatgtgccaggtactgtggtggtgctagcacatgtgtggaaagtaatttttaaagtctctattcttcaggagctcatagtttatctagggagatgcaaaacatgaaaagaaataataacagtcaagaccaataaattcactgtgccaagtacaatggaaaactctagaaatattttattttcagcagagtgaaggaagttaagtctttggggacaccatgaatacagataacatacaaccttctttgaaaacttctaaagcacttcagaaaatccaactccttggaatgatacagccccagcaatgagccaataatatcacctcttaattatgaatcactctaaagttggcaaagaactctatatacatgtttgcaaagaactcttatatacatgtttttccatttaacatacagaagaaycttatgaggaaagtaggagagagattttgtcacccttcaacaaatgcagataccaagtttcagggaatttaagtgccttccaaggttccacagctaaaataggtccagcatctagattgcattgtgtatttcccaatattctttctattcctacttattctgcatttggcataaaccatagccacttctgcatgactcttgttatagcctactggaagttaaattgcctcccgcaaaaagaaattaactatgaggatggccttctgagctcgatgtttcctttgtgctccagtccatttttagaggcctgaacaacctttccctttgagcagctttgtaggggaactgtccctgcccatgctttggcttattgaaggatggctgccctctgtgtcctgagtcatgctcctcttctctagtcaaacccagctccagatgttacattcaccctatgcagttccaggtcattgcagcagagtagcgtggttcttgaaggattttgtcaagaagtaagcttctcaaatgtgcagcatcacccaagcattaatcacacactgagagaacttggctgccaaggcaaaagtgcccaagagagaaagaaaatattcctactgacctcacaaatgtatctagtacatctgccaacaacaacaatagtttcgagtctttcatcttttttatttccttacagagtagaaattccctttgtgtttcagatggcagtctgggctcatccatggcctggcgttctggtttgatgtggcatttgttggatctctgtatgtataccccccaccaacattttctcagtctgctctaccccatgctatctactatttgtaatcacaattttaaagtgtttaataattgattttaatgacactaattcttgtttctccaattttcaaggaaataaacacagatgttaatgttaattttagattttaggaaaaagtgaaaatgagatgcttttctgtstgtcatatcaactctaactaaactacgcaaagcctcttaagccaaatgaattgagctttggaggagtgagagagggtttgtgctttttgaaccttcttggtctttaatagaatcgatggggtggtaccccaagcctttgcttttgtttctgacacacctggttatactatctcttgtatctgggtgatgcctggaattatacttttcctgattttggtttatactctggagtcctgtgacgatcaggcaggtgtgtattactaatgctagttgcaacattaggaaaattcgctatctgtgcaccttcctactgcacaggtttgaaagttgcagggaaaagaggggaaagactacctacacgttggctgtcactgtgtggtgttcctcrtgtgggctgcaccactccatggccaccaaatctctgttctcttcctgactgccctactctcttcccaggctttctagtatgttccaactagcaaagagatctggtctgggtcacatgcccaagtggaggaaaatgtttaccgtgtaactctcctccattccttgtgagaatgcccaggcttatcattgtacctgcttagaaagaaatgcccatggggctgtaatacagcttgggggtctgggggaagactcaagagaggggacccctggaaaccttgtcagagctgacaatctgagaaaaataaaatgaggcacaaatcatcttgactccgtatgaacatatttgttcaaagaatacatacatttgctcctctctgtaataacccatgtaaatgaatttggtcctgcaagggtgagagagacaagcttgaagtggcctacctcaagggggaagtgtctttgaagttaaatgctttatctttttaaaaaatatatatatagaaaatttgtgggccagcttgggcaacgtagcaagaccctatctcacaaaaaattttttaaaaattagctgggtgtggtggtgaatgcctgtagtcccagctacgcgggaggctgaggtgggagaatcacttgatcccctgggcaacagaaaaacaggcttcaaaacagggtttctaccctgtttcaaaaaaaaagaagaaggggaaggaagatttgcattttattctatattatatctcagtatattttgatataaaggtcatttatattcttaggcagctaaattacataaaatttttccccaaatcttctagtcaaaattaaccctttaggaattttccccatgcttaatgtgccccttgctcctctccagccagcaaccactgcacaaccactgaacacgtgaccttggtgtagaagcacagcaagactttctcactttttcatatgaactgaggaaactcaatttaacactcaggcagacacacacaggatgtctgggctggaagcatggtagaggtcatctgctctagtagtttttcttgcttccagaagccccttcaagacccctgaacaggttggcaggagtcagtaagagaccagactctagacatctccctttgctacactagtcaagcaaatcagcttctgatttaaccttgttacttattgggcctctaatgagctttgattcagaaatacaggttgccatggtggccaagtctatgagtttgaagcatgactctccagttgtcctgtgtgatgtcgggcaagttgtttaacctctctgggcatacttcataggacgattgtatagatttactaaaattatatacataaactcttaattcagtactcaacatgtggtacttgctccataattttattttatttttttgagatggagtcttgctctgtcgcccaggctggagtgcagtggtgtaatcttagtcactgcaacttctgcctcctgggttcaagctattctcctgcttcagcctcccaagtagcggggactacaggggcctgccaccatgcccatctaatttttgtatttttagtagagatggggtttcaccgtattggccaggctggtctcgatctcctgaccttgtgattcgcccaccttggcttcccaaagtgctgggattatacagccgtgagccaccgcgcccaacctgctccataaattgagctatccttctcatcaaagggctctatgagtcaaaagaacaaaaaccactatcaaccttagtttccaatccaacccattaatgtgggtctggcatgtgattggcttttatctcttttcttgccctatagggtaactgtttggctgtcaacagccccagctgagcctctgactcattggtaccaggtgcagtgcctcctgcagactmctctctttgccaagraagggaagacactgtcagggaaagtgctgtttgtagccaataaatggtaagcaggaaagtacagatgtgctttcacctctgtttccwgggcattgaggtctgggagcaggaggaagctggcaggcccctaagactccagcacctacaaatggacagcaggctttccagaggcctgcctgagcactgtgtgtggtaacgaagaggagcttcagataacttaagggcagtgttctccagctgaccatggaggaaggaaggaaggaaatccagcagctcacaggagcacttgccaaggcttgaatgatcaggtgtttaaaccttgtgtcagcttcctggactgacttacatcggtctggccacatacccccaaatttagtacaataaaattgatctgtatacaggggacaaaagcattccagaggcagtatatagtatcaggaaggactctgtggtattggatttcatgagttatctgcaagatatacctcgatttatctctcattttttcagtatcctatttcaccttgttggaactctgctgtgtgaattagaggatagaagagtagagaaggggttctacgaccttcagggtatcaagggtactcagaggtcatcttattcagctttctttcctcactacctcacactcttccttctattttatcttttgcagatgtaatagtcaaatttttatttcaaaactattaagcagaaaaaggcctgtgcttgaatactcctgtgacaaagagctcaccacctcacaaattgaccctttcatttttaaagtctttatttctttaattacaaaaacctaacatactcccatataattcaaaactacaaaagtgtatagagtccttttccactctcacacctcaccccacacctctgatgtgacagtttgatttgtatactttcaggtgatttttccatgatgtgccaacaaataacatcatggtggggcttgtttgtacaagttatactacaagtccgcaacttaatttttacttagtaataagtcctgaatctgcacagatagatcttttttgttctttttaatacacgcagaatagtccagagcatgaatatactataatgttttttttttaaaaaaatctctgattgactgattcaggttgctttcaattattttggcattgcaaaaaattctgcagtgaacatctcggaacacatagtgtgcacggtgacatgagtgttttcaaatgagatgcctagaaatggaaatgctgaatcacagagtatgtgcatgttacgctctggtagatactacttttctcaatggttgcaccaatttccccttgcgccagcaataaataaacatgttcatttctctacatcttttcctaaacttcatgttatccatctctatgatttgtgtcagtctgatagacccaaaaatatttttttacagtagaatcttgttgtttggtttgtatttaatttttggtaaggttaagtcgctcttcatatggtccttggctattaatgtctcccattttcaacatctccaattattaaaaaattatccttgctgttgattctatatcttactttctataaattctacttattgatcttggttgtgtttctgaactagaacaaggtaggttggctctaacctctaaatggcaattgttcaaatatttggagagttttaccaaatgtccttctaggctacctgtctttaagctaacatcctcaactccttcctcctataaaagtgattttgaaatagtttgaaattctaagttctcccctctgaaataccctggttatcaatgtccccttttaaaatgtttcttcagaactaattacaggacaacagcatatgtattctgataaatgttgggatcagagcaatagtaactatttctgttttgaatcatagtaatatatttttaagtttgggatccattttacttgagtgtatagtcaattaaacacaagaagtatatttttgcatgattgacttttaaatcacatttctcccttttcctagcatgcagcaggtctttttcaacttcggtacaggtttttgtatttattccactcattcaattatctactgtttttggatctttaccagagccagtgcattatttcttttaattttttttagcatattagtgattcctaccattttatcttttgtagatttaataggcaaatttttatttaaaaaatattaagtagaaaaaggccaaggatggaatcttccttcaaagtttgctatccagctttcttcacaccttttggctttggtcatggaagtagctcaaaatccactccctgtgttcattcccagcccacatttctccatctaggccagaacgaaatatgatatgacctttttggaatatgatatctaaataagcttaatttctgactttactctcatagcccagtccaataactctgccaatagaaaggaaatgaaactaattggacatagcttttattttagtgaaactgagctagatctctaattaccatgactttctatctccttaacctcatttgtgcccctccccttcccccatcatgtagcctctgttattatttcttgcatatcctctcagagtttcattttagacataaaattacaaaacactgtaaaggcaagaatctactttcttatttatttccccctcactgcttttatacctaaatagtaacattctgtatctgttttctatgtcctttttcacttaacaatacatctcaaagacatttccatatctgcacatcaagatccttctggttctcttccgtctgcatcatgatcttccttcatggaagttattgcttcctccatagaggtgaagccttcattgtgttttaaaaattgtgacaaaatatttgctcaccttttttacatgtgccacggcatcattttactgatacatgtttttcatgtgtttgtaaattttactactttttttctacttttgttcttgatcacctctctctcacttgttttgatgttcttgtcgttcatcaaattataggactttcctgggcagctgtttacaggaggaagtttctgtggcagaagaagatgtgacagttttcatgctctcggtttttctcaactcaaaccttttctccttctaggttgccacagaatcacactgcttcctgcaagaatggcccctcttgtattgttgaggtagttccaccatgctccagttccaggagcatttctgcccaaagttctgctcaccacaattcctgcacaagatgttacaaacaaggaatacaccttttgcatttcagaaaaatgcttctcatcttcaggtgctaagatgtgctacccctgggctcttttgtccctctttgcacttcttttgtaccttttcccacatgactaataaccagtcttgactgcttttacaacccttacacatatgtcaaaggctgcagattatctcgttctcctagtgttacagaaaatgaggtttgccatctgcagaatatttcgattctccttgtttttggatagcttccagaaggaaaagtggaaaatgctgacttatgccatgttcatcctgaaagttactactttctttctaaatccttataaaccatctgtttaatgaccagttctaaaaaaaaaaaaaagaaaaagaaaaaaaagaaaagtgcaaaggagcaatagccatcatctgcctggaattttggactttgccttttctgctttttgcaaaccaggataacattctttttctttcctatatttatatttttacagtttcttagtatataattttgtgagtgaatttaaatcatcttattcttctgttactttttttctgacacaccttgtgtttcatccttatgggtaatattttttctacccttctttccttcattttccctagtaggtaagaaggaggaaaaccatctacttcacacacctgcccacagctcctacagccctgtagtacctctgttagagcacccatttattgctgtaatttgctatatgtgagctgcctgagaagagagagtgagtcttactctatggtgtatccctctttacctaatgtatttcagagacccagaaatattgtggaattacggagtgaaggtgtcatgagctgatatccgcctctcattaagaacttagtctagcacaattgaatgaagcagctaaaatatggccatgtaatgttttgcaaaggaagaaaggaagggaggaagtttttaatcttattaggttagcacccttatgtagtgaagagaccagggtttggagtctgctatgtcctggttctgttcagtctcttctatatactggttggtgctggagtgatcttgggcaagttaatgaatctagcatcccagtttcctcacctcatccatcacctataaagtaatatttgtaatcatcatctcaccacacttttacaaatattaaaagagagaagatagtatttgtgattaacacacagtaagcccacagtatcttaattccaattcctcttcccttattctcatccttattcttaatgtatctcttcagatattttgggtttgaaatccttgttttccttggtattttctaaaagcctctgcacttcgtgaatgtcagtgttttcattctttttcagtaaggtgctgtccctttgtacttctttggatagaatctccccctcccttagtgtcaaatattcttttaaactctgaactcctagaagagctccctatgcaacctcacaggtgtgacaataactgcccttttcttccccatcaggcccatttttgattgtactgttaacattttattttttgacagtctcccatctttctggagctgtcattcaatttattgccctggcaataaaatagaaccgagtgttttcattaactttacgaaatttatatcctgaaagttcatagaagtggtctttaaagtttttgatcatctgcacctatgaataaaaacactttacgtatgtcttccccaagtataccaatatttatcttttaattatgtgcatgtactacagtaataataatagaaagtccagaactaagtagtttctctctagctacacacacacacacacacacacacacacacacacacacacacacacacacagagatatatacagacatgctatatatacctatccacatatatatacacacacatgcatagacagatctatgtgaacatatgcatatatagaaactcatatattatatattttgtaagacatacaaaaatagaaatcaaaaggatgcattgaaaaataaatataggctgattgttggatctagctcagccacttgtaccaaaatattttgaaacattatttaaaatttttggatccctgtgaaggcctgctatacccagatttgccaagggatttggtttggagagagtttgatgagctttgtagtttataaacctagaagaaatgctgatcaaagaattaaagcataggaaacatcattgcaatcattgctatttctaatggtcactgttaaactgctttaccgtggacatcacataaaataaaacctctccatagttatatatgtgttcatcttcatcagaagtaattatggaagaaactgttgtgcattactcagcacagtgaagtaatagaatgtgccagtgcagctttaggtgactttttttgctctacaatgttactcatgttcttctagctctgacccgtgtgcccatcacatggctggtatttactcactaatgttgcaccatattattttaaatgtgattagagtcttgttgaatctaaccataatgataatatattatttcagctgttatattctatttttttctctgtgtacttatagatgtgaatgtttaacaaaatgatgcttaagtattgcttcatatattccttcttttatttgaygtaagcaagtgtctatcctatatcataattcttgaaaatgtagttttcaatggcattatatgaatatatagcactatttaataatttcccattgttgaatattcatatttttataatgtattattac

SEQ ID NO: 6765 - DNA, 318760 bp, Homo sapiens
  misc_feature (1)...(318760): n = A,T,C or G, or insertion/deletion polymorphism (see Tables 1-2)
aataaaaaaattgtggacaaatgcttatatctactctccacagatactaataaattagttcttttttttttttttttttgagactgtctctgtcacccaggctggagtgccgtagagcaacctcggctgacagcaacctccgcctctcagtttcaagcgattcttgtctcatgcctcagcctcccgagtagctgggattacaggtgcatgccaccacgcccagctaatttttgtatttttagtagagacggggtttcaccatgttggccaggctggtctcaaactcttgagctcaagtaatctgcccacctccgccttccaaagtgctgggattacaggcgtgagccaccacacccggctgaatagttcttaattctatccaaaaataagaatcacatacagtttcatgacaataattttaatttttaatttaagattacttaaaatatatcctaaatattttcctcaccccaagcacaatggactgacaaaaccaacagcccctccctgcaaccctagggttcctgttggggaaacagcagctgaactgagtagatcgctgggtcaccatgtctccccaacccccagcctcaagccccagccaggtgtgcagtcacacggctgctcctgtaaggtcagaaacccagttacctgaccacccagctgcaggagtgtggtctcctccgctccaagcaaatcttgagggctcaacacgatgttttctgctaattttcttgacatcttatgcctataccaacctttcagattggagattcaaggtagacacctttccctgctccttcttgttaaaccaacccccaccccttttagaattcttagccatatccttttcctgaaagactcttgccttgacaatttggttgagacgttctctctgtcttcctggcacgtggaataaccaacacctctaacaacagatgtattgttgctcattgcttgtcaaacttagccaatctgaaatcactgtcaccacagacaacaggcttctaaagatttgggacagacaaaaaagccaaaaatccaccatctattcagcaccaagagccctgtgggtgcttaagcacagtggacaatcagtgattgagacactgctggccagtggctgtcctgttcatggtgacctgtcaccctgctgagggacacaggatggtgaaatagagccagcctgagctttgaaattaaacagatattggtttggaatcaaatcagcttcttactatgtttaatttgggcaataacttttgcttcctgagcctcaggttcttcctttgtgagcttggtgaccttgccccactggattgctgtaaaacagcacatgcggccgggggcagtggctcacacctgtaatcctaacattttgggaagccgaggcagcgggatcacctgaagtcaggagttcaagactagtctggtcaacatggtgaccctgtctctactgaaaatacaaaaattagcaggacatggtggcaggtacctgtagtcccagctattcgggaggctgaggcaagagaattgcttgaacctgggaggcagaggttgcagtgagctgagatcacgccattgcactccagcctgggtgataagagcgaaactccgtctcaaaaaaaaaaaaaaaaaagacagatgcaagacctgagcactaagccccagtgtgagggccctggcaagggtcttcataaattccagaagggctactttggcagccaaagtggatttttctggaacattatgtgcatgctcgaagtaaacagtttaattcatcttctcatcttgttccagaagtcctcatttatcttttggggtttccggcctcactctccagccctggaagcctttgaccccagcccccttctgagttcagggctcttgcattcagtggatcatgtggcatcccacatccccagtcacttatctcgataaggcaccgtgggagggaaagctttggcaaggaccattgcgtctgcgacaggggtgcagaatgagggaggacagttacaaggttctgcagctctctactcatctgaaaatgatgaaccatttcctgccaagaccaagcaacttgctaagtaatgatctggtaatggcatctgctgtcctctgcccagcacatttgtcttcctgtgtggacacaggaaaggctataaattaagtccggcgctcttgctcatcccaagggttcctagtttgctgctgttttaaggcctggtggcttggagtaggtgccagtggtgaagggtgcatgtgtttgacaggagttcccagggatgtctggggcagagggttgccctcaaccttagttgagggccgataatgggccaagaagaaatggacaaggtctcattccattcaatctcctgggcaactccaggagaaggatgagctgggcaggattaccgccatttgggagtgaagaaactgatgttcagagcgggtaagtaatgcattcaaggttgcacaactagtaaatgcttcatcggagatttcgacacaatcagtttgattccaaaaccactatttgtaaccactgtggtacacactcctaaacaaagccagtgactgtagaatctaaacaatgcaattggagatacatacacatgtggacaattatggccataatatacacaaaattcacggtttcatggaagggaggaatgggatcttggaagaacacaaagatagcttctcaacttgagtggtaagttcatggatgttcatgttatattggatttcataactcctgtgtgtgtgtgtgtgtgtgtgtgtgcgtgtagcaaacagtatataaagaaaatatctaatgcctttttcaagacccaaacagatgccctcagggtgaataattttcaccaagaaaggtaaagaaatttattcatcagaattattgcactgaatatgatactaggtgctattagagatttaaaatacagttcctgtctgcctgatataatataaggagctgagcctaatgggtatgagaaatcattttagaggtttcacagaggtcatctgaccattaatttactttaaacggattttctctaatctagagaaaggatgctcagaaaaagactagaatcgcaagcgcactcccttggctgtgctttgtgggttggggcctgactctcgccgggtgggagagctcctgggagctctattcctgctgccccggcatcagcagccatggggctcaaggagacaatgggttggggaggatcatgtgtctctttctgcttcttaaatccttttgcaaaggagaggaaaggccctcttcaggatggaccatccccaatggtaaatcacagtcagtgccatccatgagcataggagctgttcactgtggcaaatacaaatttagtgtaagtgctcatcttggctcccctggtggaagggcaggtccttgaagacaggcacatcccaccacgtccagcctggaaactccctcagagtgcaggtgcaaacgcatgtaaaatcattgtaaaattaatgcagtgatggctgcctttagcattgctgcatcctctatcctagagaatttcagtgcctgctcacctaggcctgggcctgggccccacagacaacacttaccctcgggattccccccagccccctctcttccttctgccaccaccaatatctctcacatctgataattatttcttcctctggatgtgacaagtgctatctcagaaatcgggcggcaatatgttcatggctaataagccactagcagcagtgggtatgcaggaccccaggcactttccactctgggctacctcagaggcacggtgttgcacagtggtttgggatgggccggaaccagagccttctcattccgtccttcctcacccccagagcataaagtagccctattcctaaatgcaatgctctttcaaacaccagctgcacacaattgaaaatagcctgagaaagcctgttgtacgagcgttcacacccctgcccattcagagtgggatgaagagcaaatgacacgtgctcccagctggccctgaggctggacacagcctggactgagccagtgtccttgcccccaaagaggaggcttcccctggcctcacagacatctaaattgtctgatactttccatcccacacactgtttatggcccatccactctcctttttattcccagaatgatatctccagaacaaaggagagagtcagtggacagctttgtgttgacacacataagtaaatggaaggtgggaaggacaagtggcataaggagggagaatccgcctgggagcggattcccctgggcagggaggtcggcagtgatggtggcacagtgggggcccgagtgtgccctgaaggtaaattccccgtggagcacaccaacagttgctgacctgcatgtaaaagtttgctctttgattcctttgctagggcttcactcaggcacacaacttcatgcttgctatttgtttttgtttgtttgttttttgagaaggagtctcgctctgtcgcccaggctggagtgcagtggcgcgatcttggctcactgcaagctccacctcctgggttcatgcctcagcctcccgagtagctgggactacaggcacccaccaccacgcccggctaatttttgtatttttagtagagacggggtttcaccgtgttagccaggatggtctcgatctcctgacctcatgatccactcacctcggccttccaaagtgctgggattacaggcctgagccaccacgcccagcccactgatatttgttatgtaatcaactaatgacaaaagagtgcagaggcatgatgagtgttacatctgccaactgctgggttgtctgaatagattctcaagcgaccatctgaggcccactcagaagtttcagtagtgccagaaggtcttgacctattatttttaaatcaagtaattcttagggttttttttaagtaactcaaactaggaaaaaaacgagtcctggataaccattgtgtagcagcatcactgccaagccatttgcaataacaacttcccagaagctcttatctgcccccaaattactcttatctgcccaaaagtaaagaaagtttcaattcagcaagtcagagcaattcacagagaagaagcaatgcactgacctctggcacagaaaactagaagttggtccttctccatttcttctgttaaccaaggttctcttggcatttaattttacaagggccagagacaactccagggatctcaatgcaatcctgcttctggatgggacaaagaaggcatcagccgcacaggagaaaatcacagctgtcctttcattctgttcaagcacacatgaagctccttctaggttcatccactgtgtgccaaacacctgggacagtcagagaagaataatgatgccagccttctaagagctggcagaccagtgagagagcaggctcaagacatggcagagtcaaacacagacagaaagctatggtatctcagaggaagatgatgagatttggaaagctcccagagaagatgggactggagctgggctgcttagcactgaaacagtggatttggggagaatatttgcatgcaagtaaaatatgcaaaagatgttcaaagaacaaccaaaagtggtagaaatgtggagtgagaaatactgaaatgtccacagctcaggaaaacatgttttccaaccagcatccctgaccattcccccttccccaggtctagggcatctagagcaccaaaattaccagcaactctcatctttcctgacccctccttacttcacttttgatctaaaagtacattccggcctcatctaaccatttaaaaagccattttcaggtccatgtcagtggctcaattgagatactgcaagacagtgtggtttttcctgaagtcacaagttatcaatgaagttcagagtaagtcctgaactgcagagggaaagtgtgctgatccaggcagagttgcctaaatgaaaacgctggccaccttcctctcggtcccatattgatctcgagttggaagaggtgagtcctgtctcaaaatggaggtaaaaccgccgcctggttgcccccagcccgactccggcagtcgccgtcgccrctggggggaggagggccatgatccaaaggaaccagagcagctgagaaaactgtttattggtggtctgagctttgaaactacagatgatagtttaagagaacattttgagaaatggggcacactcacagattgtctggtaatgagagacccccaaacaaaacgttccaggggctttggttttgtgacttattcttgtgttacagaggtggatgcagcaatgcgtgctcgaccattcaaggttgatgggcgtgtagtggaaccaaagagagctgtttctagagaggattctgtgaagcctggtgcccatctaacagtgaagaaaatttttgttggcagtattaaagaagatacagaagaatataatttgagagactactttgaaaagtacggcaagattgaaaccatagaagttatggaagacaggcagagtggaaaaaagagaggatttgcttctgtaacttttgatgatcatgatacagttgataaaattgttgttcagaaataccacactattaatgggcataactgtgaagtgaaaaaggcccttgctaaacaagtgatgcagccggctggatcacagaggggtsgtggaggtggatctggcaattgtatgggtcrcagaggaaactttggaggtggtggaggtaattttggccgtgatggaaactttggtggaagaggaggctatggtggtggaggtggtggcagcagaggtagttatggaggaggtgatgtggatataatggattaggaggtgatggtggcaactatggcagtggtcctggttatagtagtagaggcgggtatggtggtggtggaccaggatatggaaaccaaggtggtggatatggtggcggtgttggaggatatgatggttacaatgaaggaggaaattttgrcggtrgtaactatggtggtggtgggaactataatgattttggaaattacagtggacaacagcaatcaaattmtggacacatgaaagggggcagttttggtggaagaagctcgggcagtccctatggtggtggttatggatctggtggtggaagtggtggatatggtagcagaaggttctaaaaacagcaggaaagggctacagttcttagcaggagagagagtgaggagttgtcaggaaagctacaggttactttgagacagtcgtcccaagtgcattagaggaactgtaaaaatctgtcacakaaggaacgatgatccataatcagaaaagttactgcagcttaaacaggaaacccttcttgttcaggactgtcatagccacagtttgcaggaagtgcagctatcgattaatgcaatgtagcgtcaattagatgtacattcctcaggtcttttatctgttgtagctttgtcttattctttttcttttcattacatcaggtatattgccctgtaaattgtggtagtggtaccaggaataaaaaattaaggaatttttaacttttcaatatctgtgtagttcagtttttctacattttagtacagaaactttaacaaaatgcagttttgaaggtgtttccttgtgagttaacaagtaaagaagatcaattgttaattactattttgtataaattttgctaaagttaactgtaaagaaacacctgctgacttgcagtttaaggggaatctattctccccatttccaaaccatgatatgaatggacgccgacatgtggagagaacagataatttgtgtgtttgcaatgtgtgttttaggtaaataggattgggtatttaaattagcatttgtgaatttaatagcattaagattaccttcaaataaaaaagtctcaaaatttctttttggtttttgtgcactttcttttaaaatgtaatcacatgattttagtgtgttagacttgctgagtcctagctgtgtttagaacatctccattctacatttaccttggtcaaatttgaactgctgccataggttttgggtgtaaagaatgtttactgccctccatttaaattctgaaaaggtatagtggatgttttccctctcctacattagaaaccattcttaaaaacttttcaaaatatagaaccattaagcctgctatatctgagcaaattagtgggtaccttttttccttttttaaagcacaagaggcccataaatcttgagttatttgcattagtttacattttttgatacaacttttcagaccaagagaataaaaatcatgcgttattaaacccctagctggctggcatgctttcctgtttgtactgtatacattttgctggatgaaaccaaggatagtttaggtataattgtccaaaataacctaactgcagcagaaatgtaggacagttgcttagtacaggcttctcacttcctacagacctgaattcaaatttggatagtctgagttattaaattcccaaagacaaagaacacactcttatttcttgtgtatatttcaacataaatcatgttgttaccaatttgttgggaaggccctggttgagaagagttttagataataaggctgtatatatatagatatatatagatatataccaatgtctatatatagagatattttatatatatatatacaggtatatatatgtgtgtgtatatatataggtatatacatatatacatatatatatatatatatatggatatatacccatgtctactgttttgcttcagctagtgcttacaatttcattcaagtcctgagtatgtgtcctgctgttactccttctttggtagttgaacgttgaattcaagtctttccttctgttttaagaagtactaagcaaacaagcaataaaaaggggaatggcgcatgctagtgtttgaatatgctctcttgttgctctaattctgtgcctccgtgcattaatatttggatgcatgcaatgccagcatggaaattggccttcacacttactgcagttttccagaaacactcacaagccaataaatgtaacagacattccatttttaatgggcatatatgtgaaaagcagtgtagaaaataggctaatattagaaaatggttaagtccttaataacttcaagtgtggttatataatggacactgtcaatgttcataacttaaacctgggtacctggtcaaaataatgcttgggaaacattaaaattgagctaaattgtctcaagttcttttattcatataaataaagtttaaatgaatgggggagattttaaaaaagaagaagaaaagaaaagaaaacgctggccacaggccctcaacatcctgcacgggcatttcagaaaggcggaaggattgctgtggggctcttatacctggaacagctctgctaagagctcctctctggtgaggcaagcatgatgaaaagattactataattcattcctttttttaagtaaagcaaacacattaaaataagttatatataattcacgacaaaacagaattgctgggacagaaatgcatgtggacatggtatttgagcaagaaatttgccaaataatgaatttagttttatgccccaataaatgcctttgttttcatttcaaagagcaggctatgtccctcatgatttccaaaacactatctcagctaagtttgttttagtttagtaacaagttaatgttgtgttctctggttttgtaagtttttttgaaggtgcagctgtcaatacatgtattgctaaatgaactgcatgtttaaaaaataatttacatcaataaaccataatgtcttgattacttggagaaggaatggatactactgctatatttatcactatcaatgtttgaataactaactttaatgtcttaaattattaggctagattgattagttttacaagaagttcaaagcatacaacttattccccaaagtgggtcttacatgtagataatattttattttccctctgttttcctgtagaaaaattgttctaaattcattatagaaagttayatgccatttaactacctgaaaggtgatgttaatgtgacaattttgtaaatatttctaaaatgcccagaattatactgtatgaatacatcattatttctggtatgtggtaataaaaatattttatttgcatcatttagattgggtttgtctgcaagtaacagagaacctaacagtgctggcttatttgtctgcagcgatgtkggggaagcagcccacggctgatctagaggctcaacaccgtcaccaagaccaggccccatgagtagtcctgccccrccgtcctcagagtgaggctcctgtgctgggatcacaggatggctgctgtgctcccagcatttccaggggccaagatgggaggaagaagatggacggcagaggaaggacagaggccaaaggcacaagcgagcattgtcagatcaccaaaaagatttttttgctttaagccccacccctagtgacttctgattccatccaaacacccaaaattgggtcatatgtcccccgcttarctattaaggtatctgtagagttagatacttttcagtaggtattgacatacaagggtgctcttaggaagtagagaagaatgaacattgactaagcaattagctgtttctgccacaatgttgtgattttactgacttttattgcttgtggtagaaccttacattgcatggactggttctggatttcttctatttcacgtacacaggaaggatacttccacactcccttgaagtcaggcacaaccagtgcctgcctgcagctaatgaagggtgggcagaaacgatgtgtgtagctcccaggctgaagtacctaatgcagtgcctgactgagccctgccttccccaccacagcaatcatggaaataagtgtcaagttggagcggtcttagagtgataaatacaagccaagctctcccacaacccacagtagatggagcacttgagcaagaagcaaacctttgttcttttagcccccaggacttggggcttgtttgttatcatcaaacctggcctatcctgactggtacaaattggcagtaatttctccagtgtcctcaattaaatgtatgtatatgtttgtttaataaataagtggggatatattaaaatgtagcatacatttaaaagccaatagcatttctttaaatataaagggttgaaaagtaaatgatctatccctttttcacagtttacatcctggaatgacactggtttagatgaaaagataagtataggggcataaggaggaagaagatttgaggagttaaagtggctttttgaagaggatayggaagaagatgaggacccctactaaggaaggtccctattgatgggaagcagttatccaycatggagaagctgggccctcctccatcctaataagccctaataaactgatttttactgtttgttttgaaataattttagacttacaaaaatgtcacaccaatagtccaaaggatcctccctcgacttcattcaaagcacaatctcctgcttttcctcctgctgatcaggaaatgtctctgctttcttggcaagctcatccttctttacgtacagttggaatgttagagctcctcaaggcggcccccaggcccccttctctgtgccatctgcactctgtcctcagaagaactagtgtgcacccaggcctttggttaccgcacagcatggtagtgactcgcaaacatgtaccttgagccagaccactcctcacatttccaagcttttgtctgcatattgtccttggtatatctagtaatatccaattgtatacttaatattggctcttctctggctcaaatgaacctcacagtaaagtcccaaacagaacttattcctttccccatctacccacacctggccttcctgtctcctggtgttttctgtttcactgaatgttactagtgtgcactgaagggtggaagccatggatctcgcagtgctgctcagcatctctccaacttatccttcatattctacaacgaatgtcccttttctggggaagcccttcctggcctcccagacagacctaaaactgcccatgtcaccttcactgcacttatgatacttaggattttataattatttgtatagtcacttaatatttgtctcttcagttaggccagccatcagctcattgacagaaggactgctctctgattcagggtggggtccccacctcctaactcacaagctcagtgctcagtaggtgtctattgaatgaatatatgatggacacctttccaacatatgactttgctcctgaaagttctggattcccttcctctccttggtggatcacttaagagagggaagatcagttcacttccccttcattgaatcactcttgtgtattctcaagagatttcataaggtcagacaaaatcaacttctcaagttcaagccagaactctttttttacattaccagtatttcagaaaccgaggtcctcatttgttaaaagacaaagagaactcatccttgtccaagccaacagtggacatagaagagcatgagcacacttggccaaagtgcatcctaggaggaggcccagcatacacaaaggccctgaagccagagctcacctggtatttgcaggaagagcaaggcctccagagtcaggagtggaatgggtagggaggagaggcttttccaacacgagaagccatggggctatttgagagcaccagcagaggaggygcagagctgaatgtatgttttaaaagtcttaccatagctactatgtagagaagacattgcaggggctgactgcgagggaagaattgggagacagcgctgctacctctcctccgctactctctggctcccctgaacagatttagaaagagaaggtttatggggaaatcrggtggaggaaagaggtcagggaaacagtacagggagcagttctctggtcaacgccaagagtcgttcccttgccaggcatggcagggcttggtcgtggcctgggttttgarccatgacagaggaagttactggcctttgaactaggctgatggatttgctccatcttgggctaggagacaatgattgaggtcagctatcaaagcctttctatgaaacctccaraaagtaaccacagctcagacctaagactgctcagtggcctgagagccaacaacatgggcctgtgaggggagagatgaccasaggccccaagccgttgtccctccctatctgtcccaggctcagacactgccagcttctgcacgtgattcttggttcagccccttaggttcccatgctgtggaaattcccccaggattctgaagaccaggtgagtggcctcagtaggagcacagccctggggtccaggaagggctagacatgacacccatcgtgccccttgctggctgagtctgtggggttgtgcatgcctgggcgggtgggtgtcctctgtaagtggggtcagttactccgccaaccttgatgagctgctggaagtacccagcatgatacctggtatgcaatacacatgcagtaagaatctgttagtatccaagcgtttctgtttcttcctaggtcttttcatggaaagggagaggaggttgtatctggaattcttaccaggtgccattttccatggaaacctaaaatatattttggaatcatgtagagctagtcccttctcctagttttctttttaaagtttcctaattgcttttctatataggtttgtacagattctctaaagtagcctaagaatctgaatggtcctgggttgagtttggtgctcctggctgggaaggggtgaggcccactgctgagaagtgactgacgtctagctgtggccccaaaagaaggtggaaggaagcagcgtccggctctctgtgactccatccacacaggagggcttgcccacaccatcatgacgggctgaatatttggaaacttggaaactcagaattcagttttggtctcctccactctcaggaaacccagatgacatgtgtctgtgcatgcacatggccctttggctacacagggcaaagtgaaggctggtggggcccctggaaataagcaaataaagagcagyccccactgtcttcaggggcttggtgtcctgcagtgggaggtcagtgcccctgcagagcctgccctgtcttgccaccagtgcctcccmgaagcctggccccatgcaggaagtgcttatcagtgagattgttgaagagcaaacagtcaatgtggtctctaccacaactggcatgattaatttaggggctgagtcagctggctatgacaatttttgtccccttctgcatatagaaaccaaaactctactgtaggctggttgtggggagagggcattaaactctgacaggttgcaaatgtcctggggaaaatgacctctgctccctctgctcccacccggatccctgctctggaggcctggactaattagcgtctggcaggtgtctggaaagagctgcctggccggccatggtgacatcatggctgggcattgctcccccattccactgctgagaaagtctctgtttcattaggcttccaggattactttttaattttttttaatcccctttgtaggttctggctccaatcagtcttggagaacattctgcacgctccttcccactcccactgcctcaacaactgtgctccagttaaagttactgttcccggaggagtgaggctcaccttccccaggcagcaggcgcagccctacaacccagcccccacacatcagcaccagcaacccacactgckgttgctttatactcatatactagggatggagatttcaatgtggctgctgtgttctcaactttgtgcttttcagatgtttctaaagggcttcttcatcacctcacttgttcctggattgtagttggaatgcaatttagatacttcaaatagttaagttggttcagacatttgtagtcttgggaataatccacttgataagttgtggaataaaaaaagctaaaaacctgtgttcacggaactatacaaaacaaagagtgaaccctacagtaacctagggactttaattaataagaattcatcagtattggttcatccattgtacaaacattccacattaatgcaatatgtttgtaatagggaaactggggtcaggggagagcatgtgggaactctccattgtgtctgctccacttttttaagccaaaaactgctctcaaaaattgtctgttaatttaaaaatagtaatatgagcaggagagaagtagatggtggcatagatgaaataagattagcccatagttggggtaatttttgagaatgggtgatgggtctgtgggtgggggttcattataaattatgaaactcataattttaatacagtttttttwaacaaaacttatactaattcaacaatgtgtcttttctcattacaaaataattcacatacactgtagatatttgaaaaatattagaaagtacctataatgaagtcacccaaaaatatctatcatcagcattttgatatggctatatatacagataacaaaatgggggtcttactgaggaagcagcttagggccctgtccttttcttcaactttgtaatgtactaagaacatcttcccatgtcttaaaataactccaaaagcatgctttttaaatagccacataacatttcatggtataactgaagtccagaaattgaattcccaccttaatggccctcgtctcgtctggctgagatcrtcagaggtgtgagtctgccatgcacatcaggcctgcagcagagaagcctgacagtaagaaggccctttggccttggtgtccagctgggggtgaatttctcacattcaagttgtaaatgcacctccacgctgtgtaacagggtggaaaaggcacatttcccctttgggatgtacataacctcgggtagatttactatttacaaaaaggcagaggctggacttgagtattcagggccctaacgtgagtgtcgttgctttccttggaccagaggcccaggtggggtccagggggtgcccaggaatcaagataatttctgcaccactgagtcaccctgaccttccctcctgcccaagaaagcacgtcagagggcaagtgagtgagaatgatgttacagcaataaaattcacttacaaactagcaaacccttgaactcaacctccctcccaactgtggctgcaaaccacccagaggatggcccactggctgcaggtgggcccaggagcccaaggctgggcctaatgatgggtcttctcagataaccatccctctcctggggcagagaatcaaggttaaagttggattgcaatgggacccagaagccgagtagatggaatgcaccctggccagactgtagatcatacatctaatgagacttctagccagatatggaagaagcagattctcagtgcacgagccagttcttccagaagctaagcagatacaggcgccagcccaccaagacctttgccaaaggtattttcttcacatacctggagagaaaagagggcctacaactttaaatctgaggaatatgttttctaaaagccaggtcccttgccaatatatccggatctttatcttggagagtttatctaatcagacaacaccaaggagtaaaatccatacttcagaggaactggcaccgtcaagaaactcacggaatacccgtgtgtctgggtcaaggggagtcctccaccttcacccgtgtgggaaggattgctccatcagtcagccgaattcctgagaatcacagggtccacggctttcaggtgcatctgtggggaggtgccttcccttgtgaataggtcccgtgtcaagagtctcgtggacaccactgaggccatggagctgagtactgggcggattaatcagagattcaagtcctcagtccagagggctggctccaaaggacatgcagtcaaccagatatggaagaagaggaaaggcttctgtcaagggaaacagcctttcgtggaccgcaggaagctcagagaagccagggaacgctactcccagactacagggagccgttctgtagacatgcagtggagacagatgtgaatagagyatcccaccaatwgccgtctccccycatttttaggaaatggatctcctcttcaacgctgtggttggggcaggtctgtttgayccccgaggtactcagatctgcttgcccctgaagtctgtgaaagcaacaaccagctcttccttgatctgactggggagctsaggggactcaaaggaaaccagtagaaagcttcaaagtgacagagacggggctgagrgagaaacgatgccagcattgactactgaggctccttgggcagcttccccaggcctgcccgggcttctttcacttggccctgacaaggctggrtgagagggggcattcttgctcctcatcagaggctgcacatgttagagactctagaacatggaatgttcctctctcagcaagggatggctgggaacatgattccagagggcactgtgacctagccagccacagggggaagaaccccaggtcctgagcgtgctctttgaggagaagrttctgacagagtaggaagtgggctgtggggtcacgttgttcccacttcaccacagtgaaagcctgccaggaaacacatcccggaaatgagatctactctagaaaatacaaggaaggtgagacagatagaatcaaggaactaaaggtaaacaggccatgggacgaaaccactgagagtcaagaaaatgccattttgaaagaacataaggacaaaagactaaactttgaaggttattgagaggtaaaatatacaagcaaaataagctaaaggaattagaataaataaaagtaagagctgttaaagaccaataaactcaatagataatgaaaatgaaaacacttattatccacaatagcatattagttaaattatgatagattatatgtggtgaaatgatartatatctctgaacatagtgttccagaaagaccagcaatgaacaatatataatatgttcttggcatagtacatgataaaagtaaacatagtacaattccaacctaaatatatatatatacatatgtgtgtagacaaataccattaagtatttatagaagcatgtgtgtgtgtctatgcaaatgtgcagcatagataaaaatataaaaggaaatatagcaaagtgctaacagtggttaactctggcattattactaattactaattttaaaaataacagtactttctaaaaactctttacaatgattctgaattacttttattgcctgaaagaaaaagtttttcaaaacttttacaaaaaagtaaaaagatggcttaaatatatatctatggataaatgaagttttgtgttgttttaaagttattctactagagaaatttaatttttacttagagagatgttacacaaggagaaatacttcaaatgatattctttatataatatgaggatataatgttcatttattccttagaaggtatgtattccacattagttcatggatactcttgcccaggtactgggaaggtaacaaaccaggcagacacctgtcctccatgatctcatatggacgtgggagctgatcactgcatatgtgtagacacaaagggaacaaggactgccgcgcctacctgagggcagaagatggagcatgaggattaaaaactacccatggggtattgtgcttattccttattagagacaaagtaatctgtacgtcaaacccccacaacacgcaatttacccgtgtaaaaaacctgcacttgtaccccttgagccgaaaataaaagttgtaaagaaaaaaatctgtcttctaagggttacacagtggctgggagaaatacacaatcagtaaagagcatgcccaatggtgagaagggcaaaaaaaaaaaagagagagagagagcaaaagggatggttggttctaggaatctgctgtaattttaaataatcaaatggtaaagaacaagtccccaacaaggtgacttttgggcaaagacctggaggaggtgatggcgccatcctgtagacaggtgtgcaaaggtgtccaggcaggtgagccagtgccttgcatggccaaggaggcaggaggccggtgtgccccatggagtaagggaaggggagtatatgagggcaaaacgtgactttgggtatgactgtgagccagctatgaggtctggagggccatacgctgagaagaatacagcaaaggatatagctggccagggctgcgcatgcccaaatgcacctgcttgcctctccaggaccctctttcagcaccatcgaagtgtgcagctcagggctccaactcacacttcagctaagggagatgcaagttgctgggggcttatcatcatgtgtttccataaaatatcatagtcagtcaaagtaaaaccaaattcaaattacacaatttggaggaacgaaatatgttaaaaaggacttgaacaaagatagaggcatcgtaagtgggaagcttgaagcagccatgaggctgactaagcacacattgccaggaagcaagtggggggctcagagccttaaggtctaggatgttgtgaagccgatgcctttcaggtgacatccaggacactgagttaaaggcagcaggtcgtccaacccaaccatcaccatgaaagtttcctaaaatgggttgtgtggcagccttaccacagccaaggcaggacagaccattctttgaccagaagcttctgagagaagcagagctgagttgcccccaggcctagacacaggtagcatggctgggtggggaggtccagggtggccatggctctgggtttagggatcaccctggggtcatgaccttagtcggttagtttgatggagcatctttatccaaagatgtggtgctgcctcttctcagtgcatttcatgatcacatattcccagcagacccagagtgaaagggagctctacagcaagcacaggacacactgaactccagactgccatgcccggtggcctcctcactgcagcttcgccagggaaggaaactactccaacctcaggagaacacacgggccactgcccattcccaagaatgacacagagctggattggggaaggcttccctgccaatgtcagcacctgccatgcaagtgaggactcttctggccagcttggctgctaggttcagcagagtacaatgagacggatccctcaatgtaaattccccctggtctgaatggaatgtagctctctcaagagggagcctgggaaacctggagggcctgaggacctagagaaatctgtgtgattatttccatttttggtctccatcatcaggagattgcaggtttcagtttttaaaatatgctctttagtctttctccagccattattgatggagagcttgttaagtctaaaaaatgagagttcttggaattatagattgaatcatggatgaaacctcttaataaaggggctatcctgacacattcttctaggataaaccctcagcccagtcttactttcccagtttctgagaactactttagggaaagtccctgcttctgtgcacagagttaaccagtgctactgttctggtggttggggccggttgagcgactgtgttatcagtggagccgctctctttattgtacagaaacagatgstttctgcctatggaggaagaaaggggaccatggctgagtggcgtggagaagcgcagcctcagctcgctggccaggccctgactgtcaggtcaacaccaacagttcgtggtgaaacgtgatacttgacacctttcctgaggagctcaaggctggaacctagggattagatgaagctttacgaggcagtcactggagcaaggcgatagagccatgattcacgctgcccccaatgagacccgccaggcctcatttgtcctttccagggagtggtagcagccgtcacagtgcccagcactttgccatttacaaggaacttctgcattgattattccctttgagactgagaccaatgtgtgagattaagtgaagaccacatcaggagagctaagtgacttgccagaggtcgtgagaggcagagtggcagggcctgaacttctgaccccaagtggactctcttggggagcctcctgttcctccgcactgccctgctgtaggtgagctcacactgtcaacatagtccaccactgctcacactgtccacatagtcccccactgccatgtacaaacgccttctctaggagtccgaattgattgggctgagcctatgtatccttcaaaacaaggagtctccccagcagacttcctcctacctgcagaggtgagctagtcccctcttctctgggctacgcctgtctaagtggtcagctattgtttcttactactatgtactataagtgacttatttgcatgttgagctcttagcctgtgaattccttaggacagcaactacttctggacaggtggagagaggagagttcttgagcatgtggtctttggaataaggctgcctaggatgggatcccaggctcaccacataagagcacttacaagaaaactgcttcactctctgtgccttccttctcccgtctgtaaaataggggcgagaacaatattgccaacctctaggattattgtgaagatgaaagcagctaatcatgtaaatcattggaacaaacatcctaaatgtgcatgaattgtaaaattgatcaattaaatgtagtatattcatgcaatggaaaaaatattctccatctattaccaggaaacaagcacatctaaacccatcatcattgtgctcagtgtgatcatcatcatcatcatcatcatcatcatcatcatcatcatcatcgtgtttgcatcctgagcttctaccacagccggccacacagcaggtgttccataaaggcatgtcaagtgaatgaacaaatgaacacatttatcaaacagctggtggcttttccctttgagactgagaccaacgtgtgaggtctcagccgggggaaaacagaaatgttcttaccctcatctggggcagtcacagctgcctggaccatatctaaaaacactacgatcactgcttcctcaacaaaataatacacaggaaattcaatgagttgaatttagkgttcctaagttaatttacccaaatgaaaagcaaaggactccaggccaaagagtcaggctcacttattcattaataaatattgtacaaactaagaaatcttgtttctgtccaggcaaagttgcctggctggaaatgctgggagcccatcagaaaccccaagcacatggatataggatggaagagcctggaagggaatccaatatatccttcctyactctttttaggatgttttagagcaaactaaargggtaaccaccacagaaaactaccaacacagagattttcacacaaagctctctggggtgtgcatgtgtttgtgcagttctttatgtgtgctctgttgagtcattaaagggaaaggaagcagtttcaagaaacttgtaatgggaaatgggatgtttacattgataagctgtcattaaaaaaaaataaagtcaagtctttcgtgttcaaaaaagcagctatcaaaaaggaagagatcttttgtaaaaatcagaaaatgccaaaatctcagataattaaagtatgtgatatttgtataccatgttccatttacaaagctcttttaggtgatttaatttttgaaaggttaaatatgaatttttataaataaacactgtagtaactatcatatgatctcaaacagaaatatatcagaatttttactgcagtctttttcgttatagtgaaaaatctgaaatagcagaaatgcaaatgaataggtgagttggtgaattaartgtggcatattgatacaaggggaaaatatcacagagaaattgtaaaattatatatatatatatatatatakatatatatatatwgatcgacagggataaattccaaaaacaatttaagtgtaaaaaaaggaactaccagtatgacatagtgacatttatggtgtgataaaacttttacaaatttccattaacttccatatggaaaaaaagttccataaacttccaatgatatgactgaccatagcagcagggtagtttttttaatgttccaaactccttaaaactaaacagatcaaatatgaaagtggaaaaaatgaatctrtggataacatcttcaacaccaccaggtaatggagagtcctttatgacctgaataaaagtagtggtgagcaggagtgtgggaggtcagcagctgtgggtctaagttagggaaatgagggaaaagccaacgtaccctaaaagtcatgaacaccaaaacaaaagaaaatacaaacaaagacaccaacaaaactcacatccaagattttcaaaacctactaggaagattgagaaaacaggtataatggcatatgcattgtttgtgaattctcctgagagcccctgtccttataaacagagctcctaggaagacccaaaagcccataggcaatataatatatactaaaacatctagatgacaacgtatcttcataaacccaaaattataaagcaggaacaagccacttacagctatgtgagctgcatgagacaatgacacttctagtaacactggcaaccaacaaacaaaaaaattccaaaaagtacaaattagcaagacaggtcaatctgagaacagtagttgaaattttgaaatagagtacttatttttcaaaaactattttgtttgtgtggataacaccagacaaaaataacaaaacatttaaaatggaagaaatatcagattggcatcagacattttaacagcaacattttgtgccaaatgacaatggaattacatatttaatatgctcaaggaaatgaatgaggccagggattttacatccagttagactaatatttaaaggcttaaggcagtctcttattaaaaaaaaaaagcaaaaactcaacacatcttactcccatgagtcactcatgaggcgtctactggaactaaattgccatatggagtgataatgatgactgtcaaaggctgttaacatcacaagagaaaaatcagacattatgtgcttcgttgttgaagtacacaactacctatgaaayattcttgtcaaaaaaattgtatcatccagatctatctaccaatctacatgaaatacagagaatagaggagcatgtcaaataacacaatggagagaaaatcagtaaattcaggcagggaaaatctctacacaaaaayaaaccgtttccttcaacaaggaataatctgacatttgccagtttttacaaaagctctcttattttttgatagccactgttttggacaggaaagacctgacttatttttttttaattacagcttatcaaagtaaatatgccattttcctttgtaagttccttgaaactgctacctttccctttaatggctcaaaatcaaacagaaaaaaaataaaattgttaaagtaaacagctcatgggtaagctgcagcacaacttcaagcagtctggcatacatgtaagtcgagtctctaaaggggaagagaacgaggagagaaaataaatatttaaagaaatgaggactggaattttccaaatttaaggaaaattataaattcacagatctaagaagctgaatgaaccccaagcataagaaatatgaagaaaactacactgaggtacatcataaacaaatttcttgaaaacagtgataaagagtatattttttaagtagccagagaatgaaaggtatgtcatatacaggtaatcaaagacaaggataacaaatttcttactgaaaactattcaaacaagaatgcaatagaggatgcaatagagcaaagagaatgcaatagagcaaatttttaaggtagaggtgagcaaaaagaaaaactggtgaaataagaattctacatccttcatattgttaggtttaaatctatcatctcatttgttttgtttttttctcatcaattctttgtttccccctatatgtatgcctttttaaaattaaatattttatatgatcccattttatgtctgtttttgcttattagtaatggttatgatttgtaaagtgtaattatgtttcaaaattaaggacaaaataaggactttcagtcatatgaaagttgaaatcatttaattcaccagcaaatgcaaaatatacagaaatgacaaagaaagtaccagatggaaatgtggatctgtaaaagtgtatgaagagcatggagactggtaaaaacaaaagtaaaatatgttttattatttaaatatcttgaatattatttaaatatctttgtttaaagagtaaatattaagtatttaaacaaaaataactatagcataaggtttatataacatatgtagatgttaaacgtatgacaataatagcacaatgccaggagagcagaaatggaagtatactattatagggctttattaagtattcatgaaatggtataatattagttaaagacagactgcaataaattaaagatatatactataaactctaaagtaaccactaaaatactaaaataacaaaacaaataactatcacaaatcataactatcactagcaggcaaaaattgacataaaatggaattatacgaaatatttaataaatcttaaaaaggcatacaaataaaagggaaacactcatgagaaaaatacagaataaatgagatgacagatttaagcctaacaatatcaatgataacattaaatgtaaataacctaaatagcccaattagaagacagaaattgtcagctaaaatcaaaaaatcaagacccaaaaaatgcacttaataaagttgtgggactcaaaattaacataaaaaattagttgcacttctttacaccaataacagtctatctgaaaaaagtgtcaagaaaacaatcccacttatgatagcatcaagaggaataaaatacttaggaatatatttaaccaagttagtgaaagacctgtacactgaaaagtataaaaacattgggaaaagaaattaaagaagacacaaacaaatggaaagatatctgatgtttatggactggagtaatgaatattgttaaaatccccatactactcaaagtaatatacagattcaatgcaatctctatcaaaatcccaatggcatttctaagtaaataaaaaaagcaattctaaaatatatatggaaccacaagagataccaaatagccaagacagccttaagaaagagtaacaaagttggagacatcacacttttggatttcaaattatagtaccaagctataataatcaaaagagtatgttactgaccaaaagcaaaacaaaaaaaaaaaaaaaaaacaggcaaatagaccagtggaacagaatagagagctcagaaataaaaccaagcaaatatagtcaaataatttttgacaagcacatcaagaaggcacaatggggagaaagatagtcttttcattaatggtattgggaaaatataaatttaaaattatataaacagacatttctcaaaaggagatatataaatggccaataaacatatggtttacatacaaaagaataaaattggatacttacatcatacacaaaaattaactcaaaatggattaaagacttaaacataagacctgaaacaataaaactcctagaagaaaatatagagggaaaactccttgttattggttttggcaatgattttttgaatatcacacaaaaagttctggcagtgatgcaaaaataaaaaatgaaactacaccaaactaacagcttctgtacagcaaaaaaaaaactaacaagatgaaaaggtagccaatggattgggagaaaatattttyaagccatatatctgataatgggttaatatccaaaatatacagggaactcatgcaactcaatagcaaactaaaaagtaaaaacaacccaatcaataaattggcaatgacctgaacagatatttttccaagtaagacataaaaatggtcaacaggtatctgaaaaggtgctcaacatcactaaccatcagggaaatgcaaatcaaaaccatgatgagatatcactttacacctgttagaatgactattatttaataaataaataaataacaagagataacaagcgctggcatgggtgtgcagaaaagggatctcttgtatgctgttggtgcaaatgtaaattggtatggccattatggaaaatggtacagaggttctttgaaatattaaatataggactaccacrtgacccagcaatccctctgctgagtgtatacacaaaggaaatgaaatcagcacttcataaagatatctgtgtcccatattccttgtggcattatttacaatagccaagatattaaaacaatgtaactgtccatcaatggatgaatgaatgaagaaactgtggtatacttacataatgaaatactattcaacctttaaaaaggatatactgccatttacaataacatggatgaacctagaagacatcatgttaagtgaagaaaaccagacacaaaaataaaaacagtgcatgatctcacttacatgtgcaatccaaaaaattttactctttctacagagagtagaatagtggttttcagggtaggatggggaaggaatggggagacgtaggtcaaaggtacaaatttgcagttaggtaagatgagtaagtctaaagaactaatgtacagcaagaggactatagttaataatattgtattatatattgaaaatttgctggcaaagtagattttaggtgctcttaccacaaaaacagagattactgtggaaaattatagatatattaatttgtttacctgttgtcatttcagtatgtatatgtatatcaaaacatcatgttgtatatcttaagtacatgcaataaataatcaattttcaaaatacatatataatcaaaaatgcattttacataaagacacaaatagattaaaaatgaggggaaaaaatataccatgctaacactgatacaaagaaagctaaagaggccatattaatatcagacaaggtggatttcagagcaaagtgtgttactaaagataaaaaataccatttcaaagtgttaaatggatcaattcattaagataatatatacatcctcaatttgtaggcatttagtaacagtttaaaaatacacagagatactaacaaaaatagtcacaaaaacaataagagaaaaagaatggaaaacatagaccatgctagcactaatctaaagaaaattggactgactatagtaatatcagacaaagtagatttcagtgcaaagaatattatcagggataataatggtcttttcatattgataaaagggtgaattcatcaagaggacgtagcaattgtaaacatttatgcacctaataacagagtttcaaaatacatgaagccactatgataaaatattttaatacccttcactctacaattaataaaacaaagagagagaaaagcaggaagaattttagaagacctaaataaaactatcaactaacatgacatgattgacattaatagttcacccaaaacagcagaatacacattttttcaggtgcacatagaatattcaccaagaaagaccatattctgggcyataaaataagtgttaataaaaccaaaaggattcaagctgtatgaaatttaaaattatataaacagacatttctcaaaaggagatatataaatggccaataaacataggaaaaaaatgctcaacaacactaatcatcagggaaatgcaaattaaaaccacaatgagatcccacttcaccccagccagaatggccatgattaaaaagtcagaaagcaacagatataggcacaatgttgtgaaagggtaatgtttatacactgctggtgggaatgttaaattagtgcaacctctatggaaaacagtatggagatttctcaaagaactaaaagtaggcctaccaaaggaaaagaagtaattatagaaaacacacacacctgcatacataggttttttttgtttgttttcttatttggttttggtttgggttgggggaagtgctgagctttacatatttattaacaaggtaattaatcagtagattaccatagagcattatttctttttttttttcaacttctatttcagatatgggggtacatgtgcaggtttgttacatgggcatatcacacccaggtattgaggatagtgcccagtaggtagcttttcaacctatgtcctcctccctccttcctccctctagtagtccacagtatctatttttctcatgtttgtgtccatgtgtgctcaatatttaactctaacttataagtgagaacatgcagtatttagttttctgttcatgcattaatatgcttaggataatgactttcacctccatccatgttaatgcaaaggacatgatttcattctttttatgactttgtagtgttccatggtgtatacataccacattttctttatccaatccaccactgatgggcacctaagttgattctatgtctctgccatcatgaataccatggtgatgaacatacaagtgcatatgtctatttggtataatgttttatttttatttgggtatatacccagtaatgggattgctgggtcaaatggtagctctgttttaagttctttgagaaatctccaaactgctttccacagtggctgaactaacttattatacattcccaccaacagtgtataagtgttcccttttctccatggccttgctaacagccattctgactggtatgagatggtaccttattgtggtttcgattgcatttctctgatgattagtgatgatgaccattttttcatatgtttcttgtccacttgtcttccctgagaagtgtctgtttaatgtcctttgcccgtttttaatgggcttatgtttttggcttgttgatctgtttgagtcccttatagattctagatattgaacctttgtcagatgcatagtttgcaaatattttttcccattctgtaggctttttattctgttgaaagtttactttatggtacagaagctctttagtttaattaggtcccacttaccaatttttttgtttcagttgtttttagggacttagccaaaaattatttgccaaggccaatgtcaagaagagtatttcctaggttttcttctagaatttctacagtttgagttcttacatttaaatctttaatctatcttcaggttttttttaatatgatgaaagatcagggtccagtctcattgttctgcatatggctagccagttatcccagcaccatttattgaacagagagttgtttccccactggtttttgtcagccttgccaaagatcagatagttataagttatggctttatttctgagttttctgttctgttccattggtctaygtgtctgtttgtaccagaactatgctgttttggttactgtgcccttatattgtagtttgaagtcaggtagtgcgatgcctctggctttgctctttttgccttaggattgctttggcaatttgggctctttttttatttcatatgaattttagaattgtttgctaattctgtggagaatgacattgggtagtttcataggaatagcatcgaatctgtaaattgccttgggctgtatgactattttaacaatattgattcttcctattcatgagcatggaatgtttttccatttatttgtgtcatcactctgatttctctcagcagtgttttgtagtcctccttgcagagatctttcacctccttgtctagctgtattcctggtatttcattttctttgtggctgttgtaaataggattgtgttcttgatttgactctcagcctggacattattggtatatagaaatgctactgatattttacattgattttgtatcctgaaatcttaccataattgtttatcagttctagcagcctcttggcagagtctttagggttttctaggtatagaatcatattctcagtgaagagaggtagcttgatatcttctcttcttatttgaatgccttttctttctttctcttgtctgcttgctctggctagaacttcctgcacccatgtttattggcagcacaattcccaattgcaaagatcaacctaaggcccaccaactgatgagtggrtaaagaaaatgtagtatacacataccatrgaatacttctcagccataaaaaaagaatgaaataatggcttttgcagcaacttgcatggaactggaggccactgtcctaagtgaagtaactcaggaacagaaaaccaaataccacattttctcatttgtaagtgggctctcagctatgaggtatgcaaaggcatgcagagtggtataatggaaggggagagggtgggaagtgagtgaggaatgaaaaaatacctgctggatataatgtacactattctgatgatgggtatactaaaagcccagactccaccagtacataattcacccatgtaaccaaaaaccacttttacccctaaagctactgaagttttaaaaattaaaaaagagaaaaatatatgccatgtaaccataatggaatgaaattaaaatcaacaacagaaatgtctctttaaaattctcaaatacttagaaatcaaataattcactttctaaataagcaatgagtcagaaaaaagtattttaatctgaataaaaatgaaaacataatatatcacataatatattataaactgtcactaaagcagtttatgatttatagcaataaatgcctgtgttagaaaagaagaaagactcggaataaattatctcagtttcatctttagaaatttgaaaaataagagcaaattaaacccaaagtaagcaaaatcaaggaaataaagatgagaacaaaaaaactgatgaagtagaaaacaaaaaaaatgaagaaaatgcaatgaaaccaaaagttaggttatttttaaaaagaaataaaatttataaatggccagacagacttctggagaaaaaaaaaagaagatgaaaaattcccaatataaggaatgaaggaggtggcatcattacttgctttacagttgttgatgaaaaaagggattattatgagaaattttatgccaataaatttgcaaacttcattgaaattgacaatttccttaaaagatgcatatcaccacaactaattcaagaaataactgggggaaaaaaagccattatatctagaaaaaagttgaagtcttagtttaaaaccttcccacagattgaactccagatccagatggctggctaattctatccctggtaaattctatcaaatgtttaaagaggaactaataccaagtctacagaaatttttccagataattaaataagagaaaatacttcccagtcattgaaygaggccaatattactcttattccaaaataagttaggcattacaataaaagtacaatttaatatccctcctgggtatagatgcaaacttctttttaaagcatagaaaattgaagccagcaataaatacaaagaacaatatattatgacccagtggggattatcccaggaattcaaagctaatttaacattcaaaaatacatcaaagtaattcactatgttaacaaattattttaaatctctatgatcatttaatagatagaaaaaaaawttttgacaaaattcaacttccacttctgattaaaaactctcggcaaactaggaacagaagggaacttccacaacctgatcaagggcatccattaaaaaaattctacagccaatattatacttatttgaaggactaaatgctttttcattgccctttctgccccccaagattgggaatgagccaaggagtctactcttatggcttctattcaacattgtataggagaatctagccagtgtattaaggcaagaaaaggggggcgcaagaaaggcaccccgattttaagggaagaataaaagctctctttattcaycaaaaacatgatcgtaaatccagaaattcctaaggatctacaaaaaaaatactagaaataataagagagtgtatcagggttgcagaatgtaacatgaatatacgaaaaccaattatatttatatgtacttacaataaaaaaagaacttgaaatttaaaaacaaaaccattaacaatagcatgaaattatgaaattcttagttataagacttgtacacttaaaactacaaggtattgctgaaggagactgaagaagatgtaaatgcatgaagggatatatgtgttcatgggtcagaagactcaatattatgaagatgtctgttctagaaacagcacactatccaaataaactcctagtcagctttactggaaaaaatgaaaaggtaattaaaaattcacamggaaatgtaaaggacataaactagccaaaacaactttgaaaacaaatgacctaattcataatttgtcataaagttataataattgagacaatgtggtattggtataaagatacacaaatagatcagtgtaacagaatagagagaccagaaattggcctacttatatatggacarctgatttgcaaccaacgtgcacagactatgcaaagaataaaaatagctatttctgcaaatgggattgaagcaattgggtcatcatgtgcaaaacaataataacataatagctttgacccattccatgcaccatgtgcaaaagttaactcaaaatggatcgtagacctaattctaaagsctgaaactataaaacttctagaagaaaacataggaggaaatctctatgacctttggttagacaaagagtgcttaccatgatccacaagggaaaaattttataaatttgacataatcaaaattaagaacgtctgctttttaaaaggcactattaaaagaatgaaaacttagatgtcagactgggagaaaatatttgcaaatcagttttttgaaggagtttaaaacccttaaaacttaaaaattaagaaagcaaacagctcaataaagaacaaaagagcaaaatatttgaagacacacttcaccaaaggatagatgaggagtaggatgatgaaactggaaggtagaagtttattgattgcctcttggtattagctgggagtgaaaggatgtcactttctgacaagtcaagtaaaagaagcttgagtatattgaagaccacaaagattatcaataaaataaaactggtatctaaaattcaaagcttaggaagagggaggagaaatggtgtctatagtaatttccatatttctcaaagtaggaacccaacagagaatatctagagaaaaagataactaagtccttatataaatcattagtacagaagtaatcactacaacacacacacatgcacacacaaatcctcctggataccaaagtcagtgcccaataaaagcaagtaaaacgtgacctrgtcaaactgagaacatgccattcctatcaataaatagaaataggcttagatcatgtattaaaagaaaagatttatcaaactaactaatgaagcaaaatccaattctatactatatagaagtgagcaaaaaagattaagaaaaggtaaaaattaaaagatgagaaaattcatactagtcaaatcttgatatcacagtagaattctagtcaaaaagcagtaagcaaaacaaaaacactttttaatgctaaaggctataatttacaatgaagatataacttattaatatttgtgtatctgataacacaagtttgccaatcagaaattatggcatactaaaagagaactctccacccacatactgaagactctagaacataggtcagctgtgctcagagaaaaaaatcatagtattaaatatctatatcaaaaaaaggaaagaaactaatgttaaaaaaaaacagaataaatcagaataaagagtagacactgagttagaaaactaaaaaacagtaaaactgataaatgatcaaaaagctattgctttggaaaaaaatccacaaagaacagaaaacmctagcaaaaaaaaaaaaaagcagaattatacaaatagaatgagacaaagtgggaaaacattgaaatagaggactttttaatattttaagataatactttgctaacttaatgtaaataaatttgacaacctaaatgaaataaataatatttaggaaaatataatgtatcaagtttgaatctttagagataaaaaatctgaagagctcaattactatagaagctatggcgaaaattgcaagacttctcaccaaataatacacccggccctgatggtttcacaagggaaagaattacaacttccaaattcttttttacaaaacaaacctaacattgatatcaatatctaactaaatattgccctaaaaagaaaattataaaccaaattcacttataaatactgacataaaaatcttaaaagtgtgagcaaacagtatatgtacaaaacaattgtcatgaccaggtgggattcgttccagaaaagaaagcgattttcgaaagcctaatcacattagtgtktgactcatggtatctatatcttcaagaagaaaagtcatgtygtttcacacgtgctgtgccagttatcaggctgtcgtccctgagcttccagcctgcgctcctcacttcgctctgcaatgctggggctggtaccctgcaaaccgcatcccagctccgctggctgtgcctgctaggccctgcagtagacgggcagaagggaggcggccaggctgggggcatcactcttcctgtttgctccctcttcagccagtatcatcccatcctcacttcttcacctcaaatgtggtggtgtgttccaggagcagcacttgagtccagtttgctgwttgcacttgctcctccagccagccgctgcctccatcagacgtctgggtctggctccaggagcccgtcaggcctcaggacccagcctgagctcagggagtggggggatttgcagagggctgagttccatgtggcccctcctctcccctttgtcccccacccacaacctctcagatgtcttagcagtcccttcttgtcatttagtgaacagttctttatgttaaattattttcatttaaaaataggcatggtttctgcctccacttaactaaatctgacacccattgctggtatttaaaaatattcagttaagaaagaattgttggatacttccctgacatgatttcttagataaacaactccaccctaaaaccagcatcttactgagaggtgaatccggctgggcttctgggtcaggtggggacttggagaacttttctgtctagctaaaggattgtaaacacaccaatcagcactgtgtctagctaaaggtttgtaaacgcaccactcagcactctgtaaaaacagaccaatcggcactctgtaaaatggaccaatcagctctctgtaaaatggaccaatcagctctctgtaaaatggaccaatcagcaggctgtgcatggggctaaataagggaataaaagcaggccacctgggccagcactggcaattcgctagagtcaccttccagtttgtgaaagctttgttcttttgctcttcgcactaaatcttgctactgcttactttttgggtctgcactacctttatgagctgtaaggctgattgcgaaggtctgcagcttcactcacgaagtcagcgagaccagaaacccaccgggaggaacaaacaactccagaggggccacctttaagagctgtaacactcactgcgaaggtctgtggcttaactcctgaagtcagcaagaccacgatcccaccagaaggaagaaactgtggacatatctgaacatcagaaggaacaaactctggacacaccatttttaagaactaacactccctaggagggtccagaagggagaaactcagcacacatctgaacagaaggaacagagtcaggatacaccatctttaagaactgtaacaatcactgcgagggttgrggccttcattcttgaagtcagccataccaagatcccaccgggaggaaccaattctggcccattaccaaatgggaaacgggttccccatgagggcgctgtgttggagtggtagccagggcaacagacaagagaatacaacaagctcttcgctccaaattctgacctgaaactctggaagagacactgttgcagggaaaagaactaggggcatgatgggaaatacaatgtagcccttttgggtaagaaatcatagaaacacacatataaatgtatctccttatattggcaaaaagaaatactcgaaaaacaaaccaaaaactaattttttaaagtggttacataaagagggaaggagaaacaaggtagtgaggataggaatgaaagacttcttagataccacctagagttttgactttaaaaacaaaatgttttacatacaataaataatgaaacgcatttctaaattcatctgaattcagtttccaaaacaattcccaaaacaatctgaaatgaataagcctgattatctacctggttggtaacataacagtacaaagagaagactgactggtagtgactttagaaaactgttgactgtgaagaactgctggttccaaaacacagttccccacagaatccacatcagaaaatggctccccatgctgtgcagctctctccaccgagctmcaagtttaattctccagtgggtgcatctcattgctgggccatccagcccacgtggaatcccaggcacaatgacaactggaaaatacagttttcaggtttctccattctgcacagaggactgtatatcgaccgcagattaaaaatgaattgagcacatcaatccatattatgtgtcacctggtaggctcaggcccttcgaacgtctttcatttgcctcttgaagatttggagtatagaaattttagaggaaaactcatcctgaaaatctgtaacaggattataccatgtaactaacgtgtcttatgtctttaaccagggtcgatgtttagagactgtgaggaaaaaaccatgtctaagatatccagtgtgccctagatagcaccagggcaagcgtgaccacgcacacagtcttaccgtggttgtagttccaattacacagggagggctctcacttggaaagaagggtatataattttgtgctttctaaataatcctaatgggatgtaattttttttttgaaggtgtggtctctctttgttgcccaggctggagtgcagtggcactatctcggctcactgaaacctctgcctcctgggtttaagtgattttcctgcttcaaccacctgagtagcttggattacaggcgccggccaccatgcctgactaatttttgtatttttagtagagatggggttttgccatgttgaccaggctggtcttgaactcctgacctgaagtgatccacccgccttggcctcccaaagtgctgggattacaggcgtgagccaccctgcccgaccaggatgtaaatttattattactaataacatcttccaaattccattcattataaattcccccaaggaataccgtttaaaacttgtccggatgaaaaagggaaataaaagttaagcttctgaaaataaaagcttccaatatccctagacccagttatgggttggctccaaatcacccacaatactttcaggggtcttagaaccaatctcagctatgatgctcattcaatgatcattgttggctgatgaatttctttttttttttttcttttctttttttctttttttcttttttttttttttttgtttttttggagacagagtcttcttctgtcacccagactagagtgcagtggcacaatctcggcttactgtaacctccacctcccgggttcaagtgactctcctgcctcggcctcccaagtagctgggattatgggcgcttatcaccacgcccagctaatttttacacttttagtagacacgtggtttcactatgttggccaggcaggtctcgaactcctgacctcaagtgatccaccagcctcagcctcccaaagtgctgggattacaggcatgagccactgcacccggccggctggtgaatttcttagctcaacttcctggtccaacaaattctctcattgcgtaatgtgtgcagtgttctgcaattccagtcttgctctactcgtggctaggtacctcagacaaggcttttaaccttcctgtgccaaggcctcctcttgtaaaacaaaggtagctagtgttcctcccattttttgtgaggattaaatgaattaataaaaatcaagttgtttgcaatagcaaagacttggaaccaacccaaatgtccatcaatgatagactggtataagaaaatgtagcacatatacaccatggaatactgtgcaaccataaaaaaggatgagttgatgtcctttgcagggacatggatgaagctggaaaccatcagtctcaaaaaactatcacaaagacagaaaaccaaacaccgcatgttctcactgataggtgggaattgaacaatgaaaacacttggacccagggtggggaacatcacacactgcctgtckggggttggggggctgggggagggatagcattaggacaaatacctaatgtaaatgacgagttgatgggtgcagcaaaccaacatggcacatgtatacctatgtatcaaacctgcacgttgtgcccttgtaccctagaacttaaagtataattwaaaaaaaaaaaaaaaagaaaaatcaagtgctttgaagagtgtctggcacatatgaagtgctgcacaattgctattactcttttcattatgtttattactactgttactccccaatgccagcagatatcaagatagcaatgttctagatacattcagaattcaagaatcacaaacactggcagattgcctgccgtccgagataatatttctcccttggaaaagaaaaagaaaaatgtagtctatgtagcaaagattatctagcaaatattataacatgatgaatcctttattagtgtttataggggaaaaagaaagaaaatcattttccaaacagtagaatttcgaactaagaacaattaggtctgaacattcctcatggctcagaagtgacagaccaccctggtggcatcctccttcgacaggccacaggctgagcatccaaaccatgcagtcagcagttcagtggcaagggagcctctgccttcaacacaaataaaatccatgaaaatgaggagtgagggggagagcctgctgcctaacactctacatcctgatgcctctgaatacaggaattgcacagatgagaagagaagaaagaaagacacagcgtgtatctcactgtcactgggcagggaccaggttggggaggacagagtggaaaaagtctgatcatttctgcaaaatggtgtctatgtttgtccgctgtgctagttacagtcctttccctgtggttatttcttaaaagatggaactaaaaggccaatacttagaaaaaaacttaaaaggatttaaaaatcacaggcagaagttcagatgacacaccacattcagactgatggtgaggaaacctttcccgatagagacctcggtctctttagaacttcacatctcagaataatgaggagcaaaactctaagtaaagcaaatcatttttgcaattacatagactttgccagaacaactgtgaggaaactgaatcagtaatattagactctgaaagcttttttccctccaccaastaccacggacaattttatacaggacaagaatttccagccaaaataaccaaatattttctttaccacctggcatgctgcttcttccagcttgtgtggtacattgctagaagtttctctgcagaataaaattaccctctgggagctgggtacatgggttggtggttagagctactctggacctagtttggtcacttggcagggaaagcatcagtaaacagactgagtgaggaaccatgggtaagccatgttttcaggaagcagacagtctgtgaggtaggagatttaaaagaagaaaaagaaactgtattgtgggcggcttctattcttcctgggctaagaagtagtaaaggagtagtggccaaaaaataaaaactgtgctatcaaaaagagagaagaaaaagagagataccaacaaccagtagaaaagtgagcaaaaccgcatggacggttcagagaagcaaaagtgcagatgctttcaaatatgggaacagatttcaatctcactcttaaaagaaaggcagtggtatttttcacttaacaagttggcaaaattcaaaagctgtgatggcaaactgtgtgagtgatggtgcggagagatcaacactctcctagctattattgcaagtgggagtgcaggtttacaagctcaggggagagcaggctggcaaagcactcagcaccagaagtgtttgactcaaggacaccacttctacaaagtgagaaactgagtatttttttaaataagtctcaaaacaatctaaatgttcacaataggggactgaataaattatggtgtgatcatacagtagaatattatacaagttcgtaaagaaggaggcctgtacgatttggaaggttctgcaaggtacagggtcaagttcaaaaggaaaggaagggccacaaaagtaccttgttgtgctaccacttgcatatgaaagctcctctgaacaaatgcagatgtgctgccgaggtagcggacayctctggaagctggcagcaagggctgcctggagggagaggaaaatagtgaagcaagagatacccaaacccattaaaaagtgtgctgtatgtctggtgtctatgtagatgcgtgcacataaatagaagaaatattgagcgttcccacaggcgtgagctgtgttctgtctgtactgtaagcttatgggtgacttgtatcttcttccttgtagtattttttgagtttgtaaatatttcacagcgaaattagatgctttaaaacaaggattgttttccttctaaaattctcaattatctccaccaaacaaaatacctgggccaggcacagtggctcacgcctgtaatcccagcactttgggakgctgaggtgggccgatcacctgaggtcaggagttcaagaccaacttggccaacatagtgaaaccccatctctactaaaaatccaaaaaaaattagtcaggcatggtgatgggcgcctgtaatcccagctactccggaggctgaggcaggagaatcgcttgaatccaggaggcaggggttgcagtgatccaagctcgtgccactgcactccagcctggtggcatagcaagactccatctcaaaaaaaaaaaaaaaacctgctcagttaattcagtcaaaacaagccttttgattgtggcacactcgagttgcacagtgggattggagccggaatccccatctccaccctcggaggacagtcagggctcaccacccacccacctggggagcctggcgcccagcagccccacactccctgtgttccgccaggccccatggaggctgcagaggcagggcgggatatttggggacagagttccacttattgtctctctcaggtaaagccttcccaaacggtgctgctatcggaattgaagacttggagctattttggttgcattcttggccctgagagacaggtttcctgttaatactgttttgaccgagattgtttgggcctctccagcgggagaccagatttagatcaaacgcacaggatcctcctgctgcaacaagaagggcctgggacacccagggaagtccaagcccccgctgttagagggtgggaaacgggactggggtgctttctctgctgccccaggaggccctggtggagaaaggcccgcccgcccggagccacacaaagcccaggaggctgggccggcagtgtggaggtcaaagcatcccgggccccatgtggaaggtgagtcccccctctggggcccagggcccggctgaggaggctcacacagtcatactcagagtgccagccctcacacaggactgtttagggcctgccactggtcagccaccatttggagttgctgccgggaacatggaaccaaggagaccttgggaggcagggtctgtcctggcctctcagactaacctggcagatgccctcrcacaggcaggaagagatgctgatgggaggcttgaacgtcccagtgttcccacggacacttcattctcaaagggaaagaagaaaagggaaggcctgcctgcccaattcgggtgtacagagagggaccgcaatgtatgcagcacagtagagacagctctctggagatgactgtcgggtgcaccatgcccaggctggggagacctctgaagcaggcaggagggtactatctggtaaccacagtccctggggtagttgagtggccaggkcctaagcagaacctactctttattccatatttgcattccatgttccctttgcaaggctggggaagtggctccagcatctgaattagggccttgaccttttcacaggagccagtaatgactgcagtgaaaccttcaatagagcctgcccataacctgctgaagtgtggcttttggaagagccaggcttatttgtttccaaagtcttttcctttgagtctttgtttgatcgtggacctgggaactggcatctgccatctctttcctaatgtgaccttaaatcatccaagtgactgtgggaaggtggcctgcagcacccagcctgggcctctagaaagagattgtgactttattgccagaggctggaagttagtagacraacttgtgaggcacagttattttctctgaaactggaggaacacagccaaagtgtcttctcccattgtagatgacaaactgtgaagacatgtcttaaagtctggcgagagtcacccctttcattgcaaagttaatgaaagaaaaccatgtgttcacaacaagacagccttttcctaaaaatcctgagtcgttgtgtcaccattcaaatgtcagagaagtgtccgtgctccacttaagcagaagacaaaagtaatgtgaaaaaatagaaagaattcaggtgtcagaagaatggtcttgcaatatgtatgtaaatgaaaatggctttttacctgaagtaacccttcaggtcagtggtcctcactcaaagccaggagcatgatggactcacccgaaatctttgatagtatgctgacacctgggcctcacccagaccaattaaaccagaatctggggagaaagggggagactcaggtatctgtgtctacctcccaggttatctgaacgtccagttaggattaagaagcactgatagatttgaactttcacttaggtttactttgtaataaatggccttcccatctgtgacctcaggcctgaaatgaataggtccggttcagtggcccaccagggactaacccaaggctgtcagagtcccagttataaatgcacatcttctctggaaccctgccacacaagtaaaggaatcgcctttcttccaccaaactgcagtccgtgcacagaatacccagccagccggccagcaagaaggaggcacccgtggctggcagggcaggcccaatgctggccgcaggctccactccatcagccctggcctctattggccttcaggcttgagccctggtgtgtgaacataagtgccctgctagaggcctggagggcctgaagacacatgttctgggtccagcctgtggcccactcaggatcagccaagggatccagttaagtgggtcaagactctggatttggtccctagtaagccatttagttttttagagaaaaactgtctttccgtacactttgattgttccaccacgaggagacatccttcccaggaccgcttcaccgatccgsagatgctgctcctgcactgcggcatccgaatatgcaaaacgatgatcaggtgtttccagagtattgtggtaagaatcagagaaaaccaagtgatacatcctaaaacaatattggaatgcagcggataattacatgatcatttttcaggaaacatatcaataatactttaaactgatggtcaatcatattggtgtctcaggtacacacagaccaaaacttagcaaactgtaccctttaaccatgtgcagtttgttgtatgccaattataacttcatgtaactattcaaagaaaaaatctgtgtcccagcactctgagtttgggacacagttggtgatcccagcagccatgttctgttactggaatctgtgtgtttgctgagtggatagtcctggaatctgcccccagcactatccacgcagcaaacacacttatgagggtgttgaccacagccccagttccaaggtgtggggggtggggtgggggtgggttgtctaaagcccaccagtcctttgccatagtcattggtttagggttagccctgtgccctgagtccaccaagcaggctaggtctcatcactactgccagatcccagacagtttttgtcctccctctgaggtcatagcatggggggtaaagccctgaacatttgccaccaggggagaagcagctttagaattaagcccacagttggtgggaacgtaaaatgggatggtagctatggaaaatggcccagtaatccctcaaaatattatacatagaattctatgaaacccaacaattccacttctgggtacccacccaaaagaaatgaaagcagggactcaaagagatttgtacacccatgttcacaacagccttcttcacaattgcccaaagataggagcaactaaacgtccactgacgggtgaatagatttttttccagtgtggtctgtctataccacggaaaattattcagcctgaaaaaagaagagaattctgacacatcctacaacatggatgaaccttgagaacattaggccaagtgacataagccaggcacaaaaagacaaataccatgttattccacttatatgaggttcctagagtagtcaatttagagagacagaaagtagaatggtggttgtcagggctgggaggaggggaatcgcagttatttgtgtaattggtatagaatttcagttttataagataagagttctggagaaggatgatagtaatgattgcacaacaataggaatgtccttaacatcattaaactgtacccttaaaatggttaagatggtcattttatgtgatgtgtattttaccacgattttttttaattaaaagttttttaaagaattaagcccacataacagaggacagccaagcctggagaacagctgagaaacagacctggagccctgtgatcagctggctctgtggctgacttctcacatttccacattgcttcagccagtttgtttcaggctttctgctacctacggcttaagtcatcttcattgctaccttgtacatgaaagaaggcattaccgtgagcttccagaacaccaatccagtggaacttctagtccaatgcctacctctcagtcagattaaacattacctgatgtccaaacaagagttggtcctgtgggtgatcaaattctgaccctgactttcaacagttcttagcccctagaccctactgcacttcacctgtccagtccctgggccacaccacagactttgtcatcaaacataatctccaaaattgcacgctctgttcctttatcacgatccgctattctcacaaccctcccatcctcattcccacacacccagcctatgacactcaactctgaagtccactttccagcctaagctctacgatgttccgcgttggttcatgtgctaagcacctcggctgtcctcagcagttcctatctccctggtcagttcccrttcttttccctagagtggctctccagatcctacagcctcctmcgtcctccagcacgctctccgtcccgagtttccaggtcatctctccctccctctttctctcactctggttcgtatttccagcctcttgcccacaacctctacacttagtcacgtcttcccgtttcccatggttaggaaaacacgtttctccacctgctgttccctgccagctgccaccctgtcgctctccttcccttcacagccaagcagctcacaacattcgcctgtgttcccatccccacctcccaacatttccagccaaccactgtcaggtgtccagcccccagccactccagtggaaacattctgttaaaatggctctcacccaaatggctaagcccatggaccttttccagacagcctcctgcgtgaattctctgtcacgtgtggtgtggttcccttgactgccctgcgcccttggctccggggcaccttctaagctgtcctcccgcctctgacattcttcctttctctgactctccctgggaagttggggtgctctatagagcactgtctgcggctctcctcactttccatcctctgtacccatcctagggacttcatcccatcccacatcttaaattccaagaaaggtctggcttttgcctgactccaggagtaaacctctaacccctggccttagagtgtcctgcctgagaaaastgtcttttcctggggccttgggccatgccacatactttatggtgacaatgtgatttagtcaagcgggaggggagttggtcccaggccatgtggtgtgaagttgacctccacaggggctggagactaagcagctaaggtcggtcgcttgggcaccccatgcttaggtgaccaacttgcagtgaaacccctagaaaccagggctgagactgcctggctgccggtcctccatgtgttgtcactcgtcattgcrgggagaagtaagtgcttctgtgcagacccactgagagagggcaactggaagctgactcccagcctcccctcctcctttcactgtaataaaccataaccacccgcttcacagcttttctgagttctgtgagtccttctagtgaatcgctgaggctgaggatggcctctgggacccccaaaayagcacaccatgtcatcaagtcctacactaatgactcataaatccatattttcttctgcacatgtctcccaagaaccccatctacacacataacaaccaagatgtctcagtgacactagagatttgagttgcccaagttggtcttctgcattctgctcccaactcatttctccttgtgctttgctgcaaatcaagccagtcgtgtctaagacctggcaggcatctcaccctccagccctcctgtgcctcccttccctcacctgtgatgctacctgtgggcttctctgggtccttcctgccttctgggctcactgctcccctcaattcagccccccaccatgtcagctggaccacgagatcaatactctctgggtaggtctccctacatccaggccacacccctccaattatccccactacagacaacakgaacctttttaaaaagcaaaatcaggattctagttcaagagcatgaaattgaaatctataggaaggtataagaggtataaaaacagtaagaacctataacaatgaagagaaaggccattagtgaaaaggacatttcaacagtttttagagtcaaaagtgaatgagaacaaattaacagataaatcagagtggagaaaaactcaccttgttgtacaaccctcagcaaagccttgcactttggagctttccacaagagttgaccaggatgtttattaagagacactaagctcaggacctctgcagatgcaacagttactcattccaggctttagggagtctatacccagacactgacttcctgccttcacacactgaagtgacatttgcccactgacaatcccttaacacaaactggggcctccagccagccatcctctcaggaaagaatcccacctgcagagacagcagtgtgaagtcctggacaatagtgtgagatcctacctgcagagacagcagtgtgaagagctggacagcagtgtgagatcccacttgcagagacaacagtgtgagatcccacctgcagagacagcagtgtgaagacctggacaacattgtgagatcccacctacagagacatcagtgtgagatcccacctgcagagacagcagtgtaaagacttgcaccgagcaatcagtccctaacacctaaatatgtactatttggtttgtgaccataggaatatggtaatttacaatcttttagcttaaaaaaaatgytgtgcaactgttgtaagtactttccagtttaaaatccttcagtggcttcccttggcctgcaagataaaaatccaccttctttcttagcatcaagaatctcctgctacagaccatgttctcatcaaaccctgtggtattttacagttcacacatatgggtcagctggcaacattatgcttcttggccttgactcagcattctctctgctcagaatgcacttccccacacctgccattagatgaacgctaacacagctcaaaaatttgtccaagtgaagattacttacaaccttccctctcctaaaatcatttaaagtcagtcccttctacacaagcttttaccagtgttcccatgatattttattacacttgcaaatttttttttttttttgagtcagagtctcgctctgtcacacaggctggagtgcagtggcacgatcttggctgactgcaacctccacctcccgggttcaagcaattctcctgcctcagcctcccaagtagctgggattacaggtgcccaccaccctgcccagctaatttttgtatttttagtagagactgggtttcaccatgttggccaggctggtctttttggccaggctggtcttgaactcctgacgtcatgatccgcccacctcggccccccaaagtgctgggattacaggcaagagccaccgcgcctggcctacacttgtaaattaacctgcctgtctgcactttgtgctctgggagaaacctgtgcaccccaggcttacgatatgggagagcctcggtatatttccaamaatgaatgagcaaatggcatttagggatggacttgtcattccctgtgggactgatattggctccatcaggtgtcttatgtaagtgggaacaataacgccagctacaatgtaggatttttgtgaagataataatgatggataaaatgtatcaaatacagacaatgccaaacgctacccgcagcactttatacgtgtttaaattcattctcataataacactgtatgattggcacaattatctccattttatacttgatgaaattaagactcagaaattaagggacatggccattccagcatcagagggagcgtctggtgcatggcaggccctcaacaggcgctagctccctttcctgcccccacctctcaaatctaggagattacaatgagataactgggagacacaagggaggcatagcttgtgttgaggagactatataacagagaagctaaatttcttaatgctgttttataacttctaggaaaaacacatctcccagaccaaagcaagaatcccctgcaagtttcacctggatctgtccacctaggcttggaatagaggtttcatgttcactccacatctcagaaacacccttagttataacctctgggaagagatctgtcaggttctattacatgccggtgagtctctctgaggccagggttgttagtctgactgtaataataataacagttatagtaggaatagcatggcacccacagcaatagaaggaggaatattaacagaggacttactaaccaccagatcatggctaggcacttgaattaacatatttcatccatttgagataattactaacagcaatggcagcaacagtagtaacagcattgtcagtggtggcaatatctaatgttaactgagtacttactctctgccaagttctagactacacccttcacaattattagcacatttgacccctatcaaagaattactattatctacatgttgcaagtggattccgtttctgaccaagagggagtaaccgggtcttgatttaccctcttgtctgaacccacaaaaataataaataaaatatatgaaaaaatagtttttaagacactggccaacaagcaatggaggacggtgatccccaagagatgggcacaaatgaggtgacccatctgattgccccagcttactggagacctctccagccatggggcagggagagggatagcaggagaatacaggactcctaagctgaggcaacaaagaagcagaaaacacagtgagaagaaaaatcaaccaatcaacactggcccagaactgatacagatgttcaaataagcaaacaaggacactaaaacagttattataactgcattatgtatttgcaaaagttagctacatggaatctgtaaaagaggcaaattgaacttctagagataaaaactataatgtgtgagatgttacaatgaaaaatatattggatgggattaacaacagattagacattgcagatgaaaatattagggatcttaaagaaagagaaactatccaaaataagacaccaagagaaagaaaataatcaaaaattgaaatgaatagagggtgtggaacagaaaaaatatttgaagaaatatggctgaaaatttccaaattcaatcagagctataaacccatagatcaaaaaaactcagcaaactccaagcccaagaaacttaaagaaaactacaagacayctcagtattaagttgctcaaaaacagtgataaagagacaatcttaaaccagagtaaaaagacatattacatacagagacagagatgaggatgacagaagatttcttgtctgaaacaatgcaaaaataaagcaacatttttaaagtactgaatgaaaaaaggcatcagaaaaggagattagcattatgtagagctgaaaccaaaagaagacctagttaacgccggatcccatctatttcagggtgcctagaartttaatatcagacttacagtttcaaaaatggactttattaactatcataaacaaatataaattacagtcrgattaaagacataaatgtcagcstagagttccatatccagcaaaaaatatgtttcaaaaataaagactgtttgcagaaataaaaagctaaaagaattcatcaccagcaaacatggactaaaagaaacgttaaggaaacttctcagcagaaggaaattgagaccgcatggaaatctggatctatgcaaaggaataaagagtatcagaagttgttaactgcatgagtaactgtataaggttttattcttattaaaaaataataatgatgtaattgtgtcatttacaacatatgtagacataaaatgtatgacaacagcacaaaaagccaggagggggaaaatgggaataactatcatgagattgtaataccgtctataaagtgctataaatacactcaaagatcaactatgataagctaaggacgtatactatgaaggctaaagcaaccattcaaatgataaaacatagagtcacagcaaacagaccccagtcttcaggtcatctcatgcctgtgagcaaaaccacgctccaagcagtgtgaagcagatggaaggaatgagaacctggacagcaaggaacccgaggcctggggctcaggtttcccctcctggagagactcacctttgaagctgcaggcctctcattacagttccatgtgcttctcagcctctcatattcttccctcttgaaataccccatttgtgctttttttcaaagaacaaggatcagaagagacttctctaattctttccttgctttccaaaacaagaaagaatttcacaccttcttaggagctaaggacataggcttagaatggcaagcagtggatacctggaataactgcctcacacatccaggtagaaaggmcttgagggtggagtcgactattctcaaaatgtcagagtactagaatccccacatacccctgttgtctatcagtgacctggtctaggaagaaataagtgaccaggtgtctggctgagcagaccagttttttgtcttgctgaatgggtgtacaagatgaagggcagtgtcaggaaggacacagagagccagcaaaaaaggaggagagagagattctgtaaaaaagaaaaaacataggaaarctgagtatgctgctacggggagaattgaggaaaagaggaggccattagagatgtggtgacaatgttggttgtaagcacttcctcctccgtctcccccaagaacctcagtaaatatctgcattgcctcttcaagtcagatctggggcttggtgaaaaaagaacagctaggactatcctcaagggaggcctggggtgcccggtcacacttatgtcgagaaaggtggttgacattcactcaggatttcattggcttgttcatctcatcagtaaatgtttaataagcatgttctgtgtgccaggcactgttctaggtgcttaggtttcaccagtgaacagcacaaatgtccctacattgttgccagagaatgcaataaattataaagagaataaatarctatacacagaatgttagaacatgatgagtagaatggaaaaacgaaaaagtagaggagacagtgattttaawcagggtagtcggggtacaatgcccccttggtaaagtgatacttgcgttaagccttgaaggaggtgagggagtgagctatagtttggatatttgccccgcctccaaacctcatgtcgaaatttgattccgatgctgaaggcagggcctggtrgaggtgttcgggtcttgggagaggatccctcgtgaatggcttgtcactggcctagaggtaatgggtcagttctcacatgagagctggctattaagaagagccaggcactaccctctctctcttgcttcctctctccccatgtgacctctgcacagccttctccccttcacctcccaccatcagtggaagcagcctgagtcccccaccagaagccaaccagatacggcaccgcatttcctgtacagcctgcagaaccataagccaaataagcctctttttttataaattacccaggcttaggtacttctctatagcaacacaaatggacaaagaaagaatggagggcaatcgaggtgggggaaaggcaatgcaaaagtctggaggtagactttcccaaaactgtataatttcataaggacataatggatggagaggagaaaacctatggtggctattaaggccctgatgccacatatgtcaaatggatatcttctgatggtcatgaatttgttgtaaaaagacaacatgcattaacatcaggcgtgataaaagccatgctgagtggcccaagtcaacatggcttgagaatgaaaccagtgagttaattttagagagatcccttaacagtgctatcaccaaatctacgtctgattggtgtacctgaaagtgacggggagaatggaaacaagttggagaacactctgcaggatactatccaggaaaacttccccaatctagcaaggcaggccaaccttcaaattcaggaaatacagagaacgccacaaagatactgctcgagaagagcaactccaagacacataattgtcaggttcaccaaagttgaaatgaaggaaaaaatgttaagggcagccagagagagaaagatcgggttacccacaaagggaagcccatcagactaacagcggatctcttggcagaaactctacaagccagaagagagtgggggccaasattcagcattcttaaagaaaagaattttcaacccagaatytcatatccagccaaattaagcttcataagtgaaggagaaataaaatactttacagacaagcaaatgctgagagattttgtcaccaccaggcctgccytacaagagctcctgaaggaagcactaaacatggaaaggaacaaccagtaccagccactgcaaaaacatgccaaattgtaaagaccatcaaggctaggaagaaactccatcaactaacgagcaaaaaaaacagtgctatcaaaaatatttgtgtattttacctataaagtttcgctacactaacagctccaccgagattcctgaattccactggaaaagctgatggctatgatttcctaaactgttaaataaaacaaatcataataaactgctaacttttttcagtatttaatacctgtagttcagttagtaattttttcatatataacatgttgcctgtatgcaattgaaccataaagttcattgcaagaccgggcgcrgtggctcacgtctgtaatcccagcactgtgggaggccaaggcaggcgaatcacctgaggtcagtagttcgagaccagcctggccaacatgttgaaactccatccctactaataatacaaaaattagccaggtgtggtggcacatgcttgtaatcccagctacttgggaggctgaagcaggagaatcacttgaaaccaggaggtggaggttgcagtgagcagagatggcgccaatgcactccagcctgggtgacagagccagactccatctcaaaaaaaaaaaaagaaaaaacaaccataaagtttattgtaaagattatgttgtttttctgcaaagcaatcagagttgaaatttgtttgctacatcaacaaattaagaatatttttacaagttgagaaataaactaatatgccagcttgtagctgcttttgccttattcttcatatgtgacttcttaaattaaagcaatgaagatatagtaaatgctgaaatttaggcatatataagcacattctacagataaataatggggataaatatttttattttttatgttttttaagaatctattctgatcttacagccaccataagcattactagacttacacaaataattgcattataagcatgtttataacttagccaaaacatcaatttttataactttttaagaataagagttgaaatttcatacaagttttttgacaaactgcaatattaattgtttccttttctttattgctataatttaagaactttattttaagcagcttaggaagattattaagtttagcttttgaagcagtaactgaactgtagccagatggtcaasaagtaaactacataatttcaagttctagcacattatacattttgagcaatcaaagtactatattttcattgtctataaagtttcctttgcaatttccacacacacaaaaaaaggcaggagacaatggggatgggatttcttctgggaatgatgaaaatgttctggaatgagtgtagatgttggagtcccttgtgaatacggtaaaaaaaaaaacactgaattatactttaagagggtgaaatgtatgtgtgtaagttacatttcaatttttttaagtgtgcaagacaggagtgtgccttgcacattggagaaacagcaaggagtccagtatggctgcagtagagttgaacaaaaaagagatgaggtcaggcatgggacgggacatcagaccacggaggcccttgttggtttttgtaagatctgtgggttttactgcaattacatggggaaccaatgcagggttttgatgcatgtagtgacatcgtatcgtctacatttcaaggatcaggctgcctgctgtatcggcagtagctacaaggagacaagagtggaggcaaggaggaccataaagaggccattgcartgatccagggagaggcgatgcagacttgggaaagctcagggagagtggcggaaacagtgagaagggactggatcctgaacatcgtttgaggatctctccacaaaatttgctgctgagtggataatggacaagagtgaaagaagggacacatcatcaagaaaatgaaattctgctacagataggagttttaggaaatgaaaagaggtaagctactgactgggagaacatattcttcagtcatacatctgacaaagaacttgaatccatagaactcttccaactcaacaagaagacaacccaatttaaaatggacaaaatatttggatagatatttcacaaaagaagaaatacacatggtaagtaagcctatgaaacagccctcagtattttcagtcaatagggaagtgcaaattaaaaccacattgagatgctacagagcagttgaaatggctaaaattggagactgacaatacaagtttggcagggatatacagccattggcgctgtcatacattgctagtaggaatgtaaaatagtaaaaccactttggaaaacaatttggcagtttctgaaaaagttaaacttaaacctaccatatgacccagaaattccactttcacatatttacccaagaaaaacaaaaacttatgtccatacaagcccttattccaaactcagtatctcactccttcccaatcaaagccctcatctgcatggagcagacctacaaatgctgaaaaccgaactttctctggagctctctttctcctctgcttttctgcattttgactgaaagaaatgagagttcccatgtgcagccagggagattctctggctttcatacttcgccttacactggtgatttctcatcttcagactgtcattgtttttctccaaggtgttgatggcctcaaggaatggacacttggttccaacatccttataatgactatctccagcccccagactcccaagatgaccacctgagatgtcacacttgccatatgctttctcccaccagcacccaatctcagtctaccactgttgaaaatctcaacaattgttccccaatttggcactgggactatcagggtacacttagaccagtgatgtggtcttcattgccagtaagccaatggatggtctatcttcaaaacccaaatttaggttgtgctttgtaggaccatttctggtaccaattatcataggttgggattaccaaaaaaaaagagtctctaaagctctgaratttgtatgcagaaggtttgttaggaattactcttaacagtcacatctataaggggtgagaaaagcaaaactgtgcaaaggaagttgaactgcaaggtggtttcaatggaaagctgagcttcaagaatttttggatctggaatggctctttggtgttctcccatcttgaggccaaagtcagggcctgtagactcctctcctcctcaaccagttattggatgggggctgcccacaagaagtggataggttgggcaagccagagagcaacctccagagaggaatttggctgagaactgtcagcttccggcatggagtgcctcagtcctgaggggcacctggggaacacaatagcacccgctacacttgctgccccctctcaaacacaccrtgttctctcccatttcaccagtggaagtggataaacaccagtatttccttttctcagcccagggctctttccactgagggtaagagagaggctgaagagtttatcctgctctggactcataaaaacaaatgaacaccagatgacaagaggccccaatcctaagccagcagaaatatgggtttcaacctgtctgcctgcctccaccctggcctgaacagaacacaaaagcctccacaaacttgttaaaaaggaatggaagagttacatacgatttaacacaattcaacatatacatagctaatatttatcgagtgtacatgtcagagcttattctaaacaccatgtgtctatgtgtatttacatacatagacatatatacacacatatgcatatacatcaatatatacatatatatgtgtactcacatacatttatttaacccttagagcagccctccaaggaaggcatcacacttacaccattgcaggtgaggagacagaatacggagaggtgaagtgaacttgcccaacatttctagaggtcaggggaagaacacctttaagttccggttcatttatccttcccatatgtcttttcgtagactgtggtctttgagtaacccataaatgtgatcatttttccatatgtgtaacagagattcttgttatggcccccttcactgtgcagaagattggggcagtgtttcagcttcagtgagtaggtctcgaggatcataatcccagcatcatgatcacactcaaccatgtttgtctcaaataaagccctggggttacagggtgtgtgtgggcaccagggcagccccctacagtgggactgggtggaactctgtgcatggattgcagccggtgaggtggacagggaaaggamagcatgaacaggaarggagctggctgttcccacactttcctaggccctgtccttgctcttagacgattgcactcacagcccagtgtcacctaccaccagcacactgacgacttccagacacatgcwtccagctccagctgtgctcccaaatgcagacccagcactggcctgcctggtaaatgcctccacctgcatgcacaaaggagatatgaacatctccaaaaccatctcactgtgtctttcttacctaaagacacttctttgtgtccccagttctggttgttggggccattatctacccacccaccccaagagaaaacacaggatcaccccgtcattctctgatattgcccccttctaatggctgacaagcccagtaamcttcctgcaggagcagagcacacagggcagttggcasgaagtccttttgcctgtcttcaaggctagctcaccccatctctgtctatcaggaatttcctctataaattataaaccctggaaaaatggtgatttctccagtctcctgtgccagtgagagacactgttaatgaatgacaaggactccagatccgtaaattaaataaaaatgtataaacttgccagttaataacttgagcaaaaatggcatctagtggattactgattggcattagcaattgtttccaacatggttgatgagagaaatcaactgaggaatctattttaaaaatccagtctcctgraacatgccaccaggaaggcagccagcttacagacaggattcccaggtaaatatgaacttcagataaactgcgaattgtggtttattctaaatatgttccatgtaatatttgagacatacttttatttaataaaatatttgttgcttacctgaaatttagatctaactaagaatcctatgtttttatttgccaaatctggcaactctgacaggcctacagaatcaaatatgttttgagcccttgggatgggcttaatctgaaatttcacacaagtctgactggtcatcagtggggactagggggccctggtraggggacagcagttctgttccagaccctctgcagagctgcacagcctccctcagaatcaggggactcagcccctcacacccaatgggaccaggcagtgccatggctagagcttctcggagggcctaaatgccaggcaagtctggctcatgatgcactcgtggctttgagaagcactataatgtgtcagagtaaaaaataaacaaaactgaagtccagagaactctgctcatctgctgctttctctatttaccagctatacaaccttggaaagccacttaagctctgtgatcctcatgcatttgtttttttcattamagaaatatttattgggtgccctttatgtgcaaggtcctctgccaggccctggggatttaacaatgaataaggcaggcatsgttctgcgctcacagagggcacacacatgtaacagacaagtaactaaaaatgtgaaggctgtgaatgaaacaaacagggtgctgcttggagtatgatgtgggtgggggcatctgggctgcatggtyccccagaagctgtctctgaaaaggtgacaattaagctgagaccggcaggatgaagaaaagccagccatcagtgagcctggatgtagtaaccacatcctttattttctgtattctcatgtttttgacatctggggccttgctgaccccaaaggggctgcccctcccagcgttagccagttcctaaagatyggaaacagctcgaccgtacacamctttcacgtgcaaagcagccaatccagagtccataccccaacccctccttcatggggctgtcctgcaacattgctgagctcactttgtttctaggagggtctygcaggttccttgggattttctatagagctaatcatgtcatttgcaaatggagacagttttattttttctttcaaatctgcatgtcttttatatccttttcttgcattattgtactggctagagcttccagcacaatgctgaataaaagtggtgagtacagacatccttgcctttcccctgtcttagaaggaaagcaccattaaacataatgctaactgcaatttttttgataaatgctctttatcaaattgaggatgttctccctctcttcctattttttctgagagtttttcatcataagtgaatattagattttggcaaattcttttttccacatcaactttagtctgttactctggtgaattacactgatgacttttttaatattaaatcatcattgtatacctagaaaaaaaatcccacttgaaatttgtgcatatttctttttataaattgctgaattctgttctctaagattttgtactatgtctggttttggtatgagaccagtctggttttggtattactcacttcacaaagatgaactggtgttcccttacattttctggaaaagatttttgtatagaattggtgtcaattcacccttaaacatttggtagaagtatccagtgaaactatctgggcttggaaatttcctttttaggagatgtttaattacaaattcaattttctttaagttacaacactgatcaaaataactatttcacattggcaaagttgcagaaatttgtgttttctgatgaattagttcatttcatctacgttgtcaaatttgcatgtgtagagttgttcatagtaacccacatcatattaatgtctacgggtctgcagtgatatatcaggtttcactcctgatatttgtaatttgtgtrtttattctttctttgccagtctttctagaggtttatcaattttattgatctcttcaaagaatcatttttgtttcattgattttttttctattgtttttctgctttcaatctcattgatatctgttctttattttttccttccttctgcttacattttkaagttttcaaacgtcttgagtcaggagctcggattatcgattttcaattttctccttttctagtgcatgtgttaagagatacaaacgttgctctcagcactgccgtagatgtgcacccacacattttgatatgttgtgttttcattttccctcagttcagtgtattttttaattccttcaagatttcctctttgtcccrtgggatttttacaagtatgctgttgcgtttccatgtgttcggaaattttctgatcatttttctgtattgatttcgagtttgattccataacattagataatgtgttctgtatgatttcaattcttctaaatttgttaaggtttgttttatggttcagcrtatgttctatgctgctatctactttgtgggcctgaaaaaaatgtgtrttctgctgttgctagacagattattctataaatattaaccatatactgttggttgagggagtttttgagttcttttatatccttactgattttatgtctagttattctagcaattgttgagtgagggacactgaagtcttcaactataattgtagatttgtctagttctcctttaagttccatcagtttttgcttcacacattttgtagctcttttaaatggctgtcttcttggtgtactgacccttcatcattaataatgttcctctctgcctctggtaattttctttgctctgaaatctactttatcatttattaatatagccattcctactttcttttgattaatgtttgtatagatatctttttccatttttttgttttcaaactgcctgtatcattattttgaagtgagtttcctgcagataacatacacttgagccctgctttttaattcacactgtcaatctctgctttttattgctgcattaagactatttatatttaatatcattaatggtgtgttaggacttaaggctgccactttatttttttgcagatcacagaactttattaagatggaatcactgcaaattacctagaagctactagcctaagccaaaatctatgaggttcatatgaacttagttatacaaataagaaacaaatggcaataaacatatgtgtgcgtgtatctttatagcagtctgatttacaatcctttgggtatatacccagtaatgggatggctgggtcaaatggtatttctagttctagatccctgaggaatcaccacaccgacttccacaatggttgacctagtttacagtcccaccaacagtgtaaaagtgttcctatttctccacatcctctccagcaccaaatgtccaacagtgatagactggattaagaaaatgtggcacatatacaccatggaatactatgcagccataaaaaatgatgagttcatgtcctttgtagggacatggatgaagctggaaaccatcattctcagcaaactatcgcaaggacaaaaaaccaaacactgcatgttctcactcataggtgggaattgaacaatgagaacacatggacacaggaaggggaacatcacacaccggggactgttgtggggtggggggaggggggagggatagcactgggagaaacacctaatgctaaatgatgagttgatgggtgcagcacaccaacgtggcacatgtatacatatgtaacaaacctgcatgttgtgcacatgtaccctaaaacttaaagtataatgacaattttaaaaaagaaaaaaaaaagaaacaaatggcatattcaaaaccataaagaaatatcctgatgcccaggtgatgaaggctggggtgaataagtcctcacatttatttcaagttgttaaggagtttgtgggcaaagcaatggtcccttgcatgcaagaagtcaaagagctcctcttgcaatcctcttctgtatgtgatcgagaggataacacgcttgtcacagagctctagctgcttccaggcctttacacatttctccaactgctcacattgctatctcacggttgttaggggattcactcattcctcctcttcctcttcctcctccttaggatctcaggacctgctcagcatcttttgctcatcctccagtcccatgtctggctacggttccagagtcaatatgagcagcaacagcggcacctaattgacttcaggatcaaaaaggacttgaatattttgttttgttttttatttctctgttttcttttacttgctttgctgtgggttacttgaactttcagaattctattttgctttatactgtttttgaatgtgcagctctttgagtagcttttgtgtatatggctgctgtagtattataccatatatacaaaatatcacactctaatgatgtcattatttcatcagttcaagtgaagtataagcatctattttttataagtcaatttacccccctccatttataattgtcttgagttgtttatgttcaccctgcataggatgaatcccttccaaaatttgatttagatgtcaagactaatgatactatattgaccccaagagaaaatggaacggttcgtgactcacataatgaggctttctgaaaagagcaccgcggctcacaagcagtgccaaaaatggcttgagagagcagagaaaagcttggggtatttatggttgttagcgagtagggcctcagtgtaggttcctacatgtggtaaacctcccctggctgaaggagggagaacccaggctttcttatcagtttgcccagatgtgaagcagaaacagaaggaggaaggatgaggcttcaaagctgtcaaccatcaaacatcaaaaaactggatcaagctctgttacatcattatttcatctacaaacatgtaaagtttgtctctccatcttttatgttaaatagatattttctaatgtaccattttaattcccttgtttccttaagattgtttttgagttatttttcttagtgattgctatggggattatacttcattctaacaatctagtccaagttaatatcaacttaattttaatggtatataaaaacttttgcttctatayagctccattctcttcatttctttctttgtgcaattgtcatcatagaaattacatctttttgtacacccattaacactgtgttataattattactttattgcattgacttttaaatcaraaatgagaaaaaaaagaaaaaacattataccatattttatatttacctatgaggtgcttgtatttcttcgtgtggatttgacctactacctagtgtcctttcattttatcctgaaggactccctttagcattgtgggggggcaggtctactaatgacaaacttcatctcttaaatttacctgagaaygtcttaatttcatctctgtttttgaagaatgattttgctgtatataaaatttttggttgacatacttttttcccccacatcagagtttgatttagtactgttgcgaacacacagaatctgaaaaaaatccaatgcaaacagaatagatttcttgggatctaatattttttaattgcctgacaacctaccctctaagaaaatctrtttaaggggggcaaattattttcgaaagatgagtataagaggcagttggaggaaggtaaggaaaattaccactacatattgcagaaacatactggaaggcaaatatagcccaaagaaaaacctccactgaaaaaaaaatgttgaatgctgaccatagatctagcaccctgctcccaggtcaataatttgaaccaaaaaaatttaaaagaccttgctcaatcctgaagttagtgaaggaatataggagggctgtgtgttaatgttacacatgaaatcaaagagcactgctattcaaggggcataatgtcttgatcttaggatcaaatactctaggccttgagctgaagagtctgcattgcagtagaaaaatgggaagtgctttatgcacatggattcaggacataccagcaacctacctgtgcagcattgtctaagccataatgatcttcctcatctcccactggaggtagatgtaagaatctckggctgggcgcagtggctcacacctgtaatcccagtactttgggaggtcgaggtgggcagatcgcgacgtcaggagatcaagacaatcctggacaacatggtgaaatcccgtctctactaaaaataaaaaaattagctgggtgtggtggtgcacgcctgtaatcccagctactcaggaggctgaggcagaaaaatcgcttgaaacaggaagtcagaggttgctgtgagccgagatcgtgccactgcactctagcttagaaaaaagaagaaaccttccagtctgtaagaagaaatctcttacagaactttgatagaaagttgggtcttccccctcgcctgtcttcttcttcttcttcttcttcttcttcttcttcttcttcttcttcttcttcttcttcttcttcttcttcttcctcttcttccttcttcttcttcttcttcttccccttcttcttcatcttcttcttcttctcttctcttttcttcttcttcttcctcctccccttcttctccttctccttcttcttcttcttcttccttctccccttcttctccttctccttcttcttcttcctcttcttcctcataaggaaaccaaacatttatacttgttacaccccctgaagctgaaagcaataaagaatgaacacatacagcaagttgctaggtgcatctctgtttaggaattgccttaacattgggtttctattgacagaaccagggaggaggttgcctcagaccttcctgaagctccattgtcccctggctgagcagaccacagctaattttaagtggcaaaagaaatgcaaacaaattcctccaggatgagaagtgtgatttcgggctaaaacggtgctctcacacggggtatatgagcacattcaaccaccactagaatagaacctgagggtgcgcacttggtgccaactgctggaaagctttcagttagataagaatggaagaatgcctgagtttttagataattttagacattgggatatggttaacaggttgtgttcagggcctactcttgatattgtctaaataaaaacaaaaataactgcctaaagagaacatctacatcctaaatgacaaaacatattatctgggtgaaaggatgatttaactcgtgaaactcaagaacacaagaacaacaactataatcrtttccttgaacacggtcgctagaagggcaaagcatttttctacataaaacattacaattttcccactactccaaaggaatccaataaataattgtacagtgaaagggcctggatcaaaactggaagtgacaccggctcccgacgaacacaagtcacaggtccctgtgcagatcccaggtttgagtcgtccaagaacgcaccacccccaccggcctgtggtttcatctttccccaatgggaatggccagagggtccaagctgctttacagaagactgttccatctggtaagcccggtgctgagctaagccaagatgacaaacgaaaagtggtcaaagccaaggtttcctcgcgctgcctttgtcttcttcccactgcctggcctgagccctgcagccggaccycacgaggcgagttcttcgcggggcctccccacccaagctggggcaagtccgctgcccatccagaggcaaagagctccggggctgactccacggcagtactttgctaggggtcccggtaggtgttctcatgctgcaagctctggaatgaggctctgcattcggccaggcacgactccaagggatcctcgagagcaagggccatgaagagtctctggaacgccaccgctgcgcsgttagaagcgctccgggagaaattgtgtctgggctgcaggcggcgggagatgcagtccaggaggcgctgcagcagccgtcgggccagcagcctttgcggcagtgttgctttatgctagggacgttgacttgaccgcagccatgcgcctgcaaatactttctctcccaaacgcagcctagttcacccgtgaggacgtgcttcctttgactggagttgaggcaktggctgctcaggcgactgctatagcccaggttaaactgcactttccaagggatgggctgatcgtggtcttcaacctggaggagattcctatctctcactgccctctcctcctmttctgcagaagccagggcacacggtgcccgccaggttcaccatctcgcgtgcacacgcggggcgcagaacgaggcaggtgcagacccaggcgcatggcccctccgcgccccgcatccccaccctccaggcgggcgccgccccgcatgggcagttgacgtgtttttccttcagcattttgaatacgtcatcccactgccttctgttccccatttctgatttttaaaaaattaaccgttaatctcattgaggatcacaggtagtgataaatcacttctctcttgctgctttcaagattctctctttgtctttgtttttgccagtttgtttatgaggtgcggaggtgtgaatctctgcgtttattgtacttggagatcactgagcttcttgcatgtagagatgaaagtttttcatcaaatttgtgggggtttagcccttatttcttcatgtatttttaccacccctttccctcatctccttccgggactctcattatacatattgtgtatgcttgatcgtgtcccacagatctcttaggctctgtttctttttctttattcttttttctttctattccttagactgtatattttcaattgacctacctttaacttcactgattcttttaccagcccaaatatcccattcagcctctctagtgaacttttttcaattgagttattattttcatcgctagaatttctattgtttttttgtataattctatctcttgttgatattctctatttgatgaaacattattctcatactttcctttagttctttagatatggtttccttagttctttatatttaaaatagcttcggtattatttagtaaggacaatgtatagacttcctcaaggacagtttctgttgactgctttgtacccctgtacacggaccatattttcttgtttctttgaatgttgaaactggacatttcaaatgatgtaatgtggctgctctgaaattcaggttctctccactccctgggatttctttttgttgccacttattgttgttcttgctgctgctgtttrtttgttttagtgactttcctgaattaatattgtagactctgcctttttgtcataaatgaccgcagaagtcactgctcagttagctcagtgggcagctcacaattgtgcatagattttcttaactgtctgaagccagtaagtctcccagtcgttgccaagggattgtgagtacgttttgggaaatgccttctacactcagccaagtagttgacagctctgccttaggctctcctttttgctcttcaggacctcaatatcagccagaagtgagaacttagagcttctcagctctttcctgaacacatgcacrgccctgggcatttgcacaaccctgttcatgcaagtggccttccaggttccyaggatgtgtcagagtttttcaaagcctcctttggacatctcagtctctagcttttccctttgggtttttatggtcagcttgtcatttgccccaactattatcatcacctcaggcagcagtgatgctaaaccatcaccactgattgtttttgacaaatgtcactgaggaaaaggttatttgcactgggcaagctctgagtcagaccaaataaagacaactcttatgagtggggaatgactagcaggtcaaacaatggcagttctctgggaatgggtctttggagaagctgcagccccattctggcccctccactggctgctgggctgctgtcttttacctctgctgtgggctgttggcttccaaggctactgccaagctgtacagggaagacagaaatagggctcgttaaaatgttacaaagcttgctattcttaccacaacttagtgtttttcttgagtaagtgctttccagattgtgacaagctttgttagtttccagagttctgaaaaagttaattttcacaattcttagcagtattattgctagttttataaagaggaggagaggggtttgagatccttgctccaccatccccactgacatcctcttcacatgctggtagaactatattagagttataatttttgttttagttgtcaaacaaactagaaaacttaggagaagaaaagactattgggcttaaccatatttttgttcatcctgttcttgctttcttcctgatgttctcagatttttcttatcatttcctgtttagagaacttcctatagccaatcttttagggtaggtctgctggcaacaaattatcttagctttccttcatctttaatgttttgattttcccttcattcgtgaaggatattttcactgaatataagattctgggttgacagttctctttttcagcacttgttatgccacttctttctagtgttggaggtttgatcttgattaatctattgtcatttgaactgtttttccctgtgggtaaggaggtgtttttctctcttgttgctttcaagacttttctgtctttagttttcagaagtttgactggggtgtgccttggtgtggatctctttgggtttatcctgtttggggttcactcaacttctggagttttgtaggtttctggacttcaccaaattttggaagttttcaaccattatttcttggagtactttttcagtatcttcttcctcctctccaggtggtaattattccatttttaatattctaycagattaykttgtatcagtctataaatatgctgctagataagtatagttaattatttagaatttttatctatagttgtaagtgaaaatggtcttgttataggtttggaattatggttgcagtagccttataaaacaaattgtggaactttgtaactttttctatgatctaaaacagcttaaaacagaaatgacatactataattagctcctctcaaaatctatttgaatttggttctttttttgagacagagtcttgctcagttgcccaggatggagtgcagtggagtgatcttggctcactgcaggctctgcctcccggattcatgccattctcctgcctcagcctcccgagtagctcggactacaggcacccaccaccacgcccagctaaatttttttgtatttttaatagagacagggtttcaccatgttagccaggatggtcttgatctcctgacctcgtgatctgcctgcctcagcctcccaaagtgctgggatcacaggtgtgagccaccgcacctggcccgaattgtttttaattaaagctatctaagtacttttctcacctcttctgtcacttgtgacagatctgtttagtattctcctccttcttaggttaattttggtgattatcttagtctattcagactgctttgtcaaaatctcattaagtgggtagcttataaacaacaggaatttgtttctcacagctctggaggctgggaagtccaagatcaaggaagcagcagatttggtgtctggtgaaagcctgccttctggtttgtagacagcacttttttgctgtgtcctcacatgatgaatggggtaaggcgtctctcttgggcctcttctgtaagggcactaaccccattcatgagagctccactcccatgacctagtcatcccctaaagagctcaccttcaaataccatcaccttggggttaggacttcaatgtatgaatttgggaggggacacaaacattcagaccatagcagtggtttacatttttcctagaaaatcatctatttcttatataatttctgttcatatttgatgtcattgagttacatgttatactacttataatttttaatatctctgttatatctgtagttagttttgctttctctccttttccttaatcaagcttgttgggtatttgtaaatttaattggtcttttgaaagaatcagcttttgtatatttaatttgtcttccgtaaaaactgtttttggttttatttattactgctactattttaatgtcattaattctaactttcatctttgtcaattgcctccttctacattgttcatttctttggttcttcacttgggtttatgatgtataaaaccaacttmttttagctcctcagagtctcactccatgtgtgattcagttttctgggcttcaaaccacccaggacattgcttagcaaagcaggtgcagcaagaatgagtggatgaaattattgacattggatctcatggtactgaaagtctcctcatctatagccacatggctggggtgccaaagaactttatgagatgtgtatctttgccttcagagaggttaatttcccaagagttggggttggaggagaaaaagcctgaaagccaaagaatgcaaggtcacattaaagtgtcatcagaggagtagaggctgcaaatcatttcagttctgctgggtccaacccagttccttcttagcttctcgtcttgcattctggtaacaaatgtgaggacatccaagaagaaggctrttttactcaaaatcctggtgctacaaacaagaatattgcatacacttgtctagtggatasagcttgtgacttaagccctctcactcaggcattgtaaaggatgctagagacaccgcaggtacattttggagcttgaaattaatcaaaagatcaacaacatctcagcctttttggagcaccttgcaaaatatacaagtttacaatattctgctaactccctctaaactcctaaaagctcgacagtgattttgttctcccaatttcctgaaaccatcgtacccactggattggacaacctcagctggtggccatgtgtgctataagaatcatccattttggacattagatttggagaatatttccctggttcaagcaaaaaagctcttctatctttctgtcataacagtcatttccacagtaaactctataggcctctttgtaaatttggaggctaagcaaagaggagagagacattttccctcttttgagagtaggcacgtgagtaccttagaggcacaaacagctctcaagactcactgtcatgccgcttggtttccaattctttgctttcaacaaaattgaaggaaaacctagtgaatttgtcagctgacaaatcactgaaaataatatttgatgatagattaygatttgatttttggcaaatacctaggaaagagttcaaagtactgacaaaacaaaactccattctcatctacttacataaaagagtaaaggttctcaggcttagatttatagaaactgaaaataagtaatattcatctctctatgcatgaactaatttattaaaatgtcccatatatctcctttaatactaaataaataaatttaccataaaatttttacttttatatactttctccaaatttataatattttcatggtattttcatcaattgaatactaataatattataataattcaactaacaataaacattcttttatttttttattatactttaagttttagggtacatgtgcacaatgtgcaggttagttacatatgtatacatgggccatgttggtgtgctgcacccattaactcgtcatttaacattaggtatatctcctaatgctatccctctcccctccccccaccccacaacaggctccagtgtgtgatgttccacttcctgtgtccatgtgttctcattgttcagttcccacctatgagtgagaacatgyggtgtttggttttttgtccttgcaatagtttgctgagaatgatggtttccagcttcatccatgtccctacaaaggacatgaactcatcattttttatggctgtatagtatcccatggtgtatgtgtgccacattttctcaatccagcctatcattgttagacatttgggttggttccaagtctttgctattgtgaatagtgccgcaataaacatacacgtgcatgtgtctttatagcagcatgatttataaccctcaggtatacacccagtaatggggttgctgggtcaaatggtatttctagttctagatccctgaggaatcaccacactgacttccacaatggttgaactagtttacagtcccaccaacagtgtaaaagtgttcctatttctccacatcctctccagcacctgttgtttcctgactttttaaagattgccattctaactggtgtgagatggtatctcattgtggttttcatttgcatttctctgatggtcagtgatgaagagcattttttcatgtgtctttagctgcataaatgtcttcttttgagaagtgtctgttcatatcctttgcccactttttgatggagttgtttgtttttttcttgtaaatttgtttgagttcattgtagattctggatattaaccctttgtcagatgagtaggttgcaaaaattttctcccattctgtaggttgcctgttcactgtgatggtagtttcttttgctgtgcataagctctttagtttaattagatcccatttgtcaattttggcttttgttgccattgcttttggtgttttagacatgaagtccttgcccatgcctatgtcctgaatggtattgcctaggttttcttctagggtttttatggttttaggtctcacatttaagtctttaatccatcttgaattaatttttgtgtaaggtataaggaagggaatccagtttcagctttctacatatggctagccagttttcccagcaccatttattaaatagggaatcatttccccattgcttgtttttgtcaggtttgtcaaygatcagatggttgtagatatgaggcattatttctgagggctctgttctgttccattggtctatatctctgttttggtaccagtaccatgctgttttggttactgtagccttgtagtatagtttgaagtcaggtakcttgatgcctccagctttgttcttttggcttaggattgacttggcaatgygggctcttttttggttccatatgaactttaaagtagttttttccaattctgtgaagaaagtcattggtagcttgatgaggatggcattgaatctataaattaccttgggcagtatggccattttcacaatattgattcttcctacccataagcatggaatgttcttccatttgtttgtatcttcttttatttcgttgagcagtggtttgtagttctccttgaagaagtccttcacatgccttgtaagttggattcctaggtattttattctctttgaagcaattgtgaatgggagttcattcatgatctggctctctgtttgtctgttattggtgtataagaatgcttgtgatttttgtacattgattttgtatcctgagagtgctgaagttgcttatcagcttgaggagattttgggctgagacaatggggttttctagatatacaatcatgtcatctgcaaacagggacaatttgactttctcttttcctaattgaatgcgctttatttccttctcctgcctgattgccctggccagaacttccaacactatgttgaataggagtggtgagagagggcacccctgtcttgtgccagttttcaaagggaatgcttccagttcttgcccattcagtatgatattggctatgggcttgtcatagatagctcttattattttgagatatgtcccatcaatacctaatttattgagagtttttagcatgaagagttgttgaattttgtcaaacgccttttctgcatctattgagatagtcatatggtttttgtcattggttctgtttatatgctggattacgtttattgatttgcgtatgttgaaccagccttacatcccagggatgaagcccacttgatcatggtggataagctttttgatgtgctactggattcggtttgccagtattttattgaggatttcagcgtcaatgttcatcagggttattggtctaaaattctcttttttggttgtatctctgccaggctttggtatccggtaatgctggcctcataaaatgagttagggaggtttccctctttttctattgattggaatagtttcagaaggaatggtaccagctcttccttgtacctctggtagaattcggctgtgaatccatctggtcctggacttcttttggttggtaagctattaattattgcctcaatttcagagtctgttattggtctattcagagattcaacttcttcctggtttagtcttgggaaggtgtgtgtgtcaaggaatttacccatttcttctagattttctagtttatttgcatagaggtgtttatagtattctctgatggtagtttgtatttctgtgggatctctggtgatatcctctttatcattttttattgtgtctatttgattcttctttcttttcttctttattagtcttgctagcggtctatcaattttgttggtcttttcaaaaaaccagctcctgaattcattgattttttgaagggttttttgtgtctctatttccttcagttctgctctgatcttagttatttcttgccttctgctagcttttgaatgtgtttgctcttgcttctctagttcttttaattgtggtgttagggtgtcaattttaggtcttttctgctttctcttgtgggcatttagtgctataaatttccctctacacactgctttgaatgtgtcccagagattctggtatgttgtgtctttgttcttgttggtttcaaagaacatctttatttctgccttcatttccttatgtacccagtagtcattcaggagcaggttgttcagtttccatgtagttgagcagttttgagtgagtttcttaatcctgagttctagtttgattgcactgtggtctgagagacagtttcttataatttctgttcttttacatttgctgaggagtgctttacttccaactatgtggtcaattatggaataagtgtggtgtggtgctgagaagaatgtatattctgttgatttggggtggagagttctgtagatgtccattaggtctgcttggtgcagagctgagttcaattcctggatatccctgttaacttgctgtcttgttgatctgtctaatgttgacaatggggtgttaaagtctcccattattattgtgtgggagtctaggtctttttctaggtctctaaggacttgctttatgaatctgggtgctcctgtattgggtgtgtatatatttaggatagttagctcttcttgttgaattgatccctttaccattatgtaatggtgttgtctcttttgatctttgttggtttaaagtctgttctatcagagactaggattgcaacccctccctttttttgttttctatttgcttggtagatcttcctccatccctttattttgagcctatgtgtgtctctgcacgtgagatgggtttcctaaatacagcacactgatgggtcttgactctttatccaatttgccagtctgtgtcttttaattggagcatttagcccatttacatttaaggttaatcttgttatgtgtgaatttgatcctgtcattattatgttagttggttattttgctcgctagttgatgcagtttcttcctatcctcgatggtctttacaatttggcatgtttttgcagtggctggtactggttgttcctttccacgtttagtgcttccttcaggagctcttttagggcaggcctggtggtgacaaaatctctcagcatttgcttgtctgtaaaggattttatttctccttcacttatgaagcttagtttggctggatatgagattctgggttgaaaattcttttctttaagaatgttgaatattggcccccactctcttctggcttgtagagtttctgccaagagatccgctgttagtctgatgggcttccctttgtgggtaacccgacctttctctctggctgcccttaacatttttccttcatttcaactttggtgaatctgacaattatgtgtcttggagttgctcttctcgagcagtatctttgtggcgttctctgtatttcctgaatttgaaggttggcctgccttgctagattggggaagttttcctggatartatcctgcagagtstttccaacttggttccattctccctgtcactttcaggtacaccaatcagatgtagatttggtcttttcacatagtcccatatttcttggaggctttgttcatttctttttactcttttttctctaaacttctcttctggcttcatttcattcayttcatcttccattactgataccctttcttccagttgattgcatcggctactgaggcttctgcattcgtcacgtagctctcgtgcyttggttttcagctccatcaggtcctttaaggacttctctgcattggttattctagttagccattcatctaatttttttccaaggtttttagcttctttgccatgggttcgaatttcctcctttagctcggattagtttgatcgtctgaagccttcttctctccacttgtcaaagtcattctccgtccagctttgttccattgctggtaaggagctgtgttcctttggaggaggagaggcgttctgatttttagagtttccagtttttctgctctgttttttccccatctttgtggatttatctacctttggtctttgatgatggtgacgtacagatggggttttggtgtggtgtcctttctgtttgttagttttccttctaacagtcaggaccctcagctgcakgtctgttggagtttgttggaggtccactccagaccctgtttgcctgggtatcagcagcggaggctgcagaacagcggatactggtgagcagcaaatgttgctgcctgatcgttcctctggaagttttgtctcagaggagtacccggctgtgtgagatgtcagtctgcccctactgggggttgcctcccagttaggctacttgggggtcagggacccacttgaggaggcagtctgtccattctcagatctccagctgcatgctgggagaaccactgctctcttcaaagctgtcagacagggacatttaagcctgcagaggatcctgctgccttttgtttggctattccctgcccctagaggtggagtctacagaggcaggcaggcctccttgagctgcggtggtctccacccagttcgagcttcccagccgctttgtttacctactcaagcctctgcaatggcgggtgcccctccyccagcttcgctgccaccttgtagttggatctcagactgctgtgctagcaatgagtgaggctcagtgggtgtaagaccctccgagccatgcgcgggatataatctcctggtgtgccgtttgctaagaccatttcaaaagcacagtattagggtgggagtgacccgattttccaggtgtcgtctgtcacccctttctttgactaggaaagggaattccctgaccccttgcgcttcccgggtgaggcgatgcctcgccctgcttcagctcaygctgggtgtgctgcacccactatcccgcacccactttccaacactccctagagagatgagcccggtacctcagttggaaatgcagaaatcatttgtcttctgcatcactcacgctgggagctctagactggagctgttcctattcagccatcttggctccacccaacaataaatattcttaacacttgtaagagccttgtaatcgcatgaactactttgaaaaatctatttttatttatatacttatttttgccatatacatatttttgccacagggaagtttgataaatatatcaataaaagactttcagccattaaaaaatatattaggataaaattcaaagacggaagtgggaaatggaaatacaatgtaaggaggaaaaggaacagtgttaattttccagctattaaagagttaagttcatatatatatatatatatatatatatatacacacatatacatatatatatacatatacatatatatacacacatatacatatatatatacatatacatatatatatatacatatacatatatatatacatatacatatatatatattttttaaagacagagtctccctctgtcacccaggttggagtgcaatggcatgatcttggctcactgcagcctctgcctcccaggttcaagctattgtcctgcctcagtctcccaagtaattgggactacaggcacacaccaccatggcaggctaatttttgtatttttagaagagacagggtttcaccatgttagacacgctagtctcgaactcctgaccttgtcaaatgatccacccacctcggcctcccaaggtgctgggattacaggcttgagccaccgcacctggcctcaaatatatttttaaataggtgatgatgactatcaaattgcaagatacttaaattctattacatacagtttttaaagagtgttataatatgtttactttaaatgactaatacatatgtgaattacatcccttgtaattataaaatataagataaaataattaaaatgttatctttaaaatgtgcatcattttcagaattcctggggaatacgcaaaagggttaattctgaaggccatggcttgggggtgcctcaggcctctgctgtccacctccccagctgcctctctggatcacacctttagcaccttttacctggactatagcacaaccccttagggcatctccttggctggaaagacctgagcatgctacctgggaatctcctacaaacaaatcttgtcacatggccccttcttcaaaatctctgttgatgtcatcccacctgtggcttattgctgacaggactctgagctgagtcaactttaaatcaagccattaatttaagccatagccattagtttgagatgaggccgtcagagggtattgacttggattttactctatcttgttcaataaagagctccacatttagatggcatagaacacaggaagcaaaccaaccgccctggggccgcatcaggcctgcaggtgtgtttggcttgaaatcaatgtgcttttcagtacctggcaggagcacactgggccagccctcccatgcagccattcaactcgggtgcagtcatcactgtccttgtggaggaagccctgcctgcttccctaagtgtgtgttattgccrggcacctgcaggcaattatatctgagacctgaaacagagttttttctgtggtgtgyattaactacatgatggtatcattgtgtcatagacaacttaaagcatctaatgttaagggcacaataaaataatattgatgagmaaatttaaaacaaaaacactcacatcccatttttccaaaggattccttctggatcatcatcctctctggttcctggttgctctcccctcctcatcccctggctcagactccctgtgccayctctaaggtttggctgctttgtttgcacagggccccaggaactgtggacagaggcaaaatctctggagggctgaagcatttgtgccacgagcaggtcatcctcagaaggacctgaactacagaagatggaagagcactttgggggatcttgcagctggactgccgcacaggaagggctgggacaggggcccgtctgcagagcgtatggcggacgaggcctcttgggtactgagggatccaacttgcacccagttccaggtgtctagggtctgggacctctgtcatggaatactggtgccagacagggcctattagaagctgaggacccagaggtccccttgactgttacaggtcagctctgggtggggttatttctaggatcagttacaccatgacttctggtcaagctctcatgtgctttgggaatctcagccagcaggccactcctgctgcccaccccacttgattgaaattacagagacaaaggatgctcttccccatccatgttcacagcagcactgtccacagtagccaaaatatggaagcacccaagcatcatcacagatgcttatcacggagaagcaaaatgtgctgtaaccctaacaaaggaatatgattcaacctcaaaaaggaaggagattccgaaacatgctacaacatggatgaaccttgagaccatgatgcttagtgaaatatgcctgtcacagaaggacagagacggggccaggcacagtggctcatgcctgtaatcccagcactttgggaggccgaggcaggcagatcacctgaggtcaggagttcaagcccagcctgggcaacatggcaaaaccccgtctctactaaaaatacaaaaattagctggtcatgttggtgcctgtagtcccagctactcaggaggctgaggcaggagaatcgcttgaacctgggaggcggaggttgcggtgaaccaagatcgcactactgcactccagcctgggcgagagagtgagactctgtctcaaaaaaaagaaaaaagaagaaggacagagacggcatgattccactaacaaggtcccgagaataccgagagtgatagagacagaaagtagaatagcactgtttcagtcttgcaagccgaaaagcatgctgtggatggatggtgatcatgtttgcacaacattatgaatgtatttaataccactgaactgcacatttaaaaatggctaggattgtaaattttacgtgatatatattttaccataatttaaaaattgggaaaaaacaaagattatcaaattgagggaaacaaagtttaacttcatttagtagcaaagaaaactaagtctaacaagaaaaattacaactgagaagagtgtgtatttgtgtgtgattcagaggacagaaatggacccaaagagtagaatttagagggactctgagatcagctcaacacaaagagtgttctgacgttcacttgtccaacagatccgtaccaagcacctctgtgtgccaggcactggagaggcagtgggagcggaacagaaggtcctgcctggggatggccagctggactgccccaccaagggccactgcccatcacttcaggaagaacctggatacctgtctcaggagagtgccatgcagcgagttccagatttacaggcaggtgagctgggtccaatctgaggctcctgtgaacccaatggatagtggatgatagtgtttgtgcttcttaggtactcacagctccactctcaaaagagggaaaacatctttcacctcgccctttgctcagccacttaaatttacatagagacctatagtgtttatgacagaaatgatcgttggaaagacagyaacaagccatattgcatcgggttccccagtcctgcaccaagaagggcacaccagctccagacactcctgccagaagtgtgtgacctcatcatgagaaaactacagacccacccagactgagacattctgcctagtaactggcagcatccttctaagtctcgagggcatgaaagaaaaggggcaaaatgaggactgttacagactggagaagactgaggagacatgagggctgtgtgcaaggtgggatcctggaagagaaacaggatcacagcgtgaaaagcgctggaatctgataaaggctgccattcaytcaatgatactgcactgttcatctcttagttttcattatcgtgctaaggggggtctctaaaatgtacatactgtattggtgaaaactctctgtactttatttgcaattttcctgtaactctaaaattatttctaaataaaaagctttgtaaaaactcccacccctggcctggcttgtacctgtaatcccagctctttgggaggccaaggcaggagaattgcttgagcctaggagtttgcagccagcctgggcaacttggcaaaaccccgtctctacagaaaatacaaaaattatctgggtatggtgatgcacacctgtagtcccagctacgcaggaggctgaggtaggaagactgatcgagcctaggacacagaggttaatgagccgagatcgtgccactgcactccagtctgagcaacagagcaaggccctgtctcaaaataaagaaaaaaagaaaagaaaaattaaaatccccaccctgagcccagccccaggggccccaaccatcaggccaaatgtctgcattaaggtccacagtgctygtctgcagggcacaaaatggcctctgcacaacccttgtcacttggaaggtgtgtgcgtggctgtgtatcagctgatgctccctgggtctctctgctcgtctgtctgctccccacttaagctgaaatcccaccccatgcttcccccttcagtgctgcctgcacacatccccccagcaaccctcctctgcatgggcatgggtgggaaccatgtatcttgtgacctaggctccagaggatactgaggaaatgtgaatccacttagatttttaaagggctgggaggagagaggcatcggtattgccagagtgacctttccccaaggccaacctgaccgagccctgttggttccagtgcctctaccctgcccacctcttggcatagcacacaaatgcctggtatgacgtctacatcctcgtccagcctggccctggacctggtgtctctgggccggtaattctcctggccagataacaagcattgtgccacctgtggacccaatcgccctgagacctcaggcccctccctcgctcacttgcctcctggctgcgcctcctctagtggtcttgccaccttcacccctgagtgccacctctagtgagctggttaaaccactgagattcctgcccacaggaagatgcacctgcttccctaattctttccttctctctcagccacagctgagagtgcccaaagagaagtcctgcctaatcacttccaggctgggggataaagggcaacttattctggatccaatgatgcttataaatccatggagsagccaacagcattatcaacagagaggctgcacatcctgtccgcaatggctatacataacttaattttacatacaaaactgtaattcaaaactgttgagtcaggagccatttcagtcattctcaactcttaagagcttgtttctttccaccccctatccctttagcctcccactccaactaagtgttttcttcccagaactcattaaatcctcttccactttcatttattttctcattttcccccacagcccttctcgctggttttaatatttttgttttcttttcaccacccactatgcagcctctctatgatggcaagcactgttctttccagaattcctagctcttgtccccactttcgcttctcccctgtttccccctggctctcctgccctgatggcatcatttgttgacttcggaggtgtttacccttttaatcttctgaagtttggaaaggggattgcacatttycctccatgtgttttgcgagaagaccacatttggtggcagctcaggcactgctgagcggcctttttgcgattcagttgatctgtttgcctgctccttgggttgtttagtaaggcctctgccagcatgctttagaaagggctgcatggctgtcctgccacctacccctggtccacactgggctcatgggaaggcagctcagagtctcatccctctcccctcccaagcacccctcccttccaagccacatctgcattctgtgagccccatgcaagatccagctccatctggctcgtccctgtttgataacaactatttcccccatagaccaatcagtctttctgtgtagatgtggcactttcaagcttccatgacaacttgaacgtgtagacttttatcttcaaaaatggtcttaggaaccttctgccatatactatgtcccctagatacagagtaatggggtctgcggttgcacctgctgcagtgctgtgtgtagaagaggtactgctattcatgccctgcagaccccctctggtgccacatcatgatgcacctgccctctcctgtgtgaacagatacagactgagcatgcagccaagagtcagaagaaagacctggtgctagtcccacatccttgtacttaccggcgtagtcccatatcctagtatttaccgggctagtcacatatccttatacttaccaggctagtcccacatccttatacttaccgggctagtcccacatcctagtacttaccaggctagacccacatcctagtacttaccgggctagtcccacatcctagcatttaccaggctagtcccacatcctagtacttactaggctagtcccatatccttgtacttactgggctagtcccacatccttgtacttaccggcgtagtcccatatcctagtacttaccgggctagtcacatatccttatacttaccgggctagtcccacatccttatacttaccgggctagtcccacatcctagtacttaccaggctagacccacatcctagtacttaccgggctagtcacatatcctagcatttaccaggctagtcccacatcctagtacttactaggctagtcccatatccttgtacttactgggctagtcccacatccttgtacttaccggcgtagtcccatatcctagtacttaccgggctagtcacatatccttatacttaccgggctagtcccacatccttatacttaccgggctagtcccacatcctagtacttaccaggctagacccacatcctagtacttaccgggctagtcacatatccttatacttaccagkctagtcccacatccttatacttaccgggctagtcccacatcctagtacttaccaggctagacccacatcctagtacttaccgggctagtcccacatcctagcatttaccaggctagtcccacatcctagtacttaccaggctagacccacatcctagtacttaccgggctagtcacatatccttatacttaccaggctagtcccacatccttatacttaccaggctagtcccacatccttatacttaccgggctagtcccacatcctagtacttaccaggctagacccacatcctagtacttaccgggctagtcccacatcctagcatttaccaggctagtcccacatcctagtacttaccaggctagacccacatcctagtacttaccgggctagtcccacatcctagtacttaccaggctagacccacatcctagtacttaccgggctagtcccacatcctagtacttaccaggctagacccacatcctagtacttaccgggctagtcccacatcctaacacttaccgggctagtcccacatcctagtacttaccgggctagtcccacatccgtgtacttactgggctagtcccacatactagtacttaccaggctagtcccacatccttgtacttaccaggctagtcccacatccttgtacttaccaggctagtcccatatccttgaacttacttagtgcctggaacatcactttcttaattttttcaaataagatgacaatacctcccatgcttaattcacaagactgtaatgagaatcacatgagataatgtatgtcagcaaaatattgctgaaaatactctccactcaattatgttgcgaacctgaaaatgctctttaaaaataataaaatctacttttttaaaaaagtggcccttggagaggttagccagttttctttcccagtctctggactgattctgtggagagagcatgggaatgactcagtggtgcagccctcagtgtgtccctctgccaggcgggaagggactcctcaggccccacaaggggcattacaggctgctgcccttctgcctgctgataacccaaaaattaaggatatttgggacacagactgcacaaaggaaatgctggctaatgagaaacacaaatgtaaacaccataaatcaaagtgccctctctaagtggatgagtgcagttaggaggagtaaggtccaggccagagccagacgaggcccgacctgggggggacacttctcacaccagggacagtgaccacatggggggagagaggtgtcccrgcacaggtagggccaccacccactgtggccataactgagtgaggtcagactcagaaaaatgtgaatgtctatacaatagggtcagcagactttattcactggacaaataatttcttcataatcaggataattttatccatcacctcttaagggtaagacatgaatggtttccttgtaccactagaggaaattctgctcagaaaccaagtgcttgttagggaaactatttgattaagtattctgggtgaatataatactgatctcaaacaactgtagctgaagtcatcacaagtacaatggtcattgtaagcataagaatcaggggcatattttatttctaggtaaaaactatttttaagatacttcataaatcactggcaaggtcaaccacactaaacattccagaacacacaggggaaatctccgtgggcgtgcccagacctctgggctgcagcgatgcattgttctgaggcttcctgcacggagctgtccccgtcgtcagcaagtctgctgggcccagagcagtgcctgcgggaggcttactgtgacccagctgtacaggtgcagcagacaccatggtccacaccgccagtccccacacagtgcggtgatcactacgaggcacacctactgcaggccygctgtcttcatgcagyarataagaccacagcagcctatagagctgttgagaacatgaagtggagtaacaaagaccgagcactttacacccggcctgtcattcggccagtgttcatcatttcacagatagggataatcactttttatcccaggccatgctgatcaccttacccaggtgcatttagtggtaggctcaaccccaagcctactgctgaatacacatgaatgcatgcatgaataatgaatcgcgaatgagcgaagagttccctatttttacagacgaggatagcaagaatctgaaaaggcaatataatgaaaattgtgactggaattcacaatttcttaaccaggaaagcaggttaaatgggagaccactaaatggcaggaggccgtcatgcttttctgtcctcccactttctaggtgtgagaatacagatgtgatggctggaggtccagcagccaccacagactctgagttgaccttgaggacagaagttgtgttctaaagctgacaaaaacataaagataggtggtgtcagtgtccctcatatctgtggggcaactctgttgtccctaagcacacaacccacttttcactaatagaggccagaacatgtctatctgattctaatcattgttatgtttggtctccattactagaagccaaatacatttctaactgaaaaacaaatattctgggctgggcgcagtggctcatgcttataatcccagcactttgggaggccgaggcgggcggatcatctgaggttgggggttcaagagcagcctggccaacatggtgaaaccctgcctttactaaaaatagaaaaattacctgggcgtggtggcagatgcctgtaatcccagctacttgggaggctgaggcaggagaatcgtttgaatccgggaggtggaggctgcagtgagccaagatcacgccactgcactccagcctgggcgataggtctcatttcaaagaaaaaaaaaatacatatatatatatatatattctatgtcatccccatctctccttacaaactgctggccccttccccgcctacttcgctgggccccactcctctcccttctctgaatactggatcaacacagggctcaggcctgggccctcctcaaatcccacagctaattcccctcactcctcccaaacctctttatctcccactcgccaatctcagaacatgttgttcaggccaaaaggctcagaatcttcctgaattcctccctcaggccatgagcacagcccacatcagcccacagccccctgccctgggccccggcacgtgccagcccttacagsctgccccayacgcagcctcagagggtcacttttccactcgtacccttcaacggtgtcctgtggccctaaggacaaaatccatgtgcccaccatggtggccagggctctctggtcagcctttgcctgcctctctgcccacatatatgccttctggccccacatcagcttcctttcaatcagggcctttgccctcacccctgctgcctggaaacccctccctgagggtgagtggcagcctcacactgcgactgctgtcacctcctgggcatcccctgaccactgtgagcagcctccgctctctccatcctccctatcagcaccttgtgctattttttttwtgtaactttactgttgtctgaaatcatctcactgatttctttgttttcagccaggcgcggtggctcatgcctgtaatcccagcaatttgggaggccgaggcgggtggatcacttgaggccaggagtctgagaccagcttggccaacatggtgaaacccccatctctactaaaaatacgaaaattagccaggcatagtagcacatgcttgtaatcccagctacttgggagactgaggcaggagactcatttgaaccsgggaggcagaggttgcagggagccgagatcacaccactgcactctagcctaaacgacagagtgagactctgtctaaaaataaaaaataaaaaatcattgttctctagcatactatttaggaagtgcaactctagaaaaccaggagctctctttgtcttcatccttggcttctgaaccttgcctggcttagagacatttctcactcatcagaaattaaagagccatgtcatggttaccaagctamagtttttgttcattatgtatcttcagtcttcatgctgctttctggctctttcacccaaactgacaacaaggtagacttttgtgaactgaccttyccattcctgagttcctgtggttgattattctctcagttataacaccataaagcttagcataattccagagcccttgcacgtaagaagggatttgctgtcttaatatacaaagtcaaattggggataagaaaatgatttctctgaaaatggagacattgccctactgtcttctgcaacttgctgctgggaacgggtctgacatcctcctgacaagcaatttattcatttctgagcagcatgtgctctcagattgaatgtttctatacctgtttttaatttgtcaattaaattacctatttttaatcactgataaagtaatggatatagctttgttttttagaaaatttgccttatacatcgttatgtaagtcagtctctagaccaagcactcttttctcccagctcaagaaagttttcaaatgttctatccttcattattgcttctttgcagttatttctcgttcttcctcatgataggccatgttattcgaagactgcttctccttttactagcctccttgatggctgtattttttcattgctttcatccctttgtccttttcctgtggattctatgagagcaattcgaatttgctctactgactggaatgtgtttctagggcttcagttctttcctttatggccactgtggagcgctgggctctgctgttgcaggtgggcacctttgaagcttttcctcctgtctggggtgcttttcacttgggcttgtgcctcagyctctgcattatctgagctcctctaataatcttatatccccattgctcactgagaatttgaaatatggatctttaaattcttttttatttcttcctaaaaatatttttttcaaacactgtattttcaactatagtcagtgtattcggttcagaagatgttcattggttccattggtccgtgctccataaaaaccttgttacagagacacacagcacactttcaccctcttgccaccctgggtcccctggctgaacaccccttgaagagctaaagctggaaggcacagtgggttcacccccagtcccgatgtcagtgctttggagacaggcactcattgggtgtggttggctgggctgaggaaggcaggttctctgacccacttagggtcaatgtatgcccttgtgaatacaggaaggggcttattttgttccaccaaataggctacacggaagaaaaagccatgccagtcctccctccrcccggccagcagcattgtaccttcrgggaccacatggttcaggactcagtgggacatgtcctcccccttacctccccaacattgcaaaccagcagggaggaggagaggcaaggcccaggctcaggacagatgagcagcagtccctgccccaggggagggtaaggtgctctcagggctctgccaggttcagtgatggccactgggccaccaggccccttctcacctacatgcctctggccaactgagccactaacaatgaaaatgtcctcaaatgtgcccgagagtgtctcattatttttgaagataatggaaatccctcccaaggctaacaattgttgacactgttcctgtgcagtttttgtgttgctttttggctgttttctgtactttgatgtgtattttaagaacaagttggaagagagattactcagggctacaatagcctcaggtcaccgctagtgtccttctccttgaatccccataacatggagcccagaagctggcactaacagattctcagtaagaatagacaaatgagtcgtgagttttggctgagatatttgggactggaaactgatctagacccaggctgggatggatctagggcagggattgggctgtaacaggtcacagggagtgggggacgtcagaagcctctgaaggcacagacaccacctgaaccgaggcaagaggcaagtcccgcgtgcaaaccaggctgcccaggaagtacagggctggacggcaggacctcagttgtccggagcaggagccccacccctgtggagctgatgcgagccaccacgcatcagggggttcagggatagtgcaggtaaaggtggagctgagtgtctccagctgctgcctgggcctcggggcacaggagagacccagacgctgtggccacgcctccagggcccctgggcaacatctccacctgtgaacctccagccttcgcatgctgtccttggcctgcagggatcccagacccccactgacaacaagccttgcttctgcgaggcctgttgctgccacggctggtcctagttctaggcatgagattttgccctaaacacctttctcttccacctctggacactcacagtgggatgggggaactggaggacctccctgcgcccggtgtcttcataaagcagagcttcttgggcccaggcccctcggtcagccgcccccagccgcgcctgctgagcgagcaccagcaccaggagtccgggcgtgcgtgggagtcgccgtgaccaggcgagccagcatggccaaggaccctaccgtcctcctattgcagagcgtagtgacgcgaggccagagctgggctagaataagtgcccgggtcattaggggaaacaaggaaggaaagaggaggaagggcgagaaggcgagcccacccagctcagaagcgcctaccggcaagcccacgccagcctcctggcctcgcsctgcccaccaccctccttcttccctagaaagtgagtccttgacagaaaaaactgccaccgttctatgcctggaaggcgctagcaaatatgccacgggccgcaggcagccagctctcaggatcctggccttgggccacgcccggtgcgactgtcaccttgtccatcagagctggggtctctcaaaactgcctgcctgcgtcctgccacagtcagggccgagggtgtccgcatgggcttccaggaaagaattctctcctggggaatttcccactgtagctagttgttctccagcacattacacaggcattaaagggaggttaaatagccggtctaccgcagcagagaccctgggagttctgaaagccgccggctccatgccccgcctctgtacaggggaggctgaagcctctgcggaaggcggggatatgggcaggtggcagcgccggtggcagcgtgggggggcagctcggggaatgcacctgtacccagccacctgtgtagtgcctcctgcccctctgaactgcccccgcgggctggccacaggcgtctccatgagttcaacactaacaccgcctgccatgcaccctgttgaagaagccccagacagagggcaccggtagggacagaaagaaaacacctcttatcttgcttttgtaaaacgtgggccaggcacggtggctcacgcctgtaatcccagcactttgggaggccgaggcaggtggattacctgaggtcaggagttcaagaccagcctgcccaacatggtgaaaccctgtctccactaaaaaatacaaaaatttgccaggcacggtggcgcatacctgtaatcccagctacttgggagaggcaggagaatcgcttgaaccctggaagcggagattacagtgagctgagatcgtgccactgcactccagcctgggcgacagagtgagagtccatctcgaaaaaaacaaaaaattgtggaactgtcgcacctatcaaaacaatttttgttgtggagtttattggggggggggggtgggggatgggggagaagcaagaattataaatagaatacagaaaaaaatgtttattagtagagacaaaaagcattagataatgtccctcatgttaacatctctaacaatatttaagttaacgttaggtgagtggccaagatgagcatacgctggggcgtaatcccaggaatgcaggctgggatggatctagggcaggggttgggctgtaacaggtcacaaaggaggaggggttgtcaaaagcctttgaaggcacagacaccacctgaaccgatgcaagaggcaagtccagcatgcaaaccaggctgcccaggaagaacaagggctggacggcagggcctcagctgtggagggcaggcgccccactcctgtggagctgatgcggagccactgcgcatcaaggggttcagggatagtgcaggtaaaggtggagctgagtgtgggggtgtgtgctcccaagccctgccctccttgctgccttccagcctctgtacccccaaggtactctataccatggttctttctctattccactaacacaaaggtcagcctgcatccctgcctgctccaggtattttaatgacaacctccaaatattggcttcttctcctccggcccccctgcatctggtcctgcccattttcccctcctctcctatgggccccttcagtcccagcccctggccgggacccactggggcacacattctgccctgtgcttctgttcaccaccgtgggctgcccttctctttccatgggcttctgtcaaaatcccacccagccttcaagggctgcttcagttctgtcatctccagggagcctgagtctcagccaggactgtcctccaaagctccacactccccctcgtaggtattcacacactcaccgagcctccctttgagacccgagccccttgggggtagtgggggtctcctcctctctgtgcccctcagcgcctcacacccttcccaacactaggacattcagtagtttggaggacgactgaaagtgcgggtgatatgtggctctgcgactgtgtggtttgccccccactaatttgtcacagttcaaggaacatgcctgagcgttttcatgataatgagagaaaagacatgaaggaggagaatggaaatagaggctttggagaagttaagagtattgaagttgtactcactgtggctccccggagtcctggaaatcttgaggggacagtttagtggaagacttgatgatgagctccttctcctaagagtagcacagtggaccaaaatcttgtgaagcaaacccctcccacgtggctgtgagctttatagatgtagttaggcagaacaatgtgttactcaaaattcctctctacttattcagagacaacttgttctgaggcccatgaagggtaaaacttgagtgtcttgggggctctgagggagggaggaacgttcctgccgggacacaaaggtggctgagctgagctgggtgtaaggagaaggggcaggagagagggggcaggcatcccaccctccatagaaggacacagaactgcaggggcctgctgtatgtagacttcaggaaactagtgttgagggggcttcagcaggcagagatgcagacagcagcagggactcaccgacctggtaggggcctcatcgcagccaaaagagctcaggtttgggcaaattacatcaatgttctccattggtagtgagagtctctgctttcattcatgtacacacaaacacacacactcacacacaggcttagctagcatgcaaaccaagcggattctccaagtgtttatctggatcaagttgacttgagtttaaatggcaagccgtagtttggagcagggtgctggccctggtggcccacagagggcctgaatctcagtggatcctgatcctcccctaggtgccccctctccctcccctatgtacatctatacatagagagggctccacgcctgttcaattggaccccgtgagtccatctggaggatgattaaaaggggtggaaggatgatatactaagtaatgtagaaaatggagtcttgtttactttaaagatggagaagacagtttgccaataaaacatagcactccatttcctctagaattctgttattaatattaatctgcaatgaactcctggcacctctctcacaaggccttccaaaggctttaaaaataataaggcatgctccagaagagcagagtgcattccagcaagatagctggaccaaattgccttctgctgggtggggggagtgggaaggcaggcagctggcagcttcacaaattaagcacattaaggacacaattagtaaaggaatgtcatccctccatctcttcagagacacccacaaacacagtctaaacacatacatgaattcagctcacaactttactcttatacacacgggctccaaagagacacacacaaacgcagaaccacaaacacacacgcagagacttgggtacaatcttgacatggcacacatgcaaaatacacgtttgcacacacagacacaacatatgcacagacattaggaagaaaatacgcagtgcactcccattgcttaagtgtcaatgtcagatgctgggcccctgcaggtttctgaaagtggcctgggggaagagggagtcagagtcccacagagaccctcctgggcagagcgcatcttttacgtaatcctctggcatgaaatggtgaaacgctgatacccccagacctcttgagccccgcagatgatgaggctttgtggccccctctccctccacacccagttctgaagaatgcttggcgtcaagcgatgcagagaccatcccagagtccccctgggtcctttccctggaaagcatccagaggaagtctgtggtggcccaaccctgcccaggctgagaatgagatgatatttggcaacctccactatccccttgttttaaagtcaataattttgcaaaacttttcatttaaatcattgaacagcgtaactttgagaaatgaaatacattttgtaggatgtaggcattatcgcgtgcaattgctgtccttctctgcccacatccctactctcttctcagcaagaagaggagcctggggcacctgtggccactttaagcaaggctaagtcaggacagagaggagccaagacatgggcaggaggagggcgagaagaggccgtgactttggtgcagtccttgagggcagctagtgtgagtcaagtgttgattaatacagataaggtcaagtctagaaggccaactctattaaactcaaatcttattatcacatcttacatggacattaaaacctcycagataatggcagctatgtgcactgagggtgacatcgtggtttttcaggcactggagaaattaytttgacagggaaacttacgtgctgaaggcaaaacagcagataagcgagctgggccatttcctgagagtcatgagacaggatacaatgtggctgtcatgctaagtgacattcagtcccttcagaggtcggcctggtcatgcctgcgagacgtggccccagcagcagggtcacccttgggccacagagcctgcagagatggccagggctgcacatctgaggggacaccggcaggcgaggcagagcccacatggcctagtggtgtattggtttatgcaaaaacatttctcggttttttggatacctaatacattctaaaagatacttttttaaactaaataacaatggaagaataaaattgtggactgtgtgcaccccataatgcagaatgagcacgaaggtttctgtacatctttattcctagatgcttaaatgtcaaataaatcacaacaaaatattctctccgcttaatgccatattattaattcaatagtttctttttctcaactcagctatcagtaaactttcaggaagcctcctctatattatacacggaaagcacaagggtaaatggtatttgtttcctctgggaaatatttgctgattgtagaaaattgtgtgagatccttcccacttatggagaataccttcatgaggcagaatagatttcctcaaaacttcaagagtgagcctagagaatcaatgcatgcacacatgtacacacatgagcacacacacacacgtgcagtggtgggcagtggatggcccccaaggtccccgtccctgctatagaatcccctccccagggctgtgaggtatgggctattctcccccagtgaccgctccctctacagcaacagggattctgcagaggtaattgaggtctcttgtcagttgactttcagttaaccaaaaaggrgattctcgcagttgtgagcctgacgtgatcaggtgagcccttacaagggcccttctggagggagagactggaagtgagaaagggccgtgccagcagccccgacacaaggagctaggggtgaccactaacaaggagctaggggtgaccactaggagctaacaaccacccccaggtgacacccagcatgagaatgggcgtccctatcctacaattcaaggaactgaatcctgccaacagtcacgtgagtctaaagaaacagcccaggcaacgccttgatttcagcttcctgagaccctacgtggagaggctagccacgtcgggcctgaacttctgtcctaaagaaactgcaagacaataagtagctgttggttccccgttgtgtggtaatttgttatgcagcaataaaaatccacgtgctcacaccagcacccttcccatagccacctgcttctgagtccattccataaacaattccaataatcaagaccatggcattcagtaactcctgcattttatccctacgtctacttcccaaatgtcctgcaatgtgcacacacattcactcacacacacactcacacatgcactcacatgcaaatacatacacattcacacactcacatgtgcactcacatacaaatacacacacatgcactcacatgcaaatacattcacacacatgcactcacaaatacacycacacatgcactcatatgcaaatacacacacattcacacacatgcactcacatacaaatacacacacatgctttcacaatcaaatacacatacattctctcacacatgcactcacaaatacacacattcactcacatacacacatatacacattcactcaccttctcacatacaaatacacattcactcacacatgcactcacaaatacacacacattgacacacacacatgcactcacaaatacattcacgctcacacgtactcacacatgcgctcaaatacacattcactcccacactcactggcacactcgcacattcattcagtcacacatacacacacttgcatacacgcactcagtcatacacacttgcatacacgcactcagtcatacacacattcaaacataaacacatattcacactcatacacacattcactcacactcatacacatacacagtcacacacatgcactcacacacagggactcacatacacatactcaaatacacatggactcacacacgtgcagtcacacattcacacacacattcacacacaggtgcacacacacaggcactcaccttcacactcacacaggcacactccagggccgtcttgcaaaggaagcaagttctggggaggatggaagatgggagggttacatgtgagggacggagcacagaaggttcttaaaggcaggagtgggaacgggagcctggtgggtgcccagaaggtggcagccgggttccgctggagtctgagctctttaacagggaaggtcggggcctggagctggcgaggggcacccacagtgtggatgtggcggagagctctgccggccatgaggaaaggggatggcccgagcaggcaccatcacccaggtcagggcttggcatggatggcggcggggggctcccaagcagacctgctgcgcaaggggctcctgccagcagagcaaaagcaagggcagcacggmcctgccgagggacagaagcgactgccggagcagaaaccgggaaaaaaagggccccttgtcccacaagaagtcagttgagagagaaaaagagcaggcccttatcccaccagggtaagtgcccccrgcagaaaacaaaacaaaacaaaatgagaggatgcattctcccctggtgccttcacgttctcagctaaagacctgtggcgcccacagtaaggctgaggacgccatggaggcaaaatgccatgcaactgtggggcctgcatgcggctccaggaaaccaaaacccactggggctcagctcctctgggaagcagccaagcaggtgccctgccctagcaggaccatgcctactactccccacacagcctttgcccacctccccctcgcccacccggacctgcacccctgggagcttgtcacacgtgttcactgccctgccaagcccctggggatgcccttgtgtttggccgtaactaagtcctcatgttgtgatccaatcatttccctcagggagtaagggagttcaagaagaccatggacagggtgtttattacacaacttcttcacagtaattctcctgccagtactttctcactgtttaaaatcaataaggaagaggtactgtattagtccgttttcacgctgctgataaactcatacccgagactgggcagtttacaaaagaaagagttttaattggacttacagttccacgtggcaagggaagcctcacaatcatggcagaaggcaaggtggagcaagtcacgtcttccgtggatggcagcaggcaaagagggagaaattgggcaaggaaattcccccttacaatactgtaagatctcatgagacttattcactatcaagagaacagcatgggaaagacctgccctcgtaattcaattgcctcccaccaggtccctcttacaacacgtcggaattcaagatgagatttgggtggggaaatagccgaactatatcaggtaccaagggtaaaacccagggagcagctgaggggccaccaggggcgagaatgagaggagaggtgaagggcaagtccaggaccccaggagcgtgggtcccaggcagaggcagccctgaatgcagggagcagaccctcccctcctccagcccctctgtttgccaccaaagggctgactctctgggaaccaatcttacggtgaccactgagcgggcaggaagcttcctgcaagttgaaagcatgaaggagagaagaagaggtctcaggagcacaagccaagtggggctggcacaggcgagcaggcagagaggaagcacacagcaggggatacagtgaagggggcctggggtcatggcaggcgattcatgtggccagggtcccacctccctgtcagagtgcagggcaaccaactggtctctgggtcaggatgctgcctcaccactcaccgttgcacacccctgccagacagaggcctgtagctacctggattttcccccagcagaaagaatgtggacttcagtgagtgaaagtcttcatcactggtggtccaagatgctgatcaaaacagagcttcctcctcagccttgaccaatgacagatgttctgataacattactgtgtatggcactatcacagrccaaaatttatagggatgttttcttgaatctaatttttattttactacgtattttttgaaataaatgcatattttcctagacactgagtcaattccataaacacctgtgggtgccagcaggcgtgctaggagcagaggccattggagacatgaaggctcctgctgctgggagactcaactggccataacccaagtgctatgtgttgggtgaggaaggcttcacccaggaagggacgttgagcacggataggggaggagaggaccaggtgggatttgctgggcagacaaaagaaaggcagtgcagaaaggaaataactccttcaaaggccaagatcttgatgaattaaactaaggaagtaccaatataaataaagaaaggggggaatatgagacccattaaaggagagtgaattccaaaggccttccataacgggggttaaggagctgaggcattcaccatgaccccctgtgagggagcggaaggtggtatcaccagtggagacttggaagaggccggaggagcaggctgcaggaaggaagtgagttcagtcttgactgtgtctgctggacattccaaagctgctgtctgctaggcagtgaggagttaggcaggttcatctggagaccaaggagcagggttggtggtaaaaataatgataataataattaattaataaaaaaaaaaccctggagtgtgagttactcagaaagagcatctgttaaattagcagagagcagagccatgtggagcacacatttcctacagagtttgtagggtaaaaatacataagaggtgggtgcagagagagaagatgtggttgcagagactgatgaagaacagacattgcaagtaagagcaagggacatgcggacccacaagcattatcactgtgagctggggatcaaagcactttctgggtgccacgtgcttcatcggcaaggcctcttcagtcttcccaaagtttctgtgtagttacttgctctcttccccattttatagatgagaaaaagaagtctcagagctggtaagttatgagtccaaaatcacacagctcttacctggtgcagctgccgttggaacttaccacaaaaaaaaacatgctctttccactctgctgggcagcaccaggtttgtcacagaagaatgggaaggtcacaccttcagattctagaaagagaacgggtgagaggcgtgactgtcacctgcctacaggagagcagttttggtggagtttgagaagtcgcagccagattgcagagactaacggaggggctggacggggagcgacataggccagtttctcttgccagaaagaagctcaaccatggcatgagacaggcctcactcgggctttgcagtgagggcatttttgttttctcttttttgttgctgttggtgttttaagcttgtgcatgttcataatctgtgggggaaagagtcaaagaaggaaacattgaggactcgggaaagcaagaagttaaatacaggaaagaacaaagtacccaagaggaaaaaggtgaaggtgtcaagatggagaaggagaaattatccctggatgagaggacagcgcctttgattcagagacctgagaacagcagggaagggcatttgtcggcttggggccaggaagctgaaggaatcttcttctaacctagggaaagatgtgcatgccakcaggggctgagatggggcagtggggagagggaatggaggagcatggtaacagtggaatggccgttccctgaggaaggagagcatacccacccgagccccatgtgcagcacagcaggagacctcacaccagtccttgaccaatcgcataactctcctatcttcttggccagccatcagttgcaggtaagcaggaggggagagcagatggctctacgggttcacagttgggcactggcagaaagtcaaggggagagggactggcaggggctggagtgaccttcagaagacatttacgagaagaaaggcatgttgcaatatgtgttgtaatgggaattggcaagacctttataccaccaagcatctaaggatgcagttttgaatcatgtcgagacagctctacttggagctttgtttaaaggcttcctaatcttctcccccacccgcctctctttcaacacatagtagataaatgctaaatagacaaatgtcccagttagcctcagtaacagaggaagcctcagtaacagaggaaacccaagctgtagggtttcctacatttttccatggaggaaaaatgtgaaatgtccacacgcacaggtggtgctctgtccctggccgcactgcatgtggcctgggtccctgatgccattcctctccaggaatggcaagcacgtcctttggggctctgcatcctcagagctgtcttcttccacatgcttctccttgcagcagtctttgttcccttatctgtaaaacagggcccaggacttcaggggctgcagccctttaaaattctagcagttcgtgagccctcctcctccttcagcagctgctctgtagccattacttctgcatcctcctaagacactatagaaagggtgcacccagccccagaatgctgggtgactcagcccttcctagcttccagatggatggcaagcccagggctgccagcaggggcatgggctggggacagaaaacaagaatgaaaaagaacagtgccttttggccatcttcccagagtcttgcacctcgtcaccacagtcttattaaccatttggtccaaaatattaccttaaaaaatgtgttgaaagtaagccactttttaaaaatcatgcaactgtcactatggaaaacagtatggcgttcctcaaaatattcaacacaggattaccatctgatccagcaactcaactccatttctaggcatatatacaaaagaactgaaagcaggatttcaaacagatatttgtacgcccgtgttcatggtagcattgttcacaacagctaagaggtagaaccaaacccagtgtccatcgatggatgaacagataagcaaattgtggtatagacatgcaatggaatattattcagccttaaaaaggagggtcattctgacacttgctactacatggatgaaccttgaggtcattatgctacctgaaataagccagtcacaaaggacagatgctgtttcattagacttatatgagatacctagagtagtccaattcctagagacaaagtagaatggtggttgccagggcctgggggaagggggaaatgtggaattgttgttcaatagatacaaagtttcagactttcaagatgaaaagacttctgtaaatggatggtggtgacgattgcacaccaatgttcgatgaacttaatgtcactgaatagtacattaaaatagtacttaaaaatggttaacatggtacatttcatgttatgtgtattttaccaagataaaaaaaaatattttaatcatgcaaatgcttccttctccttccctactccaggatcagcagccacacttctgtcccaaggagtgaagctgagtagagagcgcaccctctgcctgggacctgatgaaagatccaagcagacagcggccccctgcggaaccgtggacaccgagctgcctcctgttccagcaacagcctggacccccgactctgggtgcagggtcctcaccggtgtcccgtgacagccgacacgcactgcgcagcccgagtcgactgctcccactccgcgctcccctcctggaccccgcgcagctctcctgcgcagcggccaggctaccttcccagtctccatcaaagacataaattatcgaaattctgccgctactcctgacagaagcgaacgtgaggggtctgtgggcctccgaccctggaaggagcgcgcggtgccagtgttggatgaggacgcagcgtcgagcaggagaacgcagcacggaggagggcgcggccggcagcagggcgcagcaggcaggctgtgctgggtcccctgacgctctcccctgcttgttccacggccgccccgcagcgccctctgccggcccagcccagagcgccgctccccgacacagcgcgcgccggatgtgcgcgcccccaggacccagaagctctccctgccgggcctcggacgcgcaaatgcgaagccccactctccggaggcacggggctctagtgggtattattttttatccctcttcaaaaggccaggatgtgttagatatgggcatcgcgtttctagtgtccctctgaatcgaccagtgaatggacctatttccagtaaactttcgcagcaaaatgcgaaagagtgagcccggcgggagacgagaagggcgttcacgacgaggaccccaagggggagagcttgcggtttgaggggctaggcccacagcgaaggcctggcttctctcttccctaaaaagtccttgtgcaaacgagtcactgaccacggcggaaaggcttgcccggccgggctctcggcagcctgcaccgcgcacaaggcggaaggcgtgagggctccagactccgcccttccctcttcctcccgctcacagctccggggccacctcgggccagggtctggcccagtggacctcgccggctcacagtggtcaccaagacactcacggcacccgagtcctgctcacccccagcttccgtccgctttctgacgctgtgtcgcacgccctcaccccctaaccacccccckcaccctgatgccctccgtaccctctctcmcatagtcctggcctcactgggagcttcaggccactaatctcacctccgtccccggctcctcctgtcctgccccagctggaactccatggccctttccttaaagcgctgccttgaagacgccctggcccccggctcagcccctcaccctcgcgtccctcctgctctccgcctgcgcgccgcctcgcctgggcagctggaggtgtttggagagggtggctttgtgcattatgaccccggcatcctcagggggacccacggctgctgggagctaatccccctgcagccccgcacctcccacccgctccactcctcagccgcccagcacctctaagtatgacggccttgtttctgtagccctgagaaggcagggggtcaggggatctgcacaggccgcctccgacaccccgcccccgtgtgccatctgctgcccccgcggcccctggtcctgccctaagaccttcccaagagctctctgggccaggcccccccaggccatctactcagccaccggccacgccctcacctccaacttccccctcctctagggtattccagtgaaggccaaatccagtaggaattctccacgttacctttcaaaggccccctcaggaccccacacctctttccccagcaacctccccctttcccagcacccgtttccgcacagctcctatttctccttcacaccctgacacattcacctttacccagcactccaccaaaaccactcagacatggtcagtctcttttccgcctcgccctgctgcactctgaggtactggccaccgctaaacattcccagcttgcaatgctttcccacaggagggtctcagcctgcccctcgctccccagcccctcaagcctccctcgcagcccctgtagcccaggagagcccagcttcaggcacagtccctggccctctggaggcacgctcctgccccgatgacttcacccaccctcactgtttaaaggccacctttccgcccgtgagtcaccaaggaacagccctctcccagccagcttctcacaccagctccacactcgcctttcctgtagtccaccagacagctcctcccaaatgccgaatcttaaattgaaaacacaaagggcaaactcctgattcccccccccccccataaaaaaatagtccgcaggctgggtgcggggggggctcacgcctgtaatcccagcacattgggaggccgaggcaggcagatcacaaggtcaagagatagagaccatcctcgccaacatggtgaaaccccatttctactaaaaatacaaaaattagctaggcttagtggcgcgtgcctgtaatcccatctactcgggaggatgaggcaggagaatcgcttgaacccagtaggcggaggttgcagtgagccgagattgtgccactgcactccagcctgggcgacaaagcaagactccttctcaaaaacaaaacaaacaaacaaacaaaagcagtccgctgggaacttctttgcctttctttcggttgcttagatccaaatctcatttgtcttcaactaccctgcttctcctccatccaaacccactgtcagcaaatcctgctggacttgcctacaaggaaaacccagagagcagccacttctcgtcacctccctcacgctcagcccaggacacgccaccaccgtcactcccagaatcatgtcgcgtcctccctcttcttcctacttctgcccttaccgacccctccaggaatctagtcacaacacagcagccagaatggtcttgttaaagcattaagtgaaagtcatgtcacttctttgttgaaaatccctcaatggctttccatcccagagtcctaagatgtcccaaatgggcctcctctgctgagcacttccccttctccacccacagtggccccccaaactccccagctcaagccctccccgcaatgccaccaccatctccgggtctccacagcaccaaccccctgcttggaatgcagcccccacgtctccccgcttgctccctgatgccttcagctctctgctcagagctccctgcacagcaggctccttctggccaccttatttaagactgcagctctctccctcgtccccaccccttcttttcctcttcctcactctaggtttccaaagccctgaccgctttctctcattcgatgtgtcctgacttgcttattgtctttcatccctcactaaacatgtgcttcaagcaagcagsggtttttttttaagagacagggccccactctgttgcccagactgaagtgcagtggcttttcacaggtgtgatcatagcctgcagcagcttcaacctcccaggttcaagcagtcctcccacctcagcttcgccagtagctgggatgacaggcacgtgccaccaccgtgcccagctgattttcttcactgctagatgccccttgctaagaccattgaggaggatctagtggatctttgctcactaaatgcatgagggaatcctatatctgccttctctccgctctttcctgccatttccatcacattttactcttgctctgctccgtaaggatttctccaggtggagtctttcctgcctcagattttagagtccattttgggactcaccgcctctagtgggttttgctttaatttgggccactgtggaccatttctwtttctaagaacactcccttgttctcccactgctgctttttcataattgcctacacttgtgtttaatcaaagttctggccccttaatgccctctgagatgcaggctgaaattgtgtaaacgtgtttctgccttctatagtaactatttgggtcagggtattttgtggttctaagcactgctggcttgctgacccacctggacgtcttctgtggcccatccacatttgtgaatttgattaactgccatggagctggtgggattctatcaaccggatgttgaggctcccctagaggcatccacatgtaattatttgagttgaaggaaaggcctccccactgagagatgagtgagccttataccttacacctttccttcagggtgttcagctaagaggctgaccagcagamcaaggccctctcagaagggaagtaggtgatcaaccacatggggtcctcggggtgcacccgcctcggctaacagggggccaagctgagccccgggaaaagctgtggcctgctgttctgtgtgtgctctgaaagagttccggaaatctttycctttattctcccataactgcttcctgacccacctgttcctccagcctctggactttagatttattcagtcagatctgtaattataacaagaagagctaaaatcatcctgacatttgctgtatgccaatattgttgtcaggactttatagaaattaactcatttagttagctcatatcaccccaatcaagtagttactattgttttgccagttttgagaggagggaactgaactgcagagaagtgaagacctgcccgtggtcaagcagctgctaaggggcgtccctgagaccacagctcactcaccagtggggagcgagaaaaacagagggcgagcacatctgagacctgccgtgctgggcctttgggagtgtctgtgagcacatgagcgtgtatgcagtcaggagtcacctggggagctggcccggggctctcacatgaaagcccaaccagccacagccacagtcgccctgctattcctatcaagaccttgcataacaagaaattgttcacatgccaaggctagaaaggcaacagattctgcaaagccaagctctcattgaccttataaccagagggcctagcttgtgcatatagtaggttgcttaataaatatttgttggaataaagacattagaaacatcagaagtctccttttgatttttttattctgtatgtgcatgtatttatgtatacatgtgtacaatgtatatctgtaggtacatgtattatacatgttttcatgtatgtgtataatatacatacacatgcctacatatactatatgtaaaatatattataagcatgtgtgtgttgtcagaagtagctttttacaatcaaactctactgagggacacacgatttgcctagtaaaggattcccaaaccagtaggaagccagttttgtttccagtcttgaaaaagaaatataactagcatcaatcagaattgagaagaatagtccttctcaacaatatttcatattattagagagtaatcctgaaaagatcaggctactacatataccacacctgtagttaaaattcagttctgtaaaaccctgtcttctaagtatatcatttatggagtcagaacataaaagatcttaaaaataaatccttcagaaggttaaaaaaatcaccaacttaaaaataaacactgagacattgattttggaaagactctaacaaggatgttgcagaaagtccacaaacacagcaccaaccaaattcaggttcaaggctgcacaccaatcaacaagaactggttgcgcatgaaacacccatcccacttttacaaatctgcatagagaagccttagaaagccacagagtgcactccatattccagtctgtaaaggctatgactgattagcatcactttaatattcaatatagatttctcacaaagcccaatatgtattagtctgttctcacactgctgataaagacatacccaagactgcgcaatttacaaaagaaagaggyttattggacttacaattccacatggcctgtaggcctcatgatcatggcagaaggtgaaaggcatgtctcacatggcggcagacaagagagcttgggcaggcaaactcccgttattaaagtcatcagatctcatgagactccttcactatcacaagaacagtgcaggaaagacccgcccccataattcaatcacctcccagtgggttcctcccacaacacaggggaattgtgggagttacaattcaaaataagatttgggtggggacacagccaaaccatatcacaatgtgttaataaaactacacaattgaaaacctctactataagccaaatatgtaaaaccttttttaaaaaaatctcaaaccaaagattagaggataaatgggtttttttttcacatgaaatttcataagaaattggctgagtatggtggctcacatctgtaatcccaacactttgaaggccaaggcaggagaatcacttgagcccaggaatatgagatcagcctgcacaacatagtgagactagtctttacaaaaaacaatttttaataaaataattttttaaagaaattgtccagaatacagggccaactagacttgagggattgcagaaagtgtcctcaaacttggacgtcaagaaagatgaacttgaaaaaacagtcctgcgtcccatcatccttgaagttagaactgtctgaaatgtgtacagtatgcattgcaaaaacctattcaaatgttcctgtttttctatccagatatgttttggttctgtgcctgtctcacacttgtccagaatgtcttgcctgctactgagtcatttgcttgaaatctgtaagttctatctcagtgtgcttagcacgaagaaccacacaggaaggatacaggttcttggtgacaggaatgaatgaggagggatacaggttcttgggtgatgaataagagataaccagggaaaaaaaagtcaaaggaattgtgtccagaaagaggaattaacttcatgttaggtcaaagacatgacagaacaaaactcaactgaagaactgtaagttattttaaaaagctggattcatacggtggatgggtggcggagggaatcatgagaaacgggctggagacttgagcagaagcaacaccacagggcagaactctcgctgaactctagagggagccgctgagcttcacatcgacccccttcactccatccctgggctagagggctgggggtgctctggtctaagtgatgaatctctgcagcactgagcaaggtgtgttgtgtaatgggagaaatttcaacggtaatcaaaattacagggctgacaggcaggtcctctcctttctctgcacaaggctgggaagatggagctggaggcagctgctatgggaggctcaaaggataaacccagtacttgaagttttaacactttcacatttccagggactgttcatcatcacagatttcttctcccattttttgcttgcaccctctctctctctcygaaattttaacatttaaacaagttcaaatctctcctatcgtcaaagcaaaaagcaaacaaaaaaatgcctcaactgcaatgttccttctagccaccatccccctgtctcccacttaacatcaagcttctcaagagaactgtctgtattcatttttgttgactcacatctcactgactctccatgcagtccacacagatttctgccttcattagctccccaggagcatattccctcgagtcatcaatgctctcyatgtaactggtttcagtggatggttgtcagactccttctgattttctcatacttctcctggtttccctaactccacattctcttagttgtcctcctctatctctggctactccttctcagttttctttgccagtccacctttttctaactgtctgtatatgtacagacgactcaagggccagtccttaataagctcctcatcttcaaactccatcttctcttcccagggggttctcattcataacaacattcattaccatggttacctggctagatgctcaccaacctctgttcctcttgtgggacacatagaccaactataattcccagtttctcttacagttacgttggggacacatgactgggttccagctcatgggacaaggaccaaagtggcatacagcataaaacatcctgaacgagcccttttgttctggaacctgagttcagtcaccatttggaagatggccattcagaggaacattctgacccacaacagactttgtgagagcaagaaatcaacttttatatgttcactcactgagattttccagggtttgtttcaaaagcgagcattaattaccctaatacacgtctaccatctgccggtagctgactcccaaaggtacatctctacctasatctcatctctgagctctgaatctgaatatatgtgtctcctcaatatctcccatcayaagtccaagggcctttcttccagaatatgcaaacctgacctcatggcactgccaattgcttctcttcctgggttcctatcccagtgaatggcaccttatccatcagctgctgaagccagaaactcggaaatcatcttccatgtcttctttccctcayattccccaatatgcaccatcagacatctagtctatccctaaacctagtggatttttctctcctaagttgtactttttcaccattacttccctagtaccagccaccatcagctcttgcctgagctgctgtgaatcctctgttgcacacctttaatctgcacacctctaaccctgcagtctaaattttcaaagaacaaaactagccacagccctggctgactattgctcccagaataaaaagttggcatcctcaatgcagctgcaagaccccacctgattaagtccctatgagtttcccaaacctcattttatgtccctcggccctcaggctcagcgctccaaccacttggcccttcgtccagtccttgaacccactgggctccttccttcctcatagcccatgctgccaggtgccacgaccctgctccacagagacagagagttcttgtgccctcgcctgcagcccaggctagaggctccacatgtatcactacacctaatcctcgaaacaatcctctgaggtatgtgtttttatgcacatcctatagatgggaaatttgaagttctggggatttaggaaacttttcaaggtttacatatccagtaagtgataaaagtagaattcaaatgtcagcctgcttggctgcagcgtccgtgctgtcactccctgcactgtgagggagacacctgcaatggttgagaggaccatggtggaggaccaggaaggatgggcttcattgaggaagaatcaaggccccaaaacacccattcctggaaaactacaggcgacaggacctgcagggatggaggaggaagccaagccaataacaaggctggcgctctgcctgaagcatctgctgtgctccttcctcttcccagggccccaaagggctccagtgattgtccccacaactcatgagggagtccacgactaacatacttaacagtatttgatagctagtggataattttcttatcatcaaggaaattatcgagataattccacgtcctcatcactatcacacatttataaagtgtcttgccaagcacagagaggaaattggtttttaaaaataaaaatgcttattgagcaccactggatccaaagttttaggttgtcaagagatgtgatccttattcctgtgaagcttaagtacccattggggtgtgttctggttatccacaatcatggaacagacaaatccaaacttagtgggtaaaaacagccactgcttctttatgtctcatttttttgtggctggggaaattgggcaaggtttggctgggtgacttctctgtcccacatggcactgcagagatcacttggtggtattcagctggcaagcaggctcttctggagggaccaagctgacctcactgacacatctagtgacttggaagacatgggggatggctcagccaggcctatccatcagagctctatacaacagactactaccgagcagtaaaaagacaaattaccgatccatgcaacaagctggctgaatctcaaaggcattacactgagtaacagaagccagtctcagaagttacatactctatgattccatttatatgacattctcaaagcagacaaaactatagtcatggagtgggtaccaggggctgggggtgaaggaagggacagtgtgactataaaggaacagcatcaggaagctttgggggagatggaacaattctgtgtcctgattgtggtggaacagcccattcccaaaaggtcacacttactgcatgttaattttaaaaataaaataactttgagtcaagtaacaacttcttctgtactgaatacatgagcacagaagtaattctgaatagaagtctgagcagtctgtgctagggacatgatgtgttgaagaagtgcctcagtccattgtgtgctgctataacaaaatacccgagactgggtagtttataaaggagagaaatttctctcacagtctgggggctaagtgcaaattaaggctccagcatctggtgactcattcttgctgagtcatcccatggtggaaggtaagagggcaggagaggatgagagagggtagrggaaggcagaaaaggcagggcaaacaccctttagtaaggaacccacgcctgtgataacgaacccactcccaagataatagcgtcaatccattcatgagggcagaccttcctaaaggtcctgcctcttcatattgttaaaatggcaattaaatttcagcatgcactttggagggacattcaaaccataggtggaagtgaggaaggaatccctaccatgagcctcacccttcatccagggctcacccggttgactccattcatcccagcagaactctggggagtggagccatggtgagtcctgtcatgtcccaaacaggcatgaggagaaaggcacagaaagactccgaacctaggagaagtccgggccaagtcagcatgctctggtttccccgcctcctggttaccagagctccttgggccatgccaagtcagcatgctctggtttccccgcctcctggttaccagagctccttgggccatgccagcacttgacagcaggcaccgggacaccagccaaaactcctcaraaccgcctccctaagttgcacttgtcagcaattaaaacatttgtcaaagagtatttaatcctagtgttataaagtgctatggcaaacagatttggctcgatatttttaaaagttctgcaaaatggctactcccaactgtaattcaattatgttactatggctttaaacaaaaacagtaactaaaaagatcatattttgatgtaccaggaaaaagtcatttggaaccacaaagtcatcaatacttttttaaaaataaaaataaaaaataaaaataataattccaactatagaaaggatccttaaagccaagccccagaaacctcattagtcaaaggacaaatacaacacacaggatagcagaggtcacggcacttacaccaaactgtggaagagactgcgttttcttgggagaccttcaactccttttacctccctttctgttcaccacatttggcagggtttatccccttgaattaggagtagtgtgaaaaccagtggttattgtaaatccagaggttgtcgtaaatccagatcatagacagatatttccatcagtcgaaatgtatgtgtgagtaggatttaatttacatgaaagggtgtttgccaaatgttaacaactggtggcctgagacggtgctgggaggtagcaggaagcgaagtgcaaggctgaggaagaccctctataagggccagggcctgtgcagagacgtggcgggcagcatggagatggggagacagagcaggcagaggaacatggcagacggaggaagatggctgcgagcagagaacatggcagacggaggaagatggctgcgagcagagaacatggtgggcagacagggaagatggcagcaagcagtgaacacagtgggcaggagggggcgtggtgggcttggaaaacgtggcatcaaggatggagaacttggtgggcagggaagatggtgggtggtgaatatgatgggcagagaacaatgcagtccccagacaacccttctcctgcctggattctgactgatggtgcagtctccagacatcgctccctgcctccactacacccagataagaagatgaaaatctcatgccagctgcccaaagtggaacactgccccttaggtttccctgagggccacccctgctttcttctctgcctatgagttcctaagcatcagcagtatcattgcatctgccatatatctccggttctgccctctgtcttcatttttttttgtttgcttgcttgttgctcgcaaataaagaataaatgaggaataaataatcttttaaagaagccaagttgtgccttttgttcatggtccccaagtcatcttagggcagagttgtctgatgggaagggtacaagttagactcgatagatttttttaatgtttactcaacacacaggaactagaattctagaagaaggaaaaggcatgcagagatacaaagtgaatcaygttatgacgatcagaggcaccagcaaaaaagaacacacagccctcaccatcacatgaggctcaaataacatgctatgccaacacatgaagtaactcctgcaggaattacaaagacaaagtagaataaacaagtgtcctgggatgttttattgtacctattttaatatacatttatgacagattaagtacattaaaatgaaaatatataaggaatctaataatatataatgagtccttggttcagactctttyggaatagtacttgtggggcagatataataataaatcatgatttcaattacaaaggaaaaatgaaatgttaactccaaatccaccataaaactcacttccctgcttaaagagagttgaaatgcgcttctggagacagtgaaatgcaggtccctgagacctgaccaactgtgcctgcgtccggttctggtcactaacagtgtggcattaggcacctctccctgccttagttgtcatcttctgtaaaatagggaaatggtgatcttggcttcaaagtgttactgtagagattacaaaatatacacataaaatgcttaggagagtgcccaacaaataggaaacacacactcaatatgagttgttattattaatactaccaatagtcgtaatactgctactgctattattattactactacctgctcctggggcttcaaaacaatatttaaaaagaagcaattcaaaggaagaaatggttagttttggatatttgtaacttcaaggccataagtgaggatgcatcacagaaagggaagtgaaaaaatcttacactcacaaaattatggagaatcattctcacctctgtattactcaggacctttccagtatatgtaagaggaggcccaacgcagcctggcttaaaaaaaattaaaacacataaccactaagtctaagagttaacacagcttcagaattggttagcccaggggctctccaatagcacggagttcttcatttccttctttctgccacagtgtcagctccatctcctcatgactgaaattcagtgctgtgtaaaaatcacactccatgcttccttattcttgcctagcaagaggtctcaccgttccaacaagcactytgcacccctcccaagagagtatggctagaggaagagtctgccaatccagtgaagccaaccagctccatggcaagaaccgggatgsgtcgtcggcttcatcccagataggagaagacagaacacaggagaaattcaagagaaaatgtggatgagaataagtgctgaatagtgcatcacggagtgggctgtctcccggagggggtttttcagaataagaacactggatggttaattgtgtccactacacacatctttgagacaaattcgccgcattcaagtgggtccagttctgcccaaagggtggtcagtgagttatcctgcgagaaaccatctgctaatctcattaaatgtctgaagactacaactagcttctaatgtagtccctttcagccacacgttkctgtgctgggtaccatgaaaacccaggttccactgggctcaagacggagatgcggcccagaagccacagactcaccagactcactaagatggggtcaggaggcccagtgctgacctggcccgggctgggctccaaccatcctacttcctcaaattagcagtcctgattacataaattacacagcttactaaatgcatccaaatttctgacaaaattttttttccaagtctggtttatttccaaaggtgaaaagtctaaattataaaatattacaatgtcccaatgaaagtaaacaagggagaattaggtgaaaaatcatggaagtttataaaaaccccttcacagaatgaagaattcccaagagcattttgtctggtttaaattgataacttatgattaaaacaccatttgtacgaatcctccagttaatccacataatgagaaaggtcaaagcgtgaccggttatatggttgtggccctgctcacactcttccatttgaaatgagctgctctcctagcccttcctggaggctcttggccatcagcacaggagcatgtgcccctctgaatctcaggaacctttaattccacttcttgcctggagtgaaaatatctatgggctctgcctgcacttttatctttaaaattcaaaaaaagttaatagccataagacataaacagggagccaaagatagagtgagatgatagtttttaactgacaggcagaatcactcagagaatcacagcttagagaaaatattaatttaaccctgaaagtatttactctcttggaaaaaaatgaaaggtcacagccatatgtgtttaccttttcaagcactgcactcagtagtggtgcttgcggaagagttttacagcttctcacatgtgttttctgacatctctgcagatcacaaggttactctgtttccactctagtaacatggtagtaatgttcacagatttccttttgttgaactatccttgcattgctcacaaacctttcttggtcaggatgcactatccttgagagcactgcttgtttgatttgttacctttttcttctcctttaaagaatggaagacaaggtgcctcaaacctgtaatcccagcactttgggaggccaaggcaggtggatcacctgaggtcaggagttcgagaccagcctggccaacaaggtgaaatcctgtctctactaaaaatacaaaaaattagccaagcatggtggtggacgcctactcatgtgtcccagctactcaggaggctgaggcaggagaatcgcttgaacctgggaggcagaggttgcagtgagccaatgcactccagcctgggcgacaagagagagactctgtctcaaaaacaaaaaaaaaaaaaaacaagataaagactgtttcatcctttgctgtgttctggaacagtttaaaataacagaagttatcagttccttaaaagatggtgactattatttaataggtaactgtggaaggacttgtgagcagtgttttagctacaggaggaaatagacaagcacgcacgaggtgattcgtacactacacaggattgtccatgcacaggtccttgctgtgtactaaatgcctgctacccgcagtgcaagtggccataatcccgactgggttctcataggctcatggttgcttggtaacactgacattccctctcggctcatcacaacctccaccacactgatgtgtgaaaagaggtaacagaagaaccccagagccccaatgatgaggcaacgcctccgtgacacgcctgcccccttggctccagagccccaaagcatggtggctccctatcacagaaatatgagctcacactgaggccaagactgggacaaaggacacgtggaaagaagtaacagtcttaatatgttggtgccagattatgagtttctctggagtctgtcctaaaggaaatggaaaatcactgaaggtgcagcaacgggaggcaagttaacagcaggttggcaagagggacagcagtaaggaatttaattgaaaaacactaaaacgttttccaggaatatgtgccaaatgtgacactttagcaagatgggagacttctgcagaccgccagaaagggtttctgcttagactttaaatccttcctctagatgttggattttactataaacccatttttaacatcttttccatttctagaattccctaaccctgtcatgctgtggttgttttttgttcatctttccacatgtttctgaagaggaataagtcatagaatatttactgattatatataagccacagaatatgtacacaatgtgagcataataaaattaaccattcaaatgtgcaataaatgattcagttccaatcatcccagctacatagtcatgtagaaaataatatcttaatatttcttccattctatgtgccaaattaaatgaaattggccaaaatattgtacttgttatggttgtcatgctatgttgtcatacatgttatggttgtcatacatgttatggtttgtttcattaaaaccaaaaaggttttaatgaaacaaaacagctaaaagtagaatgatggtatgtattctctaacccagtccttgaaaacatctgcatcaaggtgccaaactggttttccagtcttgtgggtcacagtcctcatcacaatttaatcatagccacattcatgatgggtggcatttacggagtgtgaggagctttgtcgggtgcctgtcagatggggctttcctcaacagccctgcagagtgggtcttagtgggccctctttgcactgatagaacctgaagagcagagagttctgtctttcacttcaagaagccgactcacggatcctggccaggagccctgttaaaacaatacccaaactttttgagataatttgttaatggaggaagtacctacagttccaacccagtcttcagtacttgggcaggcttgcctctcaagaattcatttcgttatttattcattcaacaaatatgtgctaggcacctgctgcatgccagatactgctccaagcacttggggcacatcaataaacaaagcatgcttggccttgtggagctcgcattctagaaggaaaagcagtcagcactagataataaataagcaaatccaataggatgctgggggataagtgctgcagcgtaagtaacagcacagcaccagggggtggggagacagagtgcgacatgaaggagggtcgagacagaccttggggagaaaaggacatctgggcaaaagctgagaagagaagagtgtctgcggaggagtgttccagacagaagtacccagcagtgtgaatgttctcagcaggtgtgtgcccagtgtcccagaggaatagcaaggagagcactggggacagactggaaaaggctcaaacacaaaaggtcagagacatacagggccagaaggcagagggttttggccatcagtgagctgaggggcattgtgggattttgagcgatggagggtgaggagctccctgctggtttgatggccactgtgctcgctctcttgacaatagcctataacaggccaaggactgaagcggtgagagccattgagaaatttttgcaataacccttaggaatgaggtggcagagtcttggaccaggtgacagcagaggaagaggtaggtggttggattctggaccttttttgaaggtagagacagctgaatttcctgataatgctgaatatttgatcagatatcataaccatacttcttttaacagaacatattctgggaaatcaatttgctgtggaaattactttcttgagttggtctgttgaggatgtttccatgagaacccaggcctgctagagcagggactgtaagttcaggttttcagagtttagcaagttcttgtcaaatgtcaacttgaccctatcatccattacccatccaagactcatgaaggagttcccttacacagtgttgaaaatcagctgggatttcagacagggctgacattagcagatgctcaaattgtcacccaaggagtttgaaaatctggaagcattattctgctaggtccaggaatcaaagttggtgcacggactaggaccctcagaccagcagggatgctgaagcaagaatgtaacgttgaagacagggccacaggaactgcagctagtcctaggactgagggggatcacttctgccaaggcctgccccccsacttcccagacagggtgctgtgccctggaataagagagctcataaccaccttctcccagccgccgggtcttcccattaggtctcggccctcgcttgctctcttcttacttccaaacacacaaaaatactgtgagggtttgcagctgatgaagtcccaaaggagcaatccagggctttgcacattttcctgtaaagggccagacagtaaatattctaggctctgcggccacacggtgtctgcagcggcttctcaactcaaagcagcagagacaacactgaacaaatgagcactcatgtgtccaacaaaacttcatttacaaaccctgaaatttgaattttatgtgagttttaccttccacaaaatattattttctttttttttttcagtcattcaaaaatgttaaaaccattcttaccttgctggccaaacaaaaccaggcaatggccaatgtgagccctgaactaaaccgcgtgttttgaaagggctctggtgcagccaggccgacttggagcccctaggtcatgcaaaacgcagtgctctttctgctgtggccttggcttagtagtgactccagtaagtccagtgtgtgaagcctggtcaccgctaactcacaaaggtgcagcacaggtcaccaggcaactctgtttcatgacactttactgccatctgctggacaattgttgcaatacaattacatacagattgcgccgaccgtgaatttgaagagtcccgttgtagttttgtgatgcatcatttgttcaatttaagcagtggccctgggttggggaaatatagaaggaagaagcaactaattcacaggagtcccagaagtcatcatgcaaatgacacaaagatcccatcactttctagtttggggagggggcgggcgcaaggggaaggaaggagggaagaaagacatcttccaactgttattatctagtctctgcaggcttagattggtgctctgcctacattggaggtgttctgcaaaccggagtcttcctcgccagagtcccataaacgtgcctcagtcagatgctggagagacagagaagggaagagtccatcagagcctcctgattcgagcatcacacagcaacccttctgagctcggtggtccacacagcgcagggttctatgaactcctgaggagagccaggagtgctgctaagctttcccaggtatgcgtgaccatgtgtgccttcatctgtgtgtgacttgggccagcacctgccctcctccttccttggtttatctgccccctcaatggggataacactcctagacgttgctgcctcatagagacagtgtgaccgtggaaygaacaccctttgcacagcataatcaggatcagcagtcctgaagctgcaaggctggagagagaacaggaggtgaaagaaaagggtgagttagaccacaattgggtgcagtcaagaagccacagcacgcaagagattgcctgtgatggggctccaggattccaggcctggcaacagacccccaggtttcaaaatgaaaaacgaaaagagctagagaccaagaccaagggatatgttcaaagactatgaggtccactgtctctgatttaaaaccaaaacgtttgccatttgctctagggaatcagggaagaaagatacagggtgatctgtttggccccgcccccaggcttctggacatttccaggactctaggcaaaggcagaagccaagtcaagagttccacagcaaaacaggtgtgcccaggaccggggaagtctcaggaagcccatagtacatatcagctggaacttggggggcccgggactcaaagtgccctgtgtctggcctggggggacctggggcgggcgacatgatgtgcaaacctcagacccaactctagtaacacaaagctgtcccagggaaaagcgagcagattccagtgttgtgacagctcaggctcaggacgaagacgcctgcgtgggtacaatgggtcctctgggggtgcagtagaggtctttgtgggggagggcagtgcatgggggtctggtggccccttcasctccttctagaacccttgggaaagagacactgcatgggaaaggctgagtgtcatgactcacccaaccccttgtccaacatgaagtgaccaagcccttgatcagctttaaaaactagtttacggctgggcacagtggctcacgcctgtagtgtccgcactttgggaggccaatgcggaaggatcgcttgagcccaggagttcaagaacagcctgggtaacacagggagactctgtctccacaaaaaattaaaaaaattagccaggcatactgacacgtgcttgtggtcccagctactcaggaggctgaggcagaaggatctctggagcccaggagttcgaggctgcaatgagctagctatgatggcaccactgcactccagcctgggagacagagtcttgctctgtctcaaaagaataaaaatacaaactagtttccgtctcctcagccacacaccatgattaaacttcagcactaacactttcatgcaggacagtggttgacatgctttaagactgcctccttagtgcacagaggacaatggcacaacaccatggccaaccaagcccaggccaaggtgggattccactctcacccggatctggaaggcagagtacccctggtcactggccagcgctgtttagaactatccagggggctcaaggactcatgggctctcttcctcccttcccttctcccagctcccatctccctccacacttttcctgctcacagccccggggagtcaggtccacagggctctgccctgtggtaagccttgctgtcctaggaagcaggctctgtccctctgggctgctcaccaagccacatgcacaaaaccctgccagtccycccagcagcctgccacgctgctgagcccagatggtatcttttagtggaaatttcctgaagacacaggaagaagccaagggaaatgtaacagagaacttagcagcaggctttgcctctatcctagagtccctgaactgatcccctgcctggcccaggaggcctgtgcatgacagaggtgtgacctgcccactagcactagtcagggtcaagccgtgccttggcccccacccttcactcttgggagaaagctctcaatttgttcagtacctacacataaggggctgtctttacgggtttgcccagacatcccaggccctcccgagtccatgcccttccctaagagtctccacttcccaggatggtgacaataaaggcccattcccctcaggagaagccycctctgctcaagatgtggccttggagatgtgctccgaccatgcccagagccacacagacccaagtgcagccaggaccacccacactggcctgcccctgccctctgatggctccttctggcccaaggaccatcccctcctcattgaaaccctgactcggggatgctctggggaaaggggaggtcactgtggaaccagaaaataaagatacaaccctagcttctcatctagagagtgccatccagctgtgagaccaaagattggaaaggcaatgaagtagagcgaccccggagctggtgtagtcctcacccgcagtgcgtgcagacacatggcactgcaagctacaggcacggcttctctatatctagaattgtgtatgtgtgtccatgtgtgtctgtgtctctctgtgtacatccacgtatgtgtgtctgggtctgtgtgtgtgtctgtgtgtctctgtgtgcatccatgcgtgtccgtgtctgcgtgtctgtgtgtgtgtgtctctgcatatctgtgtgtgtctatgtgtgtctgtgccctccaggccgggtaggggcaggaagagttgggagaggaagcctgatacaggcccaggccccaggccctgctcactcccctcagctccttgggctgagtgcagtgggcttgagggtggatgtgcagtggcctccttcccgaagtctgaggccttggtctagggctgaggttgaaggacagcctggatggcacaataccaaggctcttggagaggctgtgtcacccgcctcaggggtgcaggtggtttgggcacatttggcacccacagcagccccatcttccctgaaaggctgaggagggagggcagccagaagttccatggggaccccggtggacttgaaagctggacaacccaggcgaatctgatcgctggagtcggaggtgcggaggctgcagtgagccgtgatcgctccactgcactccagcctggtcgacagagcagaaccttgtctctaaaagaattaattaacatgactgagaagtgactaacttggcagaattcaccaagaaggggtcgactgctctctatcaagcatgaaataggggctagactagaattacagaacataatgggagttaggtttttttcgtgggcgtcctactgggaactctgcacccacggccaggcctcctgccgcgtgcgagtcttctgacaaccccctgcgcaagcggggcccctccggccgccccgggacgtgcgtgttcctcccgctcgcggcccaccccactcgcggggcgtcctcccgccagcgggacctgccgtaggaggggaagggaagggaagggaagaaggccgagtcgcctccccttaggtgtaatctgtgctgctgacttcagaaggatgtcttcgggttggaagatttaactgggagcgaaagtcagtaaacagcccacgaaacaaaggccaaagctctccaggcccttccaaaggtttttcgtatgatgaagccccgcagtggggagggccccggagcgcacccgccgcgcccctgctgggagcttcccactctccgcggaggctgggggcagtcccggccagcgtttccatcagcgaaaaacacccactaggccacgtctaagtcgcgcttggaaatcgctaagtgcgggaccctggctcgggccagtggacacccggactccccgcgcgcacagcagcccggccgagcctgggcgccaagcctgggccgggctccacatggctccccttggccccagggaactgtcgcccctgggttccgmcgcggctgtcctctcggccctctgctggcgcatcagcacagtggttttccgaggcaggggttgggtccagcctgtgctgcttctgagccgcaggaagtcgctgagaccagcgtaaggaggaaaccccaaaacctctaactggacaggagaacycctgaggaaccttccgagaggaggggccgcagctgaagccggcaggcagagacggagagaaatttgacgtcgtcataatcagcaccaatacatatatacataaatacttggaaaaccacccaatgttaaatttcarattagaaacgtcctaaatgtccaacagcaggggaatggctaagtaaagtataatacctagctagaacagatggtaccagccagtctaaaaggagggttcagagtttgctgtaattttggaaattgtaattaatacccatttaactgaggagataatttttattaactaacatgatctcatttatagctttaaaatgtgcctaaaaatagcaattgtcatggtgattttatttgtttgatagaatgggtgacaattcatatatgaatgaacaagttaccccaagaagacaaacaggttagagtaaccttgtgcaaaaaaaaaaaaaaaaactccatctgcttccgaaggaggcgtgaggttgcctgtgtggtgcctgccttcttgaacgtggtgcagaagagctggggctctgcccggcagtgcccacttcctctgtaacaggcaggatgatgtctgctgaggaaagagctgtggcctgaggaggggacagcggattcgtgaaagtagagcccagggagtgaaggagggatgggatgggggatggttaggggacagggagtccagaatcagaagcgtgaaccccggggcccgggccacttgggctggtgatgcagcctcccagcttggcagcaggaggtgagcccttgactatggcccccatgaggtccccttctctcaggagggtagtaatggtccctgctgctgtgatttgaatactcctcccttcaaaactcatgttgaaacctaatcctcaatatggcagtattgagaggtggggcctttaagaggtgactgggtgatgaaggttctgccctcttgaataggttagtccattcctggattaatggattgatgaaggrgttgatggattaatgtgttatgcagtaggactgttggcttataaaaagggaaaagagacttgagatggcacgctcagccccctgccatatgatgccctgaaccacctctgggctctgcagagtccccaccagcaaaaaaaatgctcaccagatgcacccactcaaccttggacttcccagcccccaaaactgtgagaaatacatttcttttctttataaattacccagtttcaggtattctgttataagcaacagaaaacagactaagacccctgcttcctagagctgtagagaggggcccacaccagcatccacagagcactaggaagagggcctccatggcataggcacccaggaaataagtgtccgctgaacctgtggattcacaggtgcctctgatggacttcgggatgggctggtggtgccgttaaagaccagtggctgcctctgctgtgttcgtgttgtccacatcactgctgggatgacaracctgcagaggctccatctgcacacagttttgatgaagctggaaattctccctctctccttgcacctctttctcagactttcttcagggatttttatggtyttctaaattatttttgcataaacactattttaacagcaaagaataaaaatttttaagtgcaaacattcacacttcatctcactgctctcaaattatcttttacattttcatatttatctcctatcccttctcatattcagacataatttgacatagtgctaattatagcattaattcatattctgtctttgctgttcaaaggagtttagggtagattggtggaaaagtcagattaaatgaacgtgaagcaaggtagcatcaagctgcccctctgcaatcataagcatcagatctttgggaggatcaacaagtgttacattcagaatagccagcttcaagagcaaaggcaaacccaaataagccatttctgaaaatattatcccaagtgtattaygtgtgtgtgtcaaaattatgcaatggtttcatgcaaattgttgagtagtgaatgagaacattgccgtttaaaacaaacaaacaaaaagccctagatgagtccaaaaccacttactggaaggratgaagaattaaagaaaatcactaaactgcaataagagaggatatattactaacaagtctgatgaaccaagtgaactagatgcaacccctctctctttctctctctctctctctgtctacacacacacacacacacacacacacacacamtcccatcaggaaaagagagtaagttagcatcattttaaaccagcatttaagatcacaaactaaacaataaagaatagaaacaggtgggaaattggacagagggaaaccgaaaatcattaaagacttacgcttccataaagggcagaccaagttttgtgtgtttgttgccaattgtagatatattttaaatgagactgatackgttttaggataacaaccataggatcaaaactggkctgatttcctggctgacccttagtaagagatggaagcaaatggaatgtggctcactcatccaaagacagcaaatagagaaagaagacagaaagctrggcctactctgcaggtgtccatggtaggcaccactaatggggcaggggctccctcacctcccatgctccccccaacatgggtcctcgcaaccttcctcttaatcatttagtagatctgccacctccttcttccctttccatcactccacaccatctgtgtgaactttttctggattgctgggtgggctcctaaacgttgatttgtctaaaatataaaacccgttttacagagtaggtacccaacaaatataaaatgtgagtattttggtatattcattttatttacatcaagtttctttctatctacataagtgtaatactgtatatcagcatgtttcagattttactatgatggttctgctagctacagtaaaggaagaaggcttttatgtttgtgtgcatgtggctgtcttgcaaaatgtatatggsatatgcattgtctgttctttaaaaacatacaatgattcgtctatgtatttccaacttattagttctgtttacttagtcatttccactctcaacttctattagtctgctcggtttgccataacagaataccacaaactatttgaacgtgtcttaaacaacagaaatttatttctcacagctctggaggctggaagtttgagatcagagtgctgggcagtttggttcctggkgagggctcccttcctggcttgtagacaaacacsttcttgctgtatcctcacatggccttcttttgatgaacatgcatcccttgtgctatggtgtgagtgtttgtgtccctgccgacattcagtttcatgttgaaactgaatttcaacagtattaagaggtggagcttctaggagatgattaggccatgaagtctctgccctcataaatgggatcagaaaccttgtaaaagggctcaaagaaactagttcagcccttttttgcccttccatcccttccagcacgtgaggacacctagacggtgccatcttggaagcaaagactggaccctcaccacacactaaacctgcctgggccttgctcttggacttcccagcctccagaacagtgagaaataggctctattatttataaattacccagtttgtggtattttttatagtagcacaaatggactaagaaaactgctgtctcttcctcttcttctcaggacatcagcrctgtggcattaggtccctgtcctcatggcctcatttaaccttaattacctgttcaaagtcctcatcccaaaatacagtcacattggggattagagcttcaacatgtggattttgaggggacacaattcagtccataccacaatttttctggccaattgtaggatggtgcttcttggcacacttagggatgaattagattgtgtaattagttctggacaacaatttgtgagctgctatgatttgaatatttgacccctgaaaacctcatgatgaaatytgatccccagtgttgaaggtaagagcctaatagaaggtgtttgggtcataagggtggacccctcataaatagattagtgtccaggggtggggctgagtaagttcctgcaaagagcctggcatttcccccttgcttcctctctcaacatgtgatctctacacacagagatccccttcaccttctgccatgaggggaagcagcctgaggctctcacctaatgttggtgccatgcttctggtacagcctgcagaactgtgagccaaataaacctcttttcttcagctgggtgcaatagctcacacctgtaatcccagcactctgggaggctgagacaggaggatcacttgaacccagaagtttgaggttatagtaagctataattgcttcactgtattccaggctgggtgacacagcagaaccctgtcattcataaataaatcaataaacaaacaaacaaataaataaataaataattttttaaactctttttcttataaattacctagcctcaggtattcctgtatagcaacactaaaaagactaagatatgagcaaatgtgatttatgtcactactgggctgtgcacttaattgccagtataagatgttccaaagctttcttatctctctgccatagtaactggcactgtaaagatactggctgctttgtcagcttgggttgctgaatgtctacaatgagtagaattccctgcaataggatagcatgagaatggaatagagaagaaatacacctttttgacttgtcactaggattttactgtttttgctgcagtataatctaatctactttcactgatacarcttctttggtggtaatttttagtggagatgtaatttagacacacaaaaaaatgcaaaacattcatttcaatatgctttggtaattatattactcctgtgcaatcactgtaaacaagagatggtgcatgtccattaccccaagtgtttcaagttctttccaactagtcctcccaccttcttccatcccagagaaactatgctctggtgttctgatttctgtcatcatagattaatttttctcttcctgagcttcatataaatgggatcatattgtctgtatttgtgtcttgctttcgttcaatccacataatgtttttttgagatcaatgtatattgtgcgagtcaggtgagcatccttttgttgtttgctgactactattccatagtattaatgtgccacagtttgtatatccattctactattgatggacatttggttgttttcccttttgggttattcgaataaggctacattcttgtgcaagtctttttgtagacgtgttttattcctgttggcaaatacctaggagtgaaatttctgaaccatagggtagatgtatcttgaaacttataagaaattaacaaaaggtctctaaagttctccagccattttatactcctttcagcaatatttgagagttcagtgctatatattcttgcctatatttggttgcgttgtcttttataattttagctagcccagactgctgttagcattcagtccagaagccctcgggagagagggcctttgctttctttcccaaaaaagtcttccttaacaaatggtgctcaagcactgattattcacatggaaaaaatgaactttgacctctacgtcactacatacacaaaaattaaaatgggttatagacctaaaaataaaagctagaaccataaagcatctagaggataacacaggagattcttaaaaaaaaaaaaattagagtaggcaaagggttcttaggacacagaaacattaaatcattaaaaaatgataaatttgacttcataaaagtatttctcccaaaatacttgagttataattaattatatttgagcaccaccatgccaggctaattttcatatttttagtagagacggggttccaccatgttggccaggctggtcttgaactcctgacctcaagagatctgctcacctcaccctcccaaagttctgggattacaggtatgagccactgcgcctggctgattttctttgtattttctaatgctttgatcctttttatgtcataatgatttaccatattttgtaaacattttagacaccagaaagtccccaggcaggacctgatggctcacgcctgtaatcccaacactttggaaggctgcagtgggaggatctcttgagcccaggagtttgagatcagcctgagcaacatagtgagatcctgtctctacaaaaaaatttacaaattagatggtgtggtggtatgtgcctatagtcccagctactcaggaagctgaggtgggagggtggcttgagcccaggaagttgaggctgcagtgagctatgatctccactgcaccccagcctgggcaacagagtgagaccctgtctcaaagaaaggctccaaagtcagaatctatcgatgaattctgttttgtatttttgtaatttctacttacctttgccagcttgactttaataatggtgagtcaaattgtctaacatattttgtcaaattgctcctaactctacatcttatgtctttatgtcaaaaagtaacaaaattcataaagtttcaaagacattatccttaatattgataataatttttgttaaatgctgtttatacatattttgccaattgcagttgactaaaccatgcccttttaatattaatattggtgtcagtgcctgtgatcctatttggcaaaggctttctggttattctgctgctgcccaatgcatatcccgtcatgaaagcctggtgagttggaaggaacaaggtacttgagtcagacctgggtagaatcccacatcgactgctcactggttgtgagatcttggatatgtgtggtaacctctccaaaccatggagggaagaacaatgcctactacaaaggatgaaattatasattctatgcagcaatggctacatacacacatctgtgaccaagagcgacagacgtggactgtttccaagcccattttttaaattatatttatatttgagcayagtggtgctcaaatataaatataataccaaaccatcactatggtttggtatttttgagacaggttctcactctgttgcccaggcgaagtgcagtggcacgatcttggctcactgtagctccgcctcccaggttcaagcaattctcgtgcctcagcctcctgagtagctgggattacaggaatgcaccaccacgcccagctaagttttgtatttttagtagagacggggtttcaccatgttgaccaggctagtytagatctcctgacctcaagtgatccacccacatcagcctcccgaagtgctgggattacaggcgtgagccaccgcgcccggccgcaagccggtctttaggggattttgtgtattcgttatggtttggaatttattgggtgcctaatatacacaatacttgtatattttagacaagtcaacatttagaagcccatccagaaatccagaaaaagttcacacagatggtgcggagtgatggagagagaagaaggaggtggcagatctactaaatgattaacaggaaagctggaaggacccgtgtagggaaatcgtgggaggtgagggagcccccgccccattggcagtgcctaccatggacacctgcagagcaggcccagcttttcatcttccttatctatttactgtcttgggataagggagccacattcttgtttgcttccatcttttactaaggtcagccaagaaatcagcccagttttgatcctagagttattatcctaaaacagtatcagtctcatttaaaatatatctaggctgggctcaggggctcatgcctgtaatccaagcactttgggaggccaaggtgggcagatcacctgaggtcaggagttggagaccagcctggccaacatggtgaaatcccatctccactttaaaaaacaaaaatacaaaaattagctgggcgtggtggtgggtgcctgtaatcccagctacttaggaggctgaggcaggagaaacatttgaacccaggaggcagaggttacagtgagccaagattgcgctattgcactccagcctgggtgacagagcaagactccatctaaaaataataataaataaatatactggtaatgaacacacaaaacttggtttgccctttatggaagtgtaagtctttaatgatttttggtttccctccgtccactttcccacctgtttctattctttattatttagctcatgatcttaaacgctggtttaaaatgatactatcttctcttccattacttacgtgtgtgtgtgtgcattatgtgttttgtatccatttccttggcccttcctgttggagtttagtgattttcctgaattccccattacttcaagtagcttcggggccaccacaagctttcgacaccccccatgagcctgggggtgctgttgagtcacctggtgcacatggcatcttctgctggcctccccaaaaaggagactctgagacaggcttggggctagtcgtttgggaagcactgtcagccactgagcaatgagccagaaccagaagctgtgccacacacaggtgcaagaatgagtggggtaccactgtggcaaaytgggtacaatcccactgaggcactgtaagagaacatgaaacacggcaggactgactcacggaaaagggggtgagctgggatagtcctccaggaactcctagtccttatcgatggaaggtgcctcctggaagcattaaatccccagcacctgaagctgggcacacccacagggcaggcaaattcctgtggccactgaaaggcctcaagcagggagctcaagttcttgaggtgrggagccctcracatacagggacattggccaccaaagcacaaggtgagctcaagagatgtcaggggcgctaccagcagctgctgcgtgccatgttttatgaagtgtcagagcatgaggggctctgccaactgaacgtggctgggaacggctgccttatggtgcccttcaccaacatcacagaacctaggccatgggaacaccttcccaggaggacctccaggtatggaccaatgccaggggcccaaaacwgaagtaacaacttctccttctgctgtagaaaaattgcagaaaaatattgtctctaattttattagaagtacttctaaatgtaaaatgtttccaattaagtattttaaatttgtatctctctaggcatttctgaaaatgttattcggaaaaatgtaggaaaatacttttcagcagctctttttatgagttaaaaacaacttatttcaactcctagtgcaataaattttattttaaaagcattaataaactggcaagttcagaattaaatactggaacagttctaaatcaaagtttacaaacatttgaaatgctaacagactgcagtactttttaatagttggaacttttaggtagttggaaggatttcagaaataaagaggacaaaagtacagaaaaatgacgtgttcccatgtgcacatttacatatttgccatatattgaaactttttaaatgaaaaaaatatgttccaaaaaatgccacggcataaaacattttcatggttaacatccatttttgctctgaaaacagcagtctttgataatgtaaacatcaatttagccttcaccctataatttgtcttttctcttaagtaaatattggtactttctttcagaaacttaataaccacaaggcaagttcaagtgcctggaaaatactctgcacttgatgcgtctggttcccataatgaaaagatgcatcaattcagagcaaacctatcatagagctgcgccttcagaaagatacccctgttgccaaaatacaccaccaccccctctggaattacataaatgtgtttagtgttcatatggaattttctaaaagaaaacaagtcaatcaagctgttttgtagtcctaaagaacttaggtcttggcagaacactggagacattttaaaagctctggacttaagacagattcatgagtgatgggtcaagatcaaggtctttacagacagtggatgtacattgtttaatctccattgtttagaagaaatctagtcctcgttatgttccccctcctgtgtccacatgtgcacatacaccctagaacttaaagtataataaaaatatataaaaaaaagaaataaataaatttagaaaaaaagaaaagaagaaatctagtgctcgttataaaccctcaatgcaagtgagataacttcaggtcttaaactgaccatagttctattgggttcttataaattaaacatgttgaagtgcatttgctaaattgaaaatgacactttactagtgacaatctcttgtttgtcttgggagaagggttatttttatcttcaagtgcaaagacatggtttcagattcaactttttttattgttattatactttaagttctagggtacatgtgcacaatgtgcaggtttgttacataggtatgcatgtgccattttggtttgctgcacccattaactcgtcatttacattaggtagttctcctaatgctatccctcccccagtcccccaccccacgacaggccccggtgtgtgatgttccccgccctgtgtccaagtgttctcattgttgagttcccacctatgaatgagaacatgtagtgtttggttttctgtccttgtgatagttttttgagaatgatggtttccagcttcatccatgtccctgcaaaggacataaactcatcctttttatggctgcatagtattccatggtgtatatgtgccacattttcttaatccagtctatcattgatggacatttgggttggttccaagtctttgctattgtgaatagtgtcgcaataaacatacatatgcatgtgtctttatagtagaatgatttataatcctcgggtatatacccaataatgggatttctgggtcaaatggtatttctagttctagatccttgaggaatcgccacactgtcttccacaatggttgaactagtttacactcccactaacagtgtaaaagtgttcctatttctccacatcctctccagcatcagattcaacttttaaagtcattgcaaaagttaaggccaactgcaaagttagagaaacagtccacaagactgccttcactttttttttttttttttttgagacagggtctagctctgcctacccaggctggagtgcagtggcacaatcacagcttactgcagtcttgacttcgcagcctcaggcaattctctcacttcagcctccagagtagctgggactacaggcatgcaccaccacatgcaggtttttgtttgtttgtttttgtttttttagagacagtgtcccactgtgtggcccaggctggtctcaaactcctaagctcaagcaatcttcctgccctggcctgtcagagtactgagattacaggcatgagccactgcacccagccaagactgccctcacttctgacactagctgtcaatttggtggggaggttcccaaaaccaccctcagattcaatcatttgctaggaagacacagaaccgactgagagctgctgtcattgtaggtagggtttattacagtgaaagtctagattaaaattggccaagggcagggtgcagggaaagtaccrcatgcagttcccactgtcccctccccatggagtgaggaaggcgtggctttcccagcatcgctgtgtaacagtaggcatgcagcagggccaccctgcaaagccactcgagcattgggtctgaggtgtctgctagagttccctcacatgcatgtgactgattgttcccctggccgatctcagcctccagcctcctgccctcccgaagttgactgattccatgtgacccccaaatcccccacccatagcatgtcgttaccacctggagtgtccaggtcccatcctgagactacccagtggggcagccccaccgtaaatcacatctagactacccakcgtgagcccaggccactggcaaatgaagacaatcctattaagcactatactccaagggcttggagatagatcacctgccagaagctgaggacaaagtcagagctctttagggcaaggttaaactccttactacacaaatcagttgtatgattattacagtcatgtattttatatttcaagaaatgtgtttgactattgtgaaatagagttgaagcctttcaaacctttaaaaccaacaactatatgttttgcatatgttaaaataaaaattatgacatactttggtgatagcaaatgaaaataaacttaattttaagttttgcttgggacagaaaaagaataagaaggcaagaagcaagaagrgcagatcatttgtgtgtccctacagttatcttgcagtttaccatcattgctaccaacagattttattttcttctttaaaatgagaaaatgccacagattcaaagagattatggagacacaacaagtgggtgcaatgtaggatcctggattggatccttggaaagaaaatgatcgttaggggggaaactagtgaaacacaaacaaggtcagcwgtttactattaattattaccatgatgcctttgggaagccgagatgggtggatcatgaggtcaggagttcaagaccagcctgaccaacatagtgaaaccccgtctctaytaaaaatacaaaaattagctgggcatggcagcgggtgcctgtaatcctagctactcgagaggctgaggcaggagaatcacttgacctgggaggcagaggtagcagggagcggagatcacgccactgcactccatccagcctgggagacagagcaagactgtctcaaaaaaaaaaaataataataataataataataattaccatgatgcatggtaccaatgctaattttctggtgttattataattctgtgagttgttaatattaggggaaggtgagtgaaaaatatatgtgaatcctctgcattgtttttgcaacttttctgtaagtckaaaatcatttcaaaatgaaaagttaaaagaaaaaagtttaaaatgatctgtctctgcatattcaaggattctcaatcattttcatctttttggagatcaaccaactctttgatgaaaagtaggtaccttcagccaactctttgatgaaaagttatgtaccatctgtcctaaagagcctcaagtccacttcatagtttggatgtttgtaccccaaaccttatgttgaaatttgatccccatgttggaagtggtgcctcacaggaagtgtctgggtcatgagggcagatcctcatgaatagattcatgctctgagtaagttctcactctattagctcccttgagagttcccccattagctggttgttaaaagaacctggcacctcctctgtctctcttgcttcctctctcaccgtgtgatctctacacaccactctccttcacctcccgccaagagcagaagcagcctgaggcctccccagaagcagatgttggcaccaggcttcttgtacagcctgcagaaccatgagccaaataaccctcttttctttataaattactcaacttcaggcattcctttatagcaacactaaatggactaagacatccactgttgccatttcatcagttcacagacccacgtggagcccatctgtgggcctcagtgaagaaccctagctccagggtccacagctcaggactcaggtgtgagaggaagtagcatccaacagttgatctgatgaggaacacctagttcccacttcagctaaggaaggagaccacccttcatattgtcttatgcccaatttctgcctccaaagaaaaaagcagtgaaaactaaaaggcagaaatgaaatccacaggcagacagcccagtgccacaccctgggcctcatagttaaagatcgacccctgacctaatcgggttatattatctatagattacagacattgtatggaaaagcactgtgaaaatccctgttctgttatgttccgttctaattaccagtgcatgcagcccccagtcatgtaccccctgttgctcaatcgatcatgaccctctcacgcggacccccttagagttgtaagcccttaagagggacaggaattgctcactaggggagctcagtttttgagacgtgagtcttgccgatgcttcctgctgaataaagccctgccttctttaactcggtgtctgaggggttttgtctgcagctcatcctgctacacagccacattcatgtctccagcctctggccacgtgggagaccttcctacaaaatgggagacaggaatgcaggacttcatgctcctccatgacatttcctcaaaaggttcattatgaaagcacagcaatcacgtgcacaatacagggcacatagtctttgtgagctgaggagcaccataaatacatcctaaaggggtcctgactgcagccccactaagtgacaccaaacagggtaatcagatctgggtatcagagcctctgcaggaaatgttggcttagcccacagtgctgaaaacaaatgcaawtttgtactaggtgtgggtcatctgctccaccccacactttccctcccactttctggcttataaacaattccatcaagaggttaaagaagggcacagctggctaaatggtagaaatgaaaggcaagacccaaaatctgcctgaagcttgcagagatagcttccatcagtatgatttttatatgaatagttgtgggagttatgaggggacaagagtaacgatgcacacactaggctcatgaaggccaaagtcttcatatcctgagtttataaatcaggtgctagtgaaatcaaacacaagacacatttgctcaaaaggacaaaggcggcttcagagaaaaggaatggtttgtccaaggagaatccacgatcacttccagccctgagaaatggctagcacatcaggaaatgcttggacagctctagcccaggttcaacaacctttccaaagaatcacactaaagcacagatccctttatcctgggggtccagctgcccaagcttggccaccaagacagagggatctgcaagaaagctgactttctccaagcactgctccataatggacagagtgagaggagagtgtggagtggacagaaggctcgcacagtgcagtgagtgtgcagagcactgaggaaggaggaacacagccagtggggactgaagaggcctgcatttctgacagggactggagtagacacagatggtaagcacgatggaaagtgttctgatcaaccccctaccccaggagggtgggctctcattctaccactctagacccaggtgcagtcatgcgccgcattataacctttcagtcaacgactggccatatatacaacggtggtcccagaagattataccaccatatttttactatagcatttctatgtttagatacacaaatacttgccattgtgttacaattgcatgcagtattcagtacagttrctagcatgtgactgtactgaatagagtctaaaccactgagccttacactgagtcttacactgagtgtgtaatgggaggtaccatctaggtttgtgtaagtacattctacgatgttcaaagatgaaattgcctaacgatgcatttctcagaaggtgtccccatcactaagcaccaaatgactgtatttgttcagaactatggcagcaagtgaagrcttcagcttccctagaccttcacagtctcatggaaacttctagggcagccaatcctttcaaaggaactaaaagtcctttcaaagccaataattyacttcagcaacctggaccctaaggctttcattccacaattaggatacaattatctgattatttttccccaaagaaaaaattctagaaggaatatgtgcatttttaggacttttggtatgcactgccaaatgtcctatcagagcagtcatctcaatttacacacggacagacatgtccacttccccagtctcctttgcaatctttgccatttagtacttgggaagtaattttcatttgtttcaattggaaattttataaaatgaataatgaatgtattttcctttcatttgtgtgtgtgtgagttgctgtcctttgccacatttctagtgaactgtctttttcttattgatttgtatggtgtctttaagtatgacgattgctaatattttcccagcttgtcacatgttaacttcatttagtggtactttggccacacagaagtgctggatttaaatcttcttccttattgtttctgcctttgttacattggttaagaaagccttccctggcagagcttgcagtgagccgagatagcgccactgcactccagcctgggcgactgagtgagactccatctcaaaaaaaaaacaaaaatgaaagccttccctatgacaagattataagaagattaatccatgtgttcttctgggcctttgtggctctgtgtttcccattttacattaatccatctggaggttctcttggcatgggagttaggtaaacattcaactccccgaccccaccaatgtctagcccttgtcataacaccatttattgaattatctgtccttcccctaatattttgaaatgcctgcaaagtgaggaaattgttctttggtaatttttcaaatctacactgcggatgatttccctttcaccctcaccccacaccctcccttttgttgagtatttgccttaagatgcaggtggtgggtgaggatgtgccccattttgcagctgggcagtctgtctatggaggctggggtcacatcaaccccaatcctaacagctttctcccctgctttgggcccttcaatgtgtccactttcctgagacgccttaagggaatttatgcagatctataaaagtgmcgatggtcccccctcacagccaccttttcccaccaatgctttgtcatgtaccttcacggcaggatctgaaacttgtcctagtgtccacagccggtcttgaccttaacagaacctatgtacccttgtgtgaagcagaggccgcagccttaggactctgagccttggcctttgctgtgtgccgccctccacccctttctcagacttgggaggagtgaggagaggagccacctggggcagttcaggaatggggagcttcaggacagtttgcaccacacactctgggacttagctgtgcaacaccccgacccccatgtgaggaaggtggtgtttgtttgctccaccagactgtcagctcctccctaggagcacggagtgtgtcttgctcacattcgtatccccagtgtcagcacttaaaatggattcaacggataaatgttgaatgaaattcagaaatgatgtgcaatagtaaaagctaacatttaggaatcaacttattacttacacgacacctttgcatattgagtgaaattaagttgtttgatttaacaaatctgtggctttggggtagagaacaagaacatagcaagaggaagcattctttattagtccttcacgaaagaggatggacagacacatctacggagaggggctccagaggcagggacccagagatacacccggccaggcagaacagctccaggatgtggccccgatcctggaaaagtgcgtttaaaagaggcttaaggcatatcagacagcctggccaacatggtaaaaccttcatctctactaaaaatacaaaaaaattagccaggcatggtggcacagacctgtagtcccagctacttgggaggctggggcaggagaatcacttgagcccagaaggcggaggttgcagtgaggcgacaccgtgccactgcactcmagcctgggagacagagtgaaggaaaaaaaaaaaacaggcattattagagaggctttatctcctacgtgttcaaaagcaaccatgctcctcccagtatctcaggacgactggactgcctgtgttcctgttgctcttcacagaagctccatgaaagcgggcttcgcttttgttcatgcagccagaggctcaacacatgacctcgaagccgccaaggctttatcaaacggatttctcccaaaaacttcgtttccttccgcgacgccctgcaagaaccctgtattcctgagtccctggctcagcgtctgctaccccgatgctgtcaatcagatcctgctaatctgagcggccgtggctccgtcccggctccgcgtccgctgacaggtcaccgctgtgagtctccggattaccagtccaaacgggacggcttgaggtccccgcgccctagggacctgcggggcccgagcgcagggcgcgccagagaactacatttcccacagagctcttgggaagccggggccgccgagacccacggcccggcgggcgggctcgcggggagactcctgggagttgtagtccattccgccggcgccggcgctggcgctgctgcgggctcggcgccggcctttgtctgcgggcacgcgccgctgcggtgagtgaggccgctggccgggtcagagcgccggggcaaggcggggctgcgccatcagaccgctgtcccgggccctccgtgtggccgccttatgccagcggccgccaaggaaatgagcaggcctggccggcccgggccccgagggaggccagccgcgagcggagaggtcggcggtccgcagagcagggtcccgtggaccggagagcgggatgccgaggttcaggacgcagggcgggcccggtgcccggggcccggggcctgaggcgggagggcagcgtctgcggagaggagcagggcccatggcgtcggggcgtgggagggggaggccgcggcaggctcacccggcctccgtgcgggcttcagcgagtgcgggaagccggtgccggccttccggggtgggaggagaggcagcccctgcgggggagagtaggaagccaggcagcgtgtgggaaaccacgctacccacaagctcctaaacctgaaactggccccaggacattttccagaccgccaagtgtacccctcttctcatccgccctccagaggacgccggattttagatcttaagtctggtggtctcgtctgatactcctcttgtttggttctttccttctcattgtcctacctgataggacagtgttagtaacctgtttaataagtggggaagcagagtcagggctgctgggttactcgcccaagatcatatcctgggggagccacggcaagaagccaagactcacggactacttctaagctttttccaaaggatatagtagyctttctaataggaaaatcaatgtttttaattataaagccacttttacaaaatcttggggaaactgcttcctcagacctgtgatctagggagaaaaatatgacaatttctcccttactaatcacggaggtccctgataggcggcggagttgtaacttgaagacctcacagcaggtggagaggcagagctgtgaattctactctaatttctggaatccccggcgacagagtccaaccccaggcagcaggcgccatgtaccccagggacttttaatgtgtgtgcagctgttgagcaagaataccttgaacttccaaatgatktgctggcatgctggtagggaattcctttgcagcttgtgttccaagttggaagtgagtcctccaaataaaaatttaaatgattctcctggtcatcacagcatgtagcagaatgtgcagttgtcaagaagaaccaggtgcttaggttgacaaaacaaagaatggtagcatcatactattatttcattaaatcagaaggccagcattttgataggacaaattagagggaaacaaggagtatgcattgaaccactgcatttcttaaaagtrtaagaattcagtaattaggatcctgaagtaagaagaaatatttttttwaaaaaatagatcatgtgggccaggtgtagtagctcatgcctacatgtcttgggaggccgaggcaggagggtcacttcaggccaagagttggagaccagcctgggcaggataatgagacccgatctctacaaaaaaaagttaaaataatttttaaaaattagccaggcttggtggtgcttacctgtagtcctagttatttgggaggctgaagtgggaggatccgttgagtccaggagwtcaaagtcacagcaagctataattgagtcactgtactccagcctgggcaacagagcaaaatcttgactcagaattttaaaaaaattaaaaaataatttagagcacatacaagaggattcctaggatctgaaagagyacttcaatctggtcaaactctcttcctttctgttcaattttataagcattctgaccagctctttagtgattaggaactagacaactgtctaatgtaagagcatacattttggatccagaaagtcttggatttgaacctttgctccactttgactccttattttctgtgggtttytgggcaagttacttaacctagttggagtgccttgggcttggagtccagagtaggtctttcttttccaagaattgacaagtgtttacacttggtcagaactggtattcttgtatcttcaagagcaagagaaaggcgagtctgggtctggagcctcctaagaattgttcagtggtaacaaatggactctcttgttaagtctttgtaactacagataactggagagctgattggctccaaccaatcatgaaggctgaaatgttgttttcttagattctgaattcctctggggcttggagggaagaaartagtaggtggttaggtggggaaccaaaatggaagrtcccaattacatgccaagaccaaagtgtaaacaggagtgactrttaacttgggattggcaggaagagatatatgtttatgtgttctctgctttcccacatcctgcttcctcctagactcatttgtgtgtggtcctggtacctttgggcccattttgcagtgatattttagtaactgacattatgtcaaacaatctaggtttcttacattcacttatgtctcaacaactgttgactttttccttctcacatatcaattattctgccctttcctgtttgtttctgtttgtttttctccctcaggtgctcaggaacagcccatggaagaatcatatgaagaggtggtgactgaggtcgtaagcaggagtggacatgtttggatttccaacagctaccctgctggactgtcatggaagatatgcccagaatgtagcgttcttcagtgagtgagtcagttgatggctggatgcgctcagctcacagatattcagtgtccctgttctcagcactggtcggcagtctgaggaagcagaggagaccttgctttggtagagcttgctgttcctagggttataagaaaagcctgtgagctggagttagaagtaatagtagaaacagagcaagagaaccatcttgatatggaggtagcgttgaagtagtctctgagaatgaatgagcagcttaaatctcagcactgtctctgaataaggcaagggaacaaggagaagattaccctggagtgacagacaccaagaaaactgttaatggtgatgaatggacccatatttaaagtgcaccaggaggctcagatgcagggcagtattcggaaaaaaaaaagtcaatatctgcatagagaataacttccaaaccaaaattgatttcagttttgccatagcttagtagactgaaaatagcaaggattttaatgggaaaaattccttggatcagattctataattgccatggctagatctgcagtatcagacaggttatttaacttccttaagctccaggttcgtctgtaaaataggacaataagttctatcttgtagggttgcagggattagcaatgatagatgtaaagtacccaggattgtgctacatattttctgaggtcatggtgcttattctattgtcagaacagattggacagaggtggatttctgaagaagcaaatgcagcttcagttttaggacccctcacttggattggtctctccaagaccctgtgcttaattttatacattttcttaaaagggtgcctctaaaatgggaaagttttaggccttatatagcctggatccacacctgttttggagtcagataaaagttgggtatggggctctgtgtgattctgtatagttttctaaattttctgagcctgttttctgacctgtaaaatagagaaaaccatgtctatcttacaaggttatttgttggcctaaattaaatttagaggcagtacactgctatggagaatgcctatttgagtcagctctaacttacctagctctgtgacctttgacaggctccctttgctcccattatctgtatcactctcatggcattgttttcaggattgcattgtctatgcaaagaataaggcctggcacatcataagcactcaaagtattatgtttctttttccctattctaactcagcattattggtgcttcttatatgacttccctctcattttatcagatgtgatgactgaagcccaccacaaatatgaccactctgaggctacaggatcctcaagctgggatatccaaaattctttcagaagagagaagctggaacaaaaatccccagattcgaagacactacaggaagattcacctggagtgagacaaagggtctatgagtgccaggagtgtggaaaatccttccggcaaaaaggtagtctaacgttacatgagagaatccacactggtcaaaagccttttgagtgcacccactgtggaaaaagcttcagggccaaaggcaatcttgttacacatcaacggatacacacgggagagaagccttatcagtgcaaggagtgtgggaaaagcttcagtcaacgaggtagtctcgctgtccacgagagactccacactggacagaaaccctacgagtgtgctatttgtcagagaagcttcaggaatcagagtaaccttgctgttcacaggagagttcacagtggtgagaagccctatagatgtgatcagtgtggaaaagccttcagtcagaaaggaagcttaattgttcacatcagagtccacacaggcctgaagccctatgcctgtacccagtgcaggaagagtttccacaccagggggaattgtattctgcatggcaaaatccacacaggagagacaccctatctgtgcggccagtgtggaaaaagcttcacccagagagggagtctggctgtgmaccagcgaagctgctcacagaggctcaccctttgaccactttcctgaagagaagttctctttatgaattaagagtacaaaatcctctgagatgaagcaacctatccagttctatggaatgaatggagaatctttcagaaagaccatcattgggtagggcaaactgatttttttcctttcccccaaaagagtatgaaaaataaatgtcttgtttattatcattatcatgtatgttttataatttctgtcactttattctgacctgatttttcaaggtacccccattaatctggtgccacactagagattgttctgtgtatacccaatacagattttaaatttgtagttgacaccatcaggcttttataaatgtaaaaaatcagcccctcatcaatcccaagttatttttcttccttacatattcaaattaatcttgttttgccttcaaaaccactgggcaaaatccatggggcaaatctagttacctttataatcttcttgttgaacatttcattacctggatgatacccccaataacctattgtaactaatcactcatgtctatagcaaggggcctagccttttattacaaaagaaaatttctttccaagcctgcacagccttagtttgtgcattgagacatacttcagtcctccactcctaactaggatagagataattcacctgtaaccaaagagcaaacaactactgtctgtgcaatttttaaaaatctttaacccatttctccccatctactaaagggactcctacattttcagagaccttcactccctctttggtaacagcagcaatatcttggggttgggttatctagaaaggatrtaagtgttattactgaacccagacttgtagtttgtagtcaataatgaacttccactttccaacaatactatcctcttcctcctgcacacacaccaagaaatttggaattctaacccatccttttttctgacctccaggggatgagatttgaagaaggctgcagaggagaaattggttttgaggggaaatttccatttccattttttaaaatcttagccatctctataatttttcatactgagcatttatgtaagtgaaatgatgaatgatagagattttggttttcttggtaagacaccattccatcctttctagtggatcctataaatcagtggtccccaacctttttggcaccagggaccagtttcataaagacaattttcccacagagggggatgrttttgggatgatccaagcacattacatttattgtgcactttattattattacattgaagtatataatgaaacaattataaggtactcaccataaggtagaatcagtgggagtcctgagcttgttttcctgctactagacagtcccatctaggggtgatgggagacagtgacagatcataaggcattaaattctcataaggagtgcacaacctagatccgttgcatgcacagttcacaatggggttcacactcttatgagaatctaatgctgccactatctgacaggaggcagagctcaggtagtaatgtgagcagcaggcagcagctgtaaatacagatgaagcttcgcttgctctcccaccactcacctcctgctgtgtgccccagttcctaacaggccacagactggtactgatccatggcccagggttgggaaccccctgctataaattattgcttccttaatcccaaaaagcttgtaatagtaaatctttaccatgtagagaggtaaatttcaaaggtctttgagcactgaaacaatttggaaacactggattctaataatacaaaaatattccaaagataccacaataacatttgaagctgtatacaagaatgttcatgtcatcttcatttataatagccacacacttagaaatgtccaacaatgggtgagggataaagaaactgtagtatatccatacagtgaaatacaactcagcaataaaaaagaacatacacgtggtacatcaacaatatggatgaatctgaaagttttatttgagttgaagaagccaaatacacaaatagtataattccacttatgtgccttcacagaacaggaaaaactatgtgtgaggattgacttgaaaggcacgcaagggaagtttacagagtgaaaacaatgttctgtacctgacatcaggcagttgatgcaggggtctaaacaattaccaaaattcattgaactcgatgcttaagatccgtgcattttattayatgtaagatatacttcagtaaccatgaaacagtataaatgtattgcccacaagctctttgacactcatcccatgaagagatggggggtatgtcaccaccacttgaatctggacacgcttgtgactgcttcaaacaatagaacacaacagaaatgatactacaccaagtatagttctgaaaagcctctaaaaggtctgaaaaatttctgcctggttctcttgagacacttcctctcaggtgaaaccagcccatgtaaaaagtccagttatcctgaaatcactgtcayggacaagctgcatataaatgctccagccaacagtttcagctgagctcccaacagcctgccagccatgtgtgagggtcattgtaggtttccggcccagtagaaccttcacatgactgcagccccatctgacatctggccaaaactgcatgacagactccaaagtgagactgcctcacctaatccctgacaaaatcatgagaaaaatgaaacattatggttggataccactaaattttcaggtaatttgttatgcagcaataatagaataacttaagtactttttaaggataagccattgtaaaatttatatataggaaaaatctgaggccaggcacgatggctcacgcctgtaatcccagcactttgggaggccaaggtgggtggatcacctgaggtcgggagttcaagaccagcctgaccaacatggagaaactctgtctctattaaagatacaaaattagccaggcatggtggcgcatgcctataatcccagctacttgggaggctgaggcagaagagtcacttgaacycaggacgcagatgtyacagtgagctgagattgcaccactgcactccagcctgggcaacaagaacaaaaactctgtctcaaagaaaaaaaaaaaaaagaaaaagaaaaacctggggaagcaacttgatattacctcactggctaaatcaaaataggaaattatggtttatgattcatcagaaagcttaaggtttaaaaataaacattctctttgacaaaataagaggcatggtataggttagttaactgagatctaatccaagttataaaatgaagaagtagatgctggactccagcagtactgcactataagaaatgtaaaaatatatgcctatatgtatacttatactttcagaacctcaaatatatatatgtgtatatatagatagatatagagaaagagctatatagatatatataatcttaaaagcatagttctgcaaaaaggaatgagtaaataataaagagtaaagaggtcagaaaatatatcattggccattggtgatcaactaaacctttagaccctctcccctccctgtggtaggggggtgctgaaagttccagtcccctaatcctactttggtctttatggtgaccagccccatcctgaagctaccttggggcctctggccatagtcatctcattagcataaaaaagacactcttatcactcaggagattccaagagagttagaagctgatatgtcaggaaatggagacgaaaaccaaatatataggccagggtacggtggtttatgtctgtaatcccagcactttgggaggctgacgtgggtggatcacttgagatcaggagttcgaggccagtctagccaacatggtgaaaccccatctctactaaagatacaaaaattagacaggagtggtggtggacacctgtaatcccagctacttgggactctgagacaggagaaccacttgaatccaggagatggaggctgcagtgagccaagattgtgccactgcactccagcctgggtgacagaatgagactctgtctcaaaaaaatawattaaaattaaaattaaaaaatatatatataatgcaatatcacaggtcccaaatacataaagcaaaaattgagagaacaaaggaaatatagacaccaccaaaatcccatagttagagatgttgacaccccctctctcaacagctggtaaaattagggaaaaaaaaacagtaaggatatggaagatttgaatagcactatcaaccaacttgatgccattggtatttgtgggacactacacacatcaaaagtagcatacacattcctttcaagtgcacatgaaaccttcaccaaaacagaccatatgctgggccacaaaacaagtctcaataaatttaaaacatytgaattatacagagtatattctttggccactacagcattaaattagtaatcaataataataaaatatctagaaaattcccccaattgtttggaaattaaactatacacttctaaatcacttatagttcaaagaataagtcacaaagaaaattggaaaatattttgaactgaatgataatacatgtcaaaatctgagggctgcagttaaagcagctctttagggaattgtgtagctttaaaatgcctggattagaaaagaaaaaacataaaatcactatctgttacccacttgagaagctagaaaaagagttaatcaaaaccaaagtaagaagatatttgttcataatagagtagatcaatgaaactgaatatcagcaaaccagaagttagctctttgaaaaggttaataaaactgataaactcataccaaggctaatcaaaaaaaaacacaaattacaaatatcagtaataaaagaaaggacatcacaacaaattacaaagatattaaaggaataatgaaagcatactgtgaacaatgttatgtcgataagttcaacaacaaaaatgaagtttacaaagtctttaaaagacacaacttgccaaaatgacacaagaagaaacagaaaatcagccgggtgcagtgggtcacacctgtaatcctagcactttgagagaccaagacaggaagatcaccctgaggccaggcatttaaaattagcctgggcaacatactgagaccctgtctccaccaaaaaaaaaaaaaaaaaaaaaaargaaaagaaaagaaatagaaaatccaatatccctatatctaataaagaatttcaaataccttcacacaaagaaaactgcaggccaaatggcttcactgataaaacgtaaaacataaaaaaaaagtattcctacacattttttcagaaaatgaaagagaatatgcaccaagtcattgtataaaatcagtattactttgactctagaaccaaagatatcataagaaaagaaaattatacatcagcatccctcatgaacatagacacaaaaatacttaatattttagcaaatctaatcaaacaatacataaaatacataatacatcatgataaagtgtagtttrtaaaattaatgtgcctttgcaagtctaaaatttttccccatcacagcaccatattatatgcccaagtaaagacccaaatctgtttcatctacctagaatgtcgataattaagaaaatgtatatatgtaggggtgtgtgtgtgtgtgtgtgtgtgtgtgtgtgtgkctgtagagctgatcttcattattcatacattccattcttacaaatatacctacttgctaagttttatttgtaaccctcgaatcaatttactgtgcttttgtggtcagtcattcacagacatgcagaggacagtgagaaattcgagtcatgcaacatgcacattcccagctaagatcaaacaaagtattattctgtcttcttgtttcaattctcacattataagcaagtggccttttcacaatatatttagtgctatgtttttcacaggtttgtgctttttgttgatgattttgctgtttaaaatgacttcaaatgtagtgctgaagtgctctctgctgttcctaagctgtgatgtgccttgtgaagggagaaaacacatgtgttacataagctttgttcagggatgagttatattcctcttggcaatgagtttaaagtaaatgaatcaacaatatatattgaattaggtttctttaaacaaacatacataaaacaaggttatatgttgatcagattattaaaatattgtgactagaagcttgtaggaacctaaccctgtatttctcctaggaacaatggttccatatttgctaatcaatgttcacagagactttacagaacataactactgtgaataatgagaatcaactatrtatgtatacataatacatacatctgtatatatatatatgtatctatatatgtatatataatacatatatctgtataaatgtgcatatatttgtataatatgtataacacataaaatatacttaaaacaaatcataaaatatcaaaatgttaaattaaaattttaggctaaagttcctaatgtatgggtacattaagaatgagtaaacatattccactgaagtgcagaattttgctctggtaaaatgagaatctaacttcccactgactttcattgtaaaatatcaatgtgtctgtaaggtgggactgacccccatacaataaaaatcatacaccagaaaaccagaaatatttgatattagtatgtagaaaaatgatttttaaatgggaactaacatttttgaaatgtttaggctttgctagatgctgagctaagctttatatccttggctctcacagcaaacttgggtaagtgctaattataattcaggaaactaaagtctagaggggttaaaaaactacacaaggtcatgcaggtggtgaataaaaaagaatcaaatggaaattttagaactgaaaaataaatttaaaactcactagatggctcaatagcagcaagaatatggtagagcaaggaatcaataaatttgaaaatagaataatagaaattacccaatctgaatgagagagaaaatagactaaaaagaaatgaacagattatcagggacctgtgagacaataacaaaagagataacattggtatcactgttattttagaagagaaaataaagtaaggctgagaaagtacttgaaaaaaataatggctgaaaattgcccaaatttggtgaaagccacaaacttccagattcaagaagcagagcaaactttaaacatgataaacccaaagaaacacacagcaagacacatcgtaatcaaacttcgttaaatcaatcatgatgaaaaaatcttgaaagcagctagagagaaacaaaacataatctatagcgaatgaatgatttgagtaacaatggatatgccactagaaattacaggggccagaaggagttggcacacatttttcagggagaagaactctcaacccaaaattttatatcagtgaaaatatatcattcaagaacaaaggggaaggaaggactcctccctaactcattctatgaggccagcatcattctgatgccaaaacctggcagagacacaacaaaaaaagaaaacgtcaggccaacatccttgaagaacatcaatgcaaaaatcctcaacaaaataggctttatctctgggatgcaagtttggttggtccaacatatgcaaatcaataaatgtaattcatcacatcaacagaactaaagacaaaaaccacatgatcatctatagtatatgcagaaaaggcttttgataaaatgcaacatcccttcatgttaaaaattctcaataacctaggtatggaaggaacatacctcaaaataataagagccacctatgacaagcccacagcctgaatggggaaaagctggaagcagcattccccttgaaaactggcacaagacaaggatgccccctctcaccactcctattcaacataatattgaaagtcctggccagagcaatcagacaagagaaagaaataaaaggcatccaaataggaagagaggaagtcaaagtctccctgtttgctgatgataagaacctatatctagaaaaccccatagtctcagcctaaaagctccttaagctgataaacaacttcagcaaagtctcaggatacaaaatcaatatgcaaaaatcgctaacattcctttacaccaacaacagtcaagctgagggccaaatcaggaatgcagtcccattcacaattgccaaaaaataaaataaaatacctaggaatacagctaaccagggaggtgaaagatctttctctacaagaagagctataaaacactgttcaaagaaatcagagatgacacaaacaaatggaaaaatattccatgctcatgaataggaaaactcaatatcattaaaatggccatattgcccaaagcaatttacagattcaatgctattcctattaaactaccattgacattcttcacagaactagaaaaaactattttaaaattcatatagaaccaaaaaagagcctgaagagccaaggcaatcctaagcaaaaagaacaaagctggaggcatcatgctacctaacttcaaactatattacagggctacagtaaccaaaacagcacggtactggtacaaaaacagagagaccaatagaacagaatagagaagccagaaataaggccacccacctacaactatccaatcttcaacaaacctgatgaaaacaagcaatgaggaaaggattctctattcaataaatagtgctgggataactggctagccatatgcagaagattgaatctgaaactcttccttacacaatatacaaaaattaactcaagatggattaaagacttaaatgtaaaacccgaagctataataaccctggaagacaacctaggcaataccattctggacatagaaatgagcaaagatttcatgataaagacaccaaaagcaattgcagaaaaagcaaaaattgacaaatggcatctaattaaactaaagagcttctgtacagcaaaggaaactatcaatagagtgaacagacagcctatagaatgggaaaaaatttttgcaaactatgcacctgacaaaggtctaatacccagcatctatcaggaacttaaacaaatttacaagagaaaaacaaacaacccattaaaaagtgggcaaacagatggggcacagtggctcacgtctttaatcccagcgctttgggaggctgaggcagayggatcacttgaggtaaggagttcaagactaacctggccatccctcctaaaaatacaaaaattagccaggcatggtggcatgcacctgtaatcccagctactcaggaggctgaggcaggagaatcacttgaacctgggaagcagaggttgcagtgagccaagctaatgccactgcactgccagggcaatagagcgaggctctgtctcaaaaaaaagaaaaagaaaaagtggacaatggacatgaacagacacttttcaaaagaagacatacatggggccaacaatcacactttttaaaaactcaacatcactgatcattagagaaatgcaaatcaaaaccacaatgagataccatctcatgccaatcagaatggctatcactaaaaagtcaaagcgtaacagatgctagtgaaggtgtagatagaaaaaaggaatgcttttactctgttgttgggagtgtaaattatttcaaacattgtggaagacaatatggtgattcctcaaagacctataaacggaaataccatttgacccagcaattaaattactaggtatacatccaaaggaatataagtcattccattataaagacacatgcacacatgtgttcactgcagcactactcacaatagtaaagacatagactcaacctaaatgttcatcagtgatagactggataaagaaaatgtggtacatatacaccatggaatactatgcagccataaaaaagaatgagatcacatcctttgcaggaacatggatggagctggagaccattatccttagcaaactaatgcaggaacagaaaaccaaatgctgcatgttctcacttataagtgggagctaaatgatgagaacacatggacacatagaggagaacaacacacattggggcctattggaggttgggagcagggagaggatcaggaaaaactgctaatgggtactaggcttaatacttgagtgatgaaataatctgtacaacaaatccccatcacactagtttaccttcataacaaaccggcacatgtacccggaacttaaaagttaatttttttaagtatgaaaaggaacatgaaggggaaatcaatcatttctttcagatgaaagaaaaccaacagaatttgtcaacagcagaccatccctaaattaatggctaaaaaagttcttcgagcagaaaaaatgataaaacaaggaaacttgaagcatgagaaaataagaaataaaaacagaaagaggccaggtccggtggctcatgcctgtaatcccaccactttgggaggccgagctgggtggatcacctgaggtcaggagttcgagaccagcctggcaaaaatggtgaaaccccgtctctactaaaaatacaaaaattagccaggtgtggtggtgtgtgcctgtaatcccagctactcgggaggctgagataggagaatcgcttgaacccaggaggcagaggctacagtgagctgagatcacgccactgcactccagcctgggcaacagagcaagactctatctcaaaaaaaaattagcctggcatggtggcagacgcctgtaatcccagctactcgggaggctgaggcaggagaatcacttgaacttggaaggcaaaggttgcagtgagccaagatcgcaccactgtactccagcctgggcaacagagtgagattgtctcaaaaaacaaaacaaacaaacaaaaaacagaaagagtagaaatatgggtagatataatagattatccttctcttaagttttctaagctatgttaggcttctgaagcaataactataacactgatgtggttctcaatgtgtgcagaggaaacattcagagcaatttcactataaaaagagtgaggaagggagcttggaggtacacatatggtttatttccttaacaggatcaaaccacacataatgatctacatcaggcgggtctagtcttttggcttccctgggccacattggaagaagaattgtcttgagccacacataaaatacgctaacattaacaatagctaaagagctttaaaaaaaatcgccaaaaaaaatctcataatgttttaagaaagtttacgaatttgtgttgggccgcattcaaagctatctgggccgtatgcggccatgggccatgggttggacaagcttgatctacacatttactttttcccctgaaaatattctgattttctacattacttcatctagatctgcctggattgttaattgacaattatgagctgtatgtcaggaaatgaggacaaagattaaatatatatatttcacaatatcacaggttatatttcatttacaagtttctctgttgatttattagcttagaagtgtttactatcacaaacgatgccgcagggaacatctttatgcatatcttttcatgtaactgtgaacagttaaacataaaatacattcgtagaagtagaattgctagattaagttatatayactttaatggttgttgttgttgttgttttgagacagggtctcactctgtcgcccaggctggagtgtagtgatatgatcacagctcactgcagcctcaacctcccaggctcaagcgatcctctcacctcagccttccaactacctgggaccccaggcatgcaccaccacacccagctatttttctattttttgtagagacagggtctccctatgttgcccaagctggtctcgaactcctggacttaagccatcctcccacctcggcctcccaaagtgctgggattgcaggtgtgtgccaccgtgcctggccctttaattgtttcatattaaaattttttttatttaaaaaattatttccagagctccttaggtttgaacgtgtggattaaacattaacagactttttttaaacaaactatccaacctcataatcaaattttcccaggaaataaaaggtggtgacaagtaaactccagaagagaaccactggatctcctctgccacagggtggaaattttagcttaaaccagccagggagcactgttcctgagagttcttaggggttagggtcacagatagaaacagagaattcagaaagggagggaaataaacacaaggtgggacaaaattcagaagcagcggctgcgactgttcagcactgtgaatatgacttccatcaaccccaaagaggctctgagaccaaacacaaactgggccggcgcttttgctaaagtccataaacatcaacacgcaatttactccactgttccgtagtttacatgtgttgtgttatatatgtttgtgtatacaaaatattaaatatattattaaatataatgtttaaaaggtgaactgttaaaagcaaggattacatagtgtttatcttctggaggggtgctcataattttcttttttttacaatccagaggtcttctattttattttttttaacaccrattatgccatgaatcaatccatagggaagaggttccagcagctcaagctccttcccatttgttctcacacagtgcgcttctctgggcagagcagactggcacttctgctgaatccaggtacctttctctttggcttccttctttttctgatcattttccttcacaagtttcaggaagctagctcagctctcagagcgcttaaagtgctcaatacccacatgaattctcttggcaagaacttgcccttaacttgtgtgtttacaacaatgccgacggcctgctgsgtaacactgtagactcttccagttctgccatgataacacttgtggggcattccttcttgaacagtgcccactcctttaatgtctacaatatcatctttcttatagattcacatatacgtgaccaaagggaacaactccatgcttcctaaaaggcctagaagacatctaccaggagcctctcctctttccctttgtgtttgtcattttgtcgaattactggaagacggtggttctggccaaaagggccataataaacttttattttcttgtttctgtgtttttctataataaacatacattatttttataaccaaaaatgaccaacaacatacattaattttctctttaataaactttatctgattttcccattaaagctaaacatgctccttaccacttccaaagaaaaagttatacttaaaaaagccaataatctccctactccaaaatcccaagtgttacatcattccaaataacatcactccaaagttacacacacacacacacacacacacacacacaccacagtatactggtcgtgtgtatttctatatactatttgatatatatacttacacaaaccatggaatttgaacatattttcttatttcattctttttaaacaaaaaaggaccactctatacacatcgtttggaagtttagtttttcttttttcattaataaacgtatctatctttacattctagtaacatattactgcaaacttagcaggttgaaaaacacaaatacattatctcacaattttgcgtggttctgaagttaaggaggggccaagctgggaactctgctcagggtctcaccagcctgaaatcaggttgccagccaagccgtgtccatctggtcttaactagagaagatccctccttagcccattcagatggtggcacaatgcatttcccgatggctgtagtactaagggtcccagcttcttactattagctgaagtttgccctgaggtcctgcaggccacttaaacttctctgccaccacatggcagtttgcctcttcaagtccaacagaagagaatttatcttccaagtctgctaagagtctgcttatcttccaagtctgctgagagtctccagagtcttatataacataaccaccataggagtggcatcccatcacctctgccatattctatcagaggcaagtctctggttattcccacaaagggagaggttacacaagggcgtgacccattgaaggtaactttagtgtgttacttttctaaggattctataataaagtacaacaaaccaggtggcttaaataacagaaatttattatctggcagttctggaggctagaagtccaaaatcgaggccgtgctccctctgaaactgtagcgagagcccctccttgcctgtccctagctctggtggtttgctgtcaacccttggcgctcttggcttgcagctgcaggacttcactttccgcctgtgccatcacatggccttctcccatgtgtctgtgtctctacatttctccacctcttatatggacaccagtcacattggattaaaggcccaccctatgccactatgatgtcatcctaactaattacatctgcaaagatcctatttccaagcaggacatggtctgaggtactggcagttaggacttcaacatatctttttggaggacagaattgaacccataacacttggggtgtaycctccacggtatcaaaaacattcttctgcagaaatacatataaatccaacctagtggttcctgaggacatcagcatcacctgggaacttataggaaatgcaaatcctcagggcctatcccagacctactgaccccgaaactgcggagattgcggaaaagggagggagagacagcacactgtgttttaacaagcctacagcccattcttcttaccagctgcacagtttgactctcaaccctaccagactctctaggcagacccaaaactcccttcagggcaataaaagagcaggaagaaaattccaagcagcaggtggcctggattaccctactccttacacagggggttgagacagtgcatgtctgtcctccttttccacgccaagttcctcattgctagggcttccattcaagaatcaatgccacagaaaactagaaaagtcaacaaggatgaataaatacatgatttcttacctaattttgatgtcaagtcacaggaaggagtacagacaagtcaaccatgccaaaaaggccccacayatgcaaactcaaaggaacatcttcatcttcccttttatcatgggcacaggtctctcccaaagtcccttccacaccatccaccaagtccagttcaccagatcacctgtagccctgccctgattttgtttactttacttgcatttggggtcattatgatgtcgttgccatagggtcagggacttagtgacaacagaatgtacaatccagccatgaccaagacttgtgtttctgcagtgctgaatctcaccttactcttagagagcctcattcctttgattaaagaatgcaaatcactctacaattctgcttgttttctaatttctatctcttcccagtaattctggccagcctgcctagtttttcttgattttactgattatactccttttatgttttcaggccactaacctccctagctttgycatagtccgagatggcgactgtaatcaatacatctcattcaacacaagctacagatgtgatggaaaaacttgttttactattaccgtaacctttcaggaagtttcttggggttttgcctatacaaacatctcatataatcctgactatagcctgttgtgaccctgtctctgcttgcttcaaggcaatactctctccctccctcttaactccaacgttgagtctcttgccttaaagccattgtacacattattcctctttgcagcaatcatctatcacctgggtcaccccttgaagattttagttcctgtatcattatcactcactccagctctactgtcatcacacttggagtgcttataaatgactcatcacttttcctccttacttccaatgaacttcctctccagaagaccagagccactcacctccatccatgatcatatttgtaacttctgcattattartccaacaatggtctcaattttaatcatctcattttctgattatcaactcctgtctttgcatctcacttcctctagtgaactaaagccaataaattgtcagctgcatcaataattcatggatcctgctactctcccactactcttcaaccttccttaccagcttacattatatggtccctctttgaatcaatcacctgcttgcaaacaccctcaactcccatatcttgctattatttttaaaaacagttttatcaaggcataattcacatacaataacactcacttattttaggtgtacaattcaattatttttagaaaatgtgcaaagctgaacaactaacattgcaatctatcattagaacatttgcactacaccattaacaaacttcatttccatttgcaatcatccctcattgctaccctctgctccacgggaccataaatctaatatctgtttctatagacttgccttttctggacatttcatataaaaggaattatacaatatatggcttatttcatttagtataatgtttttgaggtccatccatatagtaacatgtatcagtactttattccttttattgttgagtaatatttcattgtgtgaatatagcagatattgtttatccaatcataagttgatggacattttggttgtttccagtttttggctattttgaaaaatgacggctggatgcggtgggtcacgcctgtaatcctagcactttgggaggccgaggcaggtcgatcacctgaggtcaggagttcaagaccagtctggccaaaatgatgaaactctgtctcaaataaaaatacaaaaattagccaggcatgatagtgyatgtttgtaatcccagctactccrgaggctgaggcaggagaatcgcttgaacctgggggcagaggttacagtgagccgagatcgcrccactgcactccagcctgagtgacacagcaagactccatctcaaaaaaaaaagaaagaaagaaagaaaaatgatgctatgaatatttacatataagtttttatgtggacatatattttaattttcttgggtatacctcagagtagaatcactgggtcatatggtaaaactgtatttagcattttaagaaactggaaaactgttgtcaaaatggcattttacatttccaccaacaatgtatgaaggctccagtttcttcacattctcccctgtatttgtccatcctgtgttgctataaagcaagcttgtccaacctgcagcccaacacaaatgcataaactttcttaaaacattataagaattttgcaatttttttttagctcatcagctatcattagcgttagtgtattttatgtggggcccaagacaattcttccaatgtggcccagggaagccaaatgattggacacccctgctaaaaagkaatacacaagtctgggtaatctgtaaagaaaggaggtttatttggctcacaattccgcaggctgtacaagcatggtaccagcatctgctcagcttctggtgaggccttaagaagcttacaatcatggcagaaggtgagggggagccagcacatcacatggtgagaaagagagtggggtggcagtgggggaggtcccaggctcttttaaacaattagatctcaaggtaactcattaccacagggagtgcaccaagccattcatgagggatccactcctatgacccaaatacctcccaccaggccccacctccaacactggagaccacatttcaacatgataattggaaggaacaaatatccaaattataccatccctcaacacttgttagtggatttttattacagacaacactccctggggcataaagcatcagtggcatctcattgtgttttaatttacatttctctaatatctaacgatgttttcatgtgcttattgaactttcttttttttttttttttttttttgagacagagtctcgctctgtcaccaggctggagtgctatggtgcgatctcagctcactgcaacctccacctcctgggttcaagtgattctcctgcctcagcctcccgagtagctgggactaccacacccagctaatttttgtatttttagtagagatggggtttcaccatgttggccaggctggtctcgaactcctgacctcgtgatctgcctgccccagcctcccaaagtgctgggattacaggcatgagccaccacgcccggcctctttttatttatttatttatttatttatttattttagatggaatcttgctctgttgcccaggctggagtacaatggcgccatctcggctcactgcaacctccacctcccaggttcaagcaattctcctgcctcagcctcccaaggaactggaattacaggcgcatgcctatttcaagtaaaactatgatcaaataaatgtgcatgccttttctattaatctgccttttgtcagtgattttcagcaaactttcagagggcaatggggaagttttcccttcgcttttacatcccaaaccaaatttatagttatacctcttatatttaggtcaattatctttcttgatttttatgtatgatgtaaaatgactaaacgtatatttttttacatgaggatatccaattattccagcaccatttgttgaaaaacctatcctttctccacattgaattgccttggcacatctgtcaaaaatccattggtaatgggctcaggtgatcctcccgtctcagcctcccaagtagctgggactacagagatcacttgagcccattaaaaaaaaaatccaatgatggtgggcccggtggctcacacctgtaatcccagcactttgagaggttgacgcaagaggattgcttgagcccaggagttcaagactagcctgatcaacatagggagaccccatttctataaaaatattttaaaattagccagtgttgtgttgcacatctgtagtcccacctactcaggaggctgaggtgggaggatcgtttgagcctgggaggtcgaggctgcagtgagccatgatcttaccactgcattccagcctgggcaatagagtgagagaccctgtctgaaaaaaaaaaatccactgaccaaaaacataagggtttatttctagaatctctattctgtttgatgggtctatatgtctacttttatgctatgaccacagtgtcttgataaatgtagtagctgtaacattgtgaaatacataatatataaatcatttcctagcatacaactcctaaaacccttagaaacaccaaagtgatgtcttattgtatgttaatgcattgacagccccccaggtagcttcaggatggggctgtcaccataaagaccaagggaggattacagggttgggactttcaggcctacctcctctggagagggttgagggactgaaggttatgttgatcaccaatggccagtggtttaaacaatcatggctatgtaatgaagcctccataataacctcaaggacagggttcagagagcttctagatagcaaaacctatggaggttctggagggtggcacactccaggagggcatgaaagctccataccccttcccacatgcctcaccctaggcacctcctcatcactttcctttgtaatatccttaagaataaaccagtaaatttaagtaggtgtttccctgagttctgtgagctgttctagcaaattaattgtgtggtgacagcagttatgtaaatggaacccaaagaggtgattgtgggggccccaacttgaagctggtgggtcagaagttttggtggccagggcttacctccagaatgcctccagatgcacctagcatctgagaggttgtaggcagtcttataggcttgagccctcaacctgtggggtctgacactatctgtcaggaaaaatccccacacatttggtcacagaagtcttctgtgttgattgctgtcgtggtgtgagggcagatggaaaagtttgttttttcccccttagtagttgtatagtacgctctgaaactgggatgaattttgttctttgttctttttcaagattgttttgaccattctcaattcttcttttagtataaattgcagaatcagtttgtcaattgttcagaacaactctgctgcaaatgtgataggtgctgcattgaacctatagatcaatttgaagagttctgcaatcttaaaattttgagcttcaactccattaatgcagagtgtccctgcatttatttagatttttaaaaatttctttctggaatggttgtagttttcagtgtacaagtctcacatttatttcgttaaatttatctcaaatattttattgttgctatggtttgaatttgttcccccaaaatcatgtgttggaaacttattcccaatgcaagtttggggaggtggggcctaatgagagatgataaggccatgtgggtacagtgaatggattaatgctgttggcacggcagtgggtttgttacaaaaggagggaattcaaccccttttactttcactttcactttctctctctcactctcttaccttccaccatgggatgacatagcgagaagttcctcactagatgccagaaacttaatactggacttcccaccttccagaactgtgaactgcagtttatcaatatttttctgcatggattatggtttttgtgttatgtctaagaattctgtacctaacccagatcatgaagattttctcctgtgtttgcttctaaaatttttacaggtttgtgctctactttcagctctataatcctttctgagttaatctatgtgtaaagtgtgaagtattggtcaaagatcatttttaatacatgtctaaatgctccaataccatctgttgaaaagactatgctttctctattgaattgtttttgcacccacgtttaaaattttttaactagtcatatttctgtgggtccattcttgactattttgttccactgatgtgtatttctatacctccaccaataccacagtcttgattactgtatctttagagtcttaaattgtgtaaagtgagtcaaagctttttctagttttgtgaaaacttgttttagctattccagttcctttgccttggataacactttagaatccacttatctacatctacaaaacaatccttccagaattttgactgatattttgttaaatctaaagatcaatttatggagaactgacatcttgactatggtgaatcttcccattcatgaatatgacatgtctctccatttatttaggtcttttattactttcatcagcattttatagttctcagtgtacaggtmctatgcatgttttgatttatacctaaggatttcattattttatgaactattgcaaatgacagtttttaatctcagctttcaattgtacattgctagtgtgtagaaacaatttttgtatgtggccttgggtcctataatcttgctaaactcacttattagttattagattttgttgttgttgttgttgttgttgttttctttttgaaacagtcttgctctgtcacccaagctggagtgcagtggtgcaatctcagcccactgcaacctccaccttctgggttcaagcaattctcctgcctcagcctcccaaatagctgggactacaggcatgcactttaatgcctggctaatttttgtaattttatccagatggggtttcaccatgttgcccaggctggtctgaactcccagccttatgtgatccacctgcctcgggctcccaaagtgctgggattacaggcattgagccaccacgcctggccagggatttgctttttatagcttcctttgtatgttctacatattcaatcatgtcctttgtaaacagagacagttacagtctttcctttacaatctgtatgatttttatttcctttttttgatttattgcactggccaggattgccagtcctatgttaaataagagtagtgacagcagatatcctaaccttgttttcatcttatagggaaaatattcagtctttcaccattaagtatgaggttaactgtaggtttttcatagttggcctctatgtggttgaggaacttcccttctactagcttgccaagagcttgtatcatgaatggatattgtatattgtcaaatgctttttctgcatcagttggtatgatcaggtggtttttcctctttggtctttaatcttctttaatgtagattacattgattgatttccaaacactgaaccagccgtaaccccatttgatcatgattctatattattaattctatatattgctggattttattcgctaatattctattcaagatttttgcttctatgctcataaggaatattggtcagctttcttttattgtcctgtcttgtcccattttgaataaacaccctattcttttaaatgaaaacttcttaaatgaaatacattaccaaaaatcccataattatcattaccattttgaaatattttattcgttttcatatgttaaagtaggtttcctcaataagacaagccagtacccaggctttgttcatggtgtttgacagtgggtaaaaccactggtccctcttgagccttgtgcacacgatatagatgatggtggagcatgttcttttgagatctttaatcaattctgtaagagacctctcatatatatatatgagagaaatttttttattttatatttttatgcagaaattttaattttatattttaaaaaaaatataggtgaaatatatgtatatacatgtgtacatatatatgtgtgcatgtacatatatacatactatacatttttaaaaaaaaacagaaatgagtatcactaacacagcaccagctaacatttaccttgcactttgcatctggtattcagctaagcactttataaaattacctcctttaaacaaaactagttttttttttatytgtacatggtagacaattcaacaggctacataactagccagtggtttcacaaagtatattaagaggtaagctgcatcttgcaccctgactccaaagattatacttcaaagttgctgccataagctttcagatactgtcctgtaacctatttcttcatccaacatatccactttatcctttttaatggttgtatcatattccatgatagatcatattttccaaaattattgcaawaatatattccatcgaatatacttttctggcaatgtgactctgatactcctccaaagaagtatgttctatgttccctcccctttgagtttggacaggcttgactatggagaaagagacactgaattttttgttgtygttattgtttgtttgtttgagacaaggtctcactccagttgcccagactggagtgcagtggtgcaatcttggttcactgtaacctctgcctcccaggctcaagcagtcmtcccacctcagcctccccagcactacaggcacgtgccacagacctggctaatttttttgtatttttttgtagagacagggyttcaccaagttgccaagactggtcttgaactcctggccccaagcaatccacccacctcagcctctaaaagtgctgggattacaggtatgagccaccacgcccagccgagatgctgttatttctgatgctagatcacaacaagcaataacagtttctctgcctgactcctcagaacccaggcaccaagctgaggaggcctatgcagccacataaaaaggtcacatgtaggtgttcatatgcaactgccctagctgaggtcccagccaacagcatcaaccacccaatttgtgatrgagccttcagttgtgttgtctgatagcaacatgcgaaccatacatgtaggccgcatatgtaaatttaaattttctagtagtcacattaaaattcaattttaatacattgagtttaatctatctaaaatataatcaatataaaaaccattaagatagtttagtttctttttttatacaaagtcttcgaaatctgatgcacattttatacttacagtcctattttcaatcaacacactagtctccattcagactggcctcacttcaactgctcagtagccacttgtggctatcatagtgtggccgcttcaaatgaccccactgaccaactgttgattccaaccttgagttttcccaactgaaaccccagacatcatggagttacaaagctgttcctgctgtgccctttctgaatccttgactcacaaaatctgtgaacacaaatactggcaactaagtgtgtgacggtttattatacatctgtagtaactgggatgctagcctatgagagtttcataacttatttaaacatttccctacttagatatttctcccacctctttccaggatattagtataaccaatgacgatgagcaatacaagctctgtaagttagtcaaattatttccttaaatgtttgagggtggcrtttctgggtcaattagaacatacatttacayttacattcatgttgccaaactgttatccaaagcagcttaaccagttcttaccaacaatcatctatgtgtgtgcagccgtgcttcttttgattaaatctggccctctgcaatcatcagttgaatacttagatcctttcttttctattttataacattcctaagtttgctttattgcttttacattgtgaactatatccatgatatatttttatcacaaaatattcaggcaatgcattgactatacaaaagaagtactataccattattctttactttggatctttttcaacttaatgtcatagacaactttgcctgtcagctcataaaagtctaactcaccaaatgttaattaattaaaggactgtcttttaattaaatgttgagtgactacatggtagtccaaagactgcatgtatcttcaacattcctctgatgacagatattacagtgattccacctcttcattactacaatgctgtaaagaccacctttactttttaattagattttaagtagaaatgttaggtcaaaaggtcaaagttggtaggcataatcatttatatttctttttctgacaactgtacattcacatccaagaccatttctccactggaatttttatatttatgtattttaaggactctctaaatagtctaagtgttacctgttaaatatgatgatggtaatattttctccaagtccagccctttgtattttaatactacgaagcctctagttgcagaaactaaaagcttttagtttctgtgtggcatttgtcttatttttatgacttctgagttttcttatataggaagataactatackaagttacagaagatacatgaatgatgcttgattaaatatttcatttcaaagaactcagtcaaagtcataatttcacttcatcataccaatataggtcgagtatcccttgtctgaaatgcgtgagaccagaagtatttaggatttcagacttttttggactttgcaatatttgcatgcaaataataaggaatcttgggggtgcattttttttttttttttttttttttgagacggagtctcgctctgtcgcccaggccggactgcggactgcagtggtgcaatctcggctcactgcaagctccgcttcccaggttcacgccattctcctgcctcagcctccygagtagctgggactacaggcgcccgccaccgcgcccggctaattttttgtatttttagtagagacggggtttcaccttgttagccaggatggtctcgatctcctgacctcatgatccacccgcctcggcctcccaaagtgctgggattacaggygtgagccaccgcgcccggccgggggtgcattttaactgcaacccatcacataaggtctggtgtagaattttgtacctgttggtgctcagacaaattttggattttggagcacttcagatttcagattttccagttatggatgctcaacctatactacatcctcatcaaarataactgctgttagctgagtgtggtggtacgtgcctgtagccccagctactccagagactgaagtgggaaggttgttcaagcccaagttcaaaactacagtgagctatgatcacatggcactccagcctgggtgacagagtaagagctagtttcttttaaaaaaaaaaaaaaaagagagagagagagagataactgctgttaagattggtctttatttgtccaggtctttttgaatgcatataatatagatttcctgaaacttgcttctttaacaagggtatattgggtatattatcatgggtatatttctactgttgtatttttttacttagagatggagtcttgctatgttgcccaggctggagtgcagtggctattcacatgcacaatcatagtgcattacagactcaaactcctgggcttaagcaatcctgtctcagcctcccaagtaactgggactacaggcatatgccaccatgcctggctttgtacagtatttacagctccacctcattcttttcaattagcacacagtatgctataactacttccatactgacatacatttagtttcttcaaatatttcactagtagaacctcacaatgaatatcctcacaagtgatgtgttctctcagaagtacagagtatttctgttaaatgcataatttatttaatgtctcctctatgatggtcagaaggaataaactactctgcacaatttgccacactaactacatttcatggctctttctttattatgaattttcttatgttgcttaagggctgaacttcggggaaaagctttcccacattcattacatttataaggtttttccccagtatggagtctctgatgttcaacaaggcctgagctgtgccgaaaggctttcccacatttcttacagtgatagggtttttctccagtatgaattctctgatgtccagtaagggttgagctctttgtaaaggccttcccacagtcacgacactgatacggtttatttccactgtgagttttctgatgaccagcaaaggatgagctatacctgaaagattttccacatttactgcagtgatagggtttctccccagtatgcattctttggtgactaataagagttgagctcttcctaaaggcttttccacattcattacactgatatggcttctcaccagtatggattttctgatgttccaacacagttgaattatccctgaaagctctcccacacttgttacatttaaaaggcttctctccactatgtattctttcatgacgagtaagagctgcattctgagygaaggctttcccacagtcattacatttgtarggtttctggccagtatgaattctctgatgacttaaaaggattgagttctttctgaaagtttttccacattcaatgcatttgtggggtttctccctagaatgaattctctgatggttgataaacgttgagtgcttcttcaggaacttcccacattcaatacatctataaggctgtttgcctgcatgaaccttatggtgatttaaaagggatgaactgttcataaaggcgatcccacattctttacatttatgtggtttctcactggtgtgatttctctggtggctaataaaggacgaattgtatttgaagactttcccacattccttgcacttatagttcttctctgtggagcttctgccctcccagtccaggcctttttccatcatgacacttttcgttcgctctccyagaacrgatgcttcagaagtgctttgctttagggctgacatctttgtttcaaaccagtaatcctcgactgaaagaaaattttaaaaattcaaatgttctttatgttgaaatgctgaaagtgagagttgtgcaaggacttgaataatgttctattctacataactaaaggttatgaaaaattattaatgtgtcccacttgtgattcttgctgagaaaagatggccagactaagggcaggaaaaggaagtatgattttaaagaaaagaaaagaatctgtactataaacattgcatttaaagaatgcagtgagcccctaagaagttgccaagttaggaagacaacacaggaaacagctaaaaaagaaaaaagacaatgtgagaataaatacaaaattgaggagaaagcccagagtcacaaagcaagctataattactactagggcagatttctgcaggtggtatatttgagaacattatgatgtcaccaagaacttgagaaaaatagttctctgtgaggatttaagagtgaaccaatatttaattgctcagtggaaaaaagaaaacagaaaaaatattcaaggaacaaaaatagttctcaggccaataagattttactataaactaaatttttaacatatctaaaaaacaacatacctatgccaggcacggtggctcatgcctgtaatcccagcactttgggaggccgagacgggtggattacttgaggtcaggagttcgagcccagcctggccaacatggcaaaaccctgtctctactaaaaatgcaaaaactagccaggcatggtagcacatgcctttaatcccagctactcgggaggctgaggcaggagaatcgcttgaacccgggaggcagaagttgcagtgagctgagatcatgccmctgcactccagcctaggtgacagagcaagactctgtctcaaaaaacaaaaaaaaaattaccaatcaatgggtgtactatgtgaattttctctagctttttacaaagtacagacacaagacctaagacagacagagcgaaatgattcagacaaaaacgttctgaaaaactaatagagccaaacttgtagtaaaattaacaatcaccaaccaattattttactaaatgcgcttttcttataaacataagttgtatctatctatacctaaagatatatacacatacatatatttatatgtatttatacttagtagtctggggagaaattccatgcaatggatattagagctaagacttattttttcaaggaaatgtaagttgaaggtgaagcccagtcagaaacagcccacattcttccaatggcctttgatgggatatgtgtttaatgtattatgatcaaactagagaaaatttcaagatactgattgtaaagctggcaacgtgaagacacatatgggcacttcttctatgacaaaggtggtcttgcaaagcagtgaggaagaggagattctgcattagtacattttaggagaaaaaaaatatataaaccctaactcatatgatgcacagaaatccattctaagaggatggtaaatgtaaacataaaaaccaaataataaagcttctagaaattaacacagaagaatatcttcatgatctcgggaaaagaaaaaatattaaaatcacaaaaataataaatgttaataaataattgttaatatataatttaaaataaacattttaaataaagcatgacacaaaaaagcactgacaaaaaagaaagggattgatcaaatggaagaactgggctgggcacggtggctcatgcctgtaatcccagcactttgggaggctgaggcaggaggatggcttgaggccaggaggtccagacccaccacctgggcaacatagcaagtctccatctctacagaaaaaaaacatgttttgaattagctgagcatggtggcatgtgtctgtagtcccagctactcaggaagctgagacaggattgcttgagcccagaaaaaggaagaactgctattcatcaagaccattaacagtcagtaacaacagagagagggatggtacaatacatgtaatcaataacaggctcttcaaatagttacccaatcagagatgctctatagggaccaataaatattctaaaaggtcttttttttttttttgatacggagtctcactctgtcgcccaggctgagtgcaatggcgcaatctcagctcactgcaacctccacctcccaggttcgagtgattctcctgtcttagctccccgagtagctgggactacaggtgtgtgccaccacacccagctaattttttgtatttttagtagagacagggcttcaccatgttggccaggctggtctcgaactcctgacctcaggtgatccgcccacctcagcctcccaaagtgctgggattacaggcgtgagccaccatgcccagccctaaaatgtctttaacctcattagatatagagacatggatatgaaaaccacaatgaggcacacagaacatccaccagaatgactaacttcacaagattgaccacaggaagtgctagccaggacatggaacaaggagtgctctcacacactgatgaaggagtataactgggaacaaaactctggaagattatctgacattatatactaaagctgaatacatgcccaacagaaatgtagccacgtaggaaccaaaaaataaagtataagaatgtttacagcacttgcaatagccaaaagctggaaaatgccatatatgcatctgaatgtaagagagaaactgcagtagagtcacacartgagtcactctagaacagtgattttccaagcatgggctccagccccacagcaccagcatcagcatgcctgagaacctgctgaataaagaactctgcagggggccccgcaactgtactgcagcatgcattctgaggcacgctacagttttcagaagcattgatccacagcaaagaaataactaaaaatgaatttgaaaacatgttatgcataagccagaccaaaaattatatgtactatatgataccattcacatgaagttaaaaacaggcaaaaataaactatagtgttagttcaaggggaggagaatggacaataattgggaggaattataatgtgatttactcgggtattgccaaagttctattttttaacctaagttttggttacatgggtacagagttttaaaatactaatttaggctgtatacatattttatcagcttttctatatatgtgttaatttttttaaaggctttaagaaaaggagagtctagcttatcaatctcttagtacttcaatcacagaaatcaaaacacaaattgtaaaatatctaaaaaatgataatgaaagctctacatactgtaacctactgaatataactaaaacattacatagacaaagtttaaggctttaaatatttatattacatcagtaagaaagaagaaaaatcaatgaatgaataactaaaatgtttaggagaaagtaaataaacccaaggaaagcaaaagggaaaaggaacttaagattcaaaacacagaaaacagtaacactaataaatacatccaaatgcttttgttcaaaaaaataaaacagagctaataaaggggaaataggaaaatataggaaatggaaaaaagacaaagtaagaaatcagggaaaagtaaccaaagatgtrgagaatattactaagagttataaaaagctactttgttcaacacaagtaacttatgaccttgaattactggatgctttttaggaaattataaattactaaaactgtttcctagagagagaaaatctatttggacaagtcagtattgacaacactgtcaaaaaaagtacccccaattcctcccctctgctccacatcacaataaataagcaaaaacgggacaaaggacccaaacctttagggaacagctatcatgtgagttaaactagactaaaggataaaaatatgaaagaccaaaaaaatgttttatgaaagtattacaaaattaaaatcaaagcccaatgaaaatgggcagatgaaaaagaaaacataaatacatttaagtatcagtgcaaaaatttaaataaaagattggcagacagaatcatccactgtcatattcagagaatgatataatgtgtcatggccaagataaatgagaataaaatctaccacagaaacagatcaaaatggaaaagacagatatttccatataccttgaaaaggcatttaataaaattcagcaatcatgcttgatttaaaaaactaaaatttcttaacaaaacatgtgaatgaaatacttcctttaaataacaatgtatgtgtatcccaactcaacagccagctcaaatgagaaggccagacacaatgcaaagatgcaaagacaagcatatccatcattacctttgttaatataaagctgatataaaacaaacttttaaaaaaaatctgtgatatatatgatatacaattaatttcctgaatgtataaagaacccttcacactgacaataaaaagaccaacaatctaacagtaaaacgggcaaaggactgaacaggcagttctcaggaaagataaatacaagggttgctgaaaatgttgaaacatgctaaatcacactcctgataagagaaaggcaaattaaaattataataaaatattttcacctctcagatttgcaaggatcaaagcatataagacactgctgacaagctataaaagtggcactcatatgttgtcattaggagtrtaaacatgtattatctttatgaatagcggaaatacccaccaaatttggtggatttaaaaattttaacctttaacaattcttataggaatttattctatagatttacttgtacacaagagaattgatgtgtatgaggataatcactgcaacattgttcagagtcattatgtccactaaagataactgattacataaattataggacatccataaagtggaacactatgcaggcatcaaaaagaaagataagctggcatggtgatgcacgcctgtaatcccagtactttaggaaactgaggcaagaggattgcttgaggccacgagttccagaccagcctgggcaaaatagcgagatctcatctctacaaaaaaaaatttaaaaataaataaataaaattaaaaataaaaaaatttagccaggtgtggtagcatgctcctgtggtcccagctactcaggaggctgaggcaggaggatcacttgagccaggaggtcaaggttgcagtgagccatgatcacaccactgtacttcagcctaggaaacagtgagactctgtctccaaaagaaagaaagaaagagagagaggagagagagagagaagctctaaacaatatagttatgtcaaatgacttctaagacataaatgccaaagtaacaggcaaaagagtgtgctaccatgtgcttaaagaattcatggatactctcacaaagtatacatcacacctacaaatctccacaagaaactgacacagggatgcctctggggaggggaactgagtgatgagaaaggtatgtgaaggagactgcataccatttgaaccatctgaatgtggtaccataagcatgtctaacaactaacagaaagggaaatatacacacacaaaaaaaaacataaaatactgactggttgtgaagtctttgtagaaagatttactagtcctctaagcagatgaaagaaatattaggggaaacattgcttgttttcattacatccaagttttaaacattctatttcaaataacaaccaaaattaaaacagaaagaacaaagaataaagaagactgagtgacttttgttactatataaagaatctacacaagaatttaggggggaaatgttaaacacagtaagaataaaaggaattacttcaaaagcatcccacccacaaccagcaaagacctaggttaagcaagactatgtattactggtattttacatgaaatacagttataaacattctcctgaagaggatagaggcaaaatgacaattagagttttagaagaaaaaatactggcaggataaatattttaggtgagagaaatattcaggcttagagatttagaaatgaactatggcacagagaaagtgacatacaaaaacatatacaaagtatacacagaaaaaaatgagagccaagagcaaaggacagtagaaaagacaaataaaagaagatccctaagaaaaggaaagaaaatgcttccccaacaatgtgtttgccaaaaatcgcaattacctgagagctaaaaaaccatgcttatgtttggaatctgcaactaccaccaggaagtggtatatagtgagttagcaagcttccatgagagagtgggtaaggaatggaaaatgaacatgggccagacgtggtggctcacacctgtaatcccagcactttgagaggccaaggtggaaggaccacttgaggccaggagttcgagaccagccgtgactaatatagcgacactccatctctacataaaataaaaatttaaaaattagccaagcattgtggtggacgcctgtagtcccagctactcctactcaggggcctgaggcaggaggacggcttgagtccagactttgaggttgcagtgagctacaattacactccagcctgggcgacagggcgagactgtctcaaaaaatataaaaaaaagaaagaaagaaaatggaacagaagtagaaagaaacaaaagatacctggtgaatgcctggaaagagagagagaaaaatcacataaagagyttgaggatttcagaaggctgggagatggcacagatgggcctgaggccctcaggaaggcagcagccctcccaagtgcagaaagactggggagaaaagcggccagccacttgacaggaggatgacatcaaaagaggaaaccagtgcctttcygcaccaacagggcactcaaagatgagcttccactcaggaacccccgtactgctccgtgtgctcagcttctgctgggatgttcccyacccactcacctgcatgtgtgcctgatggagcctctcgcacctcagtccagggctctgccccttgctccaactgagtaattagttttggtttggaagagagaagccctgttcataaagaaaaaggatcttagaggaagaaaaaaaaaatgaatgaaaaggaatgtgatggcggttacaagcacaagcagtcactccagacctcagtgtcaacttgagcatctgcaatgagcatggacaggtcagagaggcctagagggtggcacccaggatgtccaactcatgaagtaaagcaaagggagggggcaaagtcaactagaaaaccaggtcctcctggaggacgagaaactcctattttgggaggcagatgaatcatgacacagaaacattccagaactgggctagttggcaccacaaagctacccatcttaactctgtatggctctgacctttcttgaggggtgtaaggggcataaactccagcctctaagcccatacttaagaaaaacaaaacaaaaagcacatcatttaagattttttcaataccccaaaccattcaccctgtgaaaacacaaagttgcccagcagaccaatcctgagtcaaggagaaagccatcctcacccacagacaccagattcccatagttctccagcatcacatccctgtacagggcccgctgagcagcatccaggtgtctccactcaatccrggtaaaggccacagccacatccccaaatgtcagcggtccctgcaaaaccaaacccaattctgctcatccgggaacccctgagggaggcatcccaagagaaggaagcaaggtggtcaaagccagcttctgacagttccaacagtgctcatggaaaccaacaagtaaaagctgagggctsaggggatgtgcgactcctcccttgagcrggttcttcctgcatgcctgtcctgctccctcctccaggcctagcctctgctcactccacccttcatgtcacctcatcaaaaaggtcttctatttctccaccccatcctctgccactcagtctcgaaacccatttcacttttcttcacaggatttctcaccacctggcaggagaggtttgcactgactgtcagcatcctctctaatgtgagctccagggggacagtgtgggtcactgctgcctcccagtcaaaaacactgcctgacacagaagtgttcaggctttattcaatcaacaaatgaatagaaactttgaaaagacatggaaagtgattagctttatccgagaatttacagggagtatgatctgactctggggcagaatatttttaaaaaagaaaaaaaaattgcttttcataagagtaacaacttactatgtaccagccacggtgctaaaccctgagatacatatcatctctctaaatttctgccgtaactatataaagtaaaatctatttcgtagctaaagacacaaaggttcagagagttggaagaacttgctcaaggtcccagggctggttgaaggcacagtataaaaggaagccacaaaaagtggtaatgaaactagaacaaattggaatggctatgaaatactaaaagaaaaaatgagtaagccttaaaaaaatgaaaagtgtgtttcaaatgaaattacttgacttagagcagtagaaatgtaggtgatctttaatttttttaattttatttgtataatagacactcaaatgtttatcacttcctttcaaaataccaattatttaatcagcttctcaaaatccttcaaaacctagttttctccaggataaaagcaaactccagtctgggattctagaccatgaatgtttccaactttctcagaccagtttgttcatggtcccgccataatgacttcattcaggcagcgctttcccctagtatcctctgcaattatgcaaatctcatttattcttcaggaagaactaaggcgcccactactccacccctcccaccctaccacacactaaaggtcaagagagcactgctatcaccctatgtctttatggcctacgtctttacatgctaacgtgtatttttttcatcgtctgccagtttgcaaagcacttttctgtttctagcactctagaaaacatgggtagcaataatctacttggtgaatgactacgtaatgggtagacaggacggaaatcgcgggacccatccaggattggttcgggtagctttgtccacacacagggcagggcattgtccgggcaagaggcataaaccccacctcgctgaaacacgtggtttctcaagaaatggaaaaatcaaacttgcctggatctgggctcttggggccatctgtctcctgaactgttctcccaggcaagggctgagaatcctgcgtaagtcaatctgggaaagaagagaggaaattgaggaagtccctccgtgccctagcctagctagaatctgccctctagaccaggtccccgcccgcccgttccctccacaggtgggcagacaggtccaggtgggtacgctcgggaagaaaggaaagggaacggctgctgggatccggcctggactgcagccagctccacgccaaacacttttggcagcaccgggggacggccttgtcagtggcccaatctgtcggccggggcgcaaggctggagcgctctgtgatgcaccagcctcgagcggtcgctccacacggcgcagccactgcgggtgggcactgcccaccgccgccttcccctcccaccccggctcgcccctcgacccgcccctgggaaaggcggggagcacccgccaggggctcgaggcttcagggacccagcctgaccccggccgctcacgaaccgaaccgagccggcagggctgcggagctgcacgcccagagagtcagcgaccacaccacgccgttcggacagtaaccaccagccaggggctggtgcagcgctcgcaccacgcggagacaggctggaccggaagcggaagtggctgaggccgcggaggcctctgggaaacgtagtctgggccgcttggggtcttaggggctccatccgcagagcaggttggcatcacctgggaatctttgaaaagtgaaggtgcgggaagtggagagcggctgatcgcagtcgggaggtgatacattatgactgacatgcaaaatctggtaaaaaattggacagggcagtgggccgcctggaggcagtatcccatacctctgacatgcaccgtggatatggagatagtccttcaaaagcaggagcagctccayatgcgcaggcatttgactcgctgcttgcctgccctgtggcagagtacttgaagatcagtaaagagattggggaagacgtgcagaaagatgtggagatggtacacacagttttgaagttggagtgagctctcttggttacagcttctcagtgtcaatagccggcaggtaataagctttccgatytgttggcacctatctcagagcagatcaaagaagtgataaccttttgggagaagaaccgaggcagcaagttgtttaatcagctgtcagctgtcagtgaaagtatccaggccctaggctgggtggctatggctcccaatcctggcccttatgtgaaagaaatgaatcatgctgctgtgttttatacaaactgagtccttaaagagtacaaagatgtggataagaagcatgtagactgagtcaaagcttatttaagtatatgcacagagctgcaggcttacattaaggagttccataccaccggactgcctggagcaaaacggggcctgtgacaaaagaactgagtggactgccatctggaccctctgctggatcagctactcctcccccaccaccaggcccccctcctccactagtctctgtcagttcaggctcagatgagtccgcttccctctcagcactgtttgcgcagattaatcagggggagagcatcacacatgccctgaaacgtgtatctgatgacatgaagactcacaagaaccctaccctgaaggctcagagtggtccagtacgcagtggccccaagccattctctgcacctaaaccccaaaccagccacaaagaaggagccagctgtacttgaactggagggcaagaagtggagagtggaaaatcaggaaaatgtttccaatctggtgattgatgacacagagctgaaacaggcggcttacatatacaagtgtgtcaacacgatgttgcaaatcaagggcaaaattaactccattacagtagataattgtaagaaacttggtctggtattcgatgatatggtgggcattgtggagataatcaacagtagggatgtcaaagttcaggtgatgagtaaagtgccaaccatttccatcaacaaaacagatggctgccatgcttacctgagcaagaattccctggattgtgaaatagccagtgccaaatcttctgagatgaatgtcctcattcctacagaaggcggtgactttaatgaattcccagttcctgagcagttcaagaccctctggaatgggcagaagtttgtcgccacagtgacagaaattgctggataagcgaagtgccactgggttctttgccctcccttcacaccatgggataaatctgtatcaagacggttcttttctagatttcctctacctttctgctcttaaaactgcttctctgctctgaaaagcacagctacctgccttcactgaaatatacctcagatgtgcagtgggatagcaggtcagttgatcttctgcaggaaggtgcagcttttccaaatcagctcaactgccgacgaggactaatgatgcattttagctttgagctttgggggttattctaccaacaaacagtccactgggaagaaaacagtcccaggaattaacagatcagaacgttcacactggttaatctttttctgacaatgagcatgaaggtagcagaagctggtgtgtttccagatggttcttctaaccaaactaatttttcactattgacaagtgaggcaaggattgcactggaccaaaggctgaggcttggccatctagcattccacgcaaaattgtttcctataagcattccttttattcactattctatcctgggtctgcctcaaccatgagataggagagtctccrgtactagctgytgtagcagtgcccttcatccagggcagttaaaggagtattcracccttkctttctctgggatccctgcccagcaccttcctacagagatgaaaaaaaaaaaaaggaaaaacaacactccattccaaggagtctggtattcctgaatcctccttccctgctaggtgcctgtcacctgtcttcactgcctccttttccctgtcacactcaccagcttatggcttctgtccaagcacctgaacaggggaccaaaacctccactgcaagctgcttttaggtcttgatttatgtaagaatcttscacagcactgctaatgtaaatttcagttttttccctctaggacaaacacttaccaaaataygcaacttttttggtgggaagagagattgtcctgtgatttctacccatttcctgatcctgtggaaataaatctttatgtacttaaagttatacagaaaatagaatgaaataaataccaaaaaaaaaaaaaagcaaagtgaaggtacctgggtcccagcttcagagattctgaattaattgccctaagtgtggtcctggcattcggattttttaaagcccccaagtggttctaatgtactgcttaggttgacatctgccaccagaaactgatacggaaagtatgagagacatattttatgtgcctttggatagctatttgtttccaaataatcctgtttttatttcatacaaataaaaagcatgttagaaaagtacatcacctagaacactaaaaacattatttcctcactatttgctgacatagaaaatgaaagtaggttgaatctgttttaacaaatgtattattttctaggaaaaacatatgtttctatttattaactccaggaattggaaagctaagggaggaaaatgtatctctctcattcaattagggcctttttttttaagaaaatttctcaggatggtgcattcatttaccaatttaccagtgattgaccaaaggcccactgcgtgctactcacttctggatgctaaggatagaacagctgacaagcgtccctcctagactaaagtggagtcaggctcctttgcatcctcctttcaactatgccttgtcttggcctggtgagccgagttttagccaagaatcctacaaagccactttatcaagaatcatggccaggcatggtggttcacacctgtaatcctaggactttgggaggctgaggcgggcggattgcctgagctcaggagttcgagaccagcctgggcaacacagtgaaaccccgtctctactaaaatacaaaagaaattagctaggcgtgacagcgtgcgcctatagttccagctactcaggaggctgagacaggagaattgctggaacctgggaggtggaggttgcagtgagctgacatcgcgccactgcattccatcctaggtgacagagtgagactctacaaaaaacaaaagaatcacactttttccatcacactttttccatcccactttttccagcaagggcacctaaggaccagtctttccttactttgggggctggatccagaatctgcatttatttatatatggctaccatttgctgattccagaggacatgcagagccttttacatacatcattacactgagctctcaccaccaaagaaggtacaattattattctcattttgcagatgaggaaattggctcagagaacgtaacttgtctttggtccctcacctagtaaatagcagagctgggtaccaacagtcattgttggatcccaaagcaaagttgcccccattggctttccatcatccctcgactgtctgaactccttgcctaacctgctgggccctccaccctttcctgcctgctttgccatcctcacctctccctcggccagagctcatgtggctctgccccagcggcttccttagccccttgctcaccaagcttcacaccacctagggagctggacccatgcaggagctgccctgggctcttccttctgcttgcctaacttgggcccccactcttgtcctggccaactcctctccatccttcctatctgaactaaaatatcaatttcacttctgtggcccaagactaagagacatcctctcttagtacactccactataagtgctcctgtgtggggcttgaacaaagtgtcaattgccagtggacagatgtaggcagagcctgcaggagttacgtcaatcatttgaaaagaacattatttactgataatagagattaaggactcaaaatggggtgttgggagcaagccccccaaaatccggccataaactggccccaaaactggccataaacaaaatctctgcagcactgtaacatgttcataatggccctaatgcccacactggaaggttgtgggtttacgggaatgaggacaaggaacacctggcccgcccagggcagaaaacagcttaaaggcattcttaagccacaaacaatagcatgagcgacctgtgccttaggacatgctcctgctgcagttaactagggcaacctgttcctttaattcggcccatcccttcgtttcccataagggatacwtttagttaatttaacatctatagaaacaatgctaatgactggtttgctgctaataaatatgtgggtaaatctctgttcggggctctcagctctgaaggctgtgagacccctgatttcccacttcacacctctatatttctgtatgtgtgtctttaattcctctagcgccactgggttagggtctccccagccgagctggtctcagcaatggggagttcacggtttcaatcactaccagctaaaacttacaaagagacaggctctgtgctaaatgcttaacttcctcacttctttagccagttggcaatgtgaaggggatggtgtaatctgtccccatttttcagatgaactcaaggccaagtggagatgtggtgctccagccagtgggcagcaccaaggctggcaagaggctgggccaggatgaagtttggacctttccctgcaggcaatgggaagccttggaaggttttatacaggataagacaggaacaggcctttttctgaaaagaccacccttggggggcctggggtagtgagaactttaagggaagggactcacagccagaaaggtaaggagcacattgtgagcacatccagtgacccagtgagtacccttccatgggctcatcctaaagagataatcagcctagtgtccaaaggtgtgtgtgtgtgagaacaccaattaacaaggagtatagttgtgcaccatcacccccagctaatttttttacttttttgagacagagtctcactccatcacccaggctggagtgcagtgaccaagccaaggattcgccatcagactgtacctgtcttacctgtacaaactagataaattcctctcttctctaggtctcaaaatatattgaggttcctgtgcctgtcagaaactgatatccttttttttttttttttaaattggagtcttgctctgtcacccaggctggagtgcagtggtgcaatctcagctcactgcaacctccgcctcccgggttcaagcaattctatgactcagcctccagagtagctgggattacaggttcctgccaccatgcttggctaatttttttgtatttttagtagagacagggtttcaccatcttggccaggctggtcttaaactgctgaccttgtgatccacctgcctcagcctctgaaagtgctgggattacaagcatgagccaccatatgtggccagaaactgatattcttttcttaccacaagatcaggaactttataagggaactgtgtagacaaggtaccaggccagtcattccccatgtctatcggctttataagtcaacttcagttatttaaagcagtctggtcatatcagaaaatatgtcattccagtcaaatggtggtttaaaaaagaaaacagtgtctccacttgcgtcctgtttaaaaaaaatggattcttactgagcttatgcaaataactatattgccaaaatgtaagaatacgcacaaatagtttctgaattctggagaaatcaggtagagagaaaggtaaatgtctcaatctgctcccaaaagtatattttaggctgggtgcagtggctcatgcctgtaatcccagcactttgggaagccaaggagggcagatcacttgaggtcaggagttcgagaccagcctggccaacatggtgaaaccccmctgataaaaatacaaaaattagctgggcatggcggcagtcacctgtaatgccagctacttgggaggctgaggcaggagaatcacttgaacccaggaggcagaggttgcagtgagccgagatcacaccattgtactccagcctgggcaacaagagcaaaactctgtttcaaaaaaaaaaaaaaaaaacagtatattttacccaatttctgtgacttacaagtagctcaaaagaaataaagttttcttgattccgcaaaacaaaacatgaaaagaatcagcaatgtttcaaacaaatagacataaaaatcatttcactcctccatcagttcagtcccatgtaattaattcttgttctgcttgatgttgagttagtgatatggtttgaatctgtgtcccaaatcgcatgtcaagttgtaatcccagtgttggaggtggggcctgktgggaggtgattgggttgtggggacagatttcccctttggtgctattctcatgagagtgagtgagttctcatgagatccggttgtttaaaagtgtgtagcacctcctctctctctcttcctcctgctctggccatgtaagataagcctgcttcccctctgccatgattgaaggtttcttgaggcctccccagccatgcttcctgtacagcctgcagaacccttgagccaattaaacctcttttctttataaattatactttctttcaggtattctttatagcagtgcaagaatggactaacacaattagtgatcttcacgaacacaccagttttttattagtgttctgtaagtttttacttagtctaatgatatgatctacaaagcagtcagaaacctctattcaagagtataattcctggttctttccatgaatatccttgaagacataacactctaggatttgcacagagctaaaagctctatgcagaaaagcatcagattaaagcaattcactacatgtaccaagatatatcaactttttagaaacctcatacaattttgaaataatattcgtaacatatttatggtgttgggctctttgcaggctttcacaggctgagcctctgtgcagtcataatgctgcatggaagccacatcatcacttgcatggcccctccagccagccgggcacctgagatgagaactgcacccaacccagcaccacagctcagcccccagcagcagccccaccctctgcaactggcttttgtgctgctgcaccttggtagctagctctgatggcccaaatggcaaccactgcagctggcattgctacaggctctactgtggggcacacactggrggctttagtggaagaaataatgctgagcctccaaggcctggcctcacttaccaagaacctcagggaacccggccagcacagcagcagcagccttgcttctgagatgaaacagtttttggagcgtggccagaaccaggatgacataaagctctgtgaggtctcaatgaggtgctgaaacagtgcagatttgcaaatggaatagcctaatcaagaagtccaaactgaagaaatgaaaatggctctcatgaccaagttaatttagcataaaatataattgacagtaaaggtataaagtataaaaccatcagttaaaattctcctctgtcattcatatctttcctgcttcagaattacaatggaagagggtgttctcaatgtgtagaatttcaccgagatggtatagaattttgggctggacaaatatttctgtggtttccttaaacgagctgttgtaattttattgtttgagcgttaattagaataaagtgattttctcaccacccccccacccaaaacaaaattaatataggcatgctggctcacatctgcaatcctagcactttgggagttcaaagctgaggacctcttgagcccatgagtttgaaaccagcctgagcaacatggtgaaaccccatctctacaacaaatacaaaaaaattagctgggtgtgatggcatgaacctgtggtcccagctacttgggaggctgatgtgggaggatcgcttgagcccaatagtccaggctgcagtgagccgtgactgtgcccctgcactccagcctgggtgacagagtgagactctcaaaaaaaaaaaaagcgtacattcatgcaaatacgaatcaaagaaagttaaacatttctttctttttcttttcttttttttttttttttgacagggtctctctctgtcatccacgctggagtggcagtcactgctcactgcagcctccacctcccaagctcaaaccatccttctacatcagccccccaagtagctgggacaacaagcatcagccaccatacccagctaattttttagttttttgtaaagacaggggtctcactatgttgcccgggctctaaacatcatttcttatttgtcattgctcccgatatgattctaacgtaccaggcctggaacagtgggctcacacctataatcccaccactttgggaggccaaggtaggaggatcacttgagtccaggagttggagaccagcccgggcaacatggtgagacctcatctctacaaaaaaaataaaataaaataaaatacaaaaaataatcaaaattagcctggtgtggtggtgcatgcctgtagtctcagctactagagagactgaggtgggagggtctcttgagctcaggaggctgaggctgcagtgagccaacattgcaccactgcactccaacctgggtragaaaaggagatcctgtctcaaaagaaaaaaagccctgaaagaattcactgccaccagacccatcttacaagaaatgttcaagtgacttcttcagtctgaaaaaaaaatcgctaatgtgaaaaaaatggaagtacaaaacacactagtaaaattaaatacatagaaaaacccggaatgctctaatactgtaattgtggcatacaatccactcacaattctactatggagcccaataggcatgagacagaaatttaaaaataataataacaataagtactgcatttattcactccaagaaaagygaataaatgcagtaattaaaggtgaagtgagaaacacaagtttttctctgctgcaggcaagggtatagacaggtcgtggtgacctagcctgcagaaatgaactccagacacccccaagcaaggttaaaagaagaaaaattcctttactgtctctcctgtattgtactattagttatgactatgtttgccaatgcttgtatttagtaggatttgcaaagttcctgtttttcttttgatgcagctgctagccactagctatgcaaggccacaggttattgccaaggtcagcagttatgctatggattacatgactagtcactgtaaaactcactgcctttgttttgcttttgaatgcaagcctatataagctaaactctgttttgttcaatgcttagtttttggatgtgaatccactgagccggtgcgtgccttaaataaacatcctcttatattccccatttcgatctctctggtcctcagtttaccacaacattttggcaagccagccaggagtggagatgacaggcttactatctcctttgcctgtggggctggagccccgggtcaagggaaaactgtgaccccaggcgtggctgggagaacttcagcccagaggggagataggctctcctgtgacccagtgcccctacccagcagtgcaacagaacctgagaggggctacaggaggattaccaggagcagcatgcttcaggaaccacggtaaggtattggggcccaaggcaggacctgttccataaggacagaaggggagcctgatcacctcctggggtgtaactcataatccgacccagagaggtagggagcagtgagagtggctcaccaatttagattaaactcacaccccaaccaacacaggatgcgagagtggctcactaagttggttaggaaaaggaaattggaggtggtgagagtggctcactaccctaaataggaacacaggaactgggagtggggaggtgtgtgaaagtgtgtgaaagaaacagtttcaaaaggaaccaatgcggggagtgatgtggggagtcataaatctcttagcgtgcactgtgtgctccaagcaaagtgtggggctgacctggactagtggcaagctgcatgcaactaataggagctgccccacagctcagagttgtggtgggaataagaacccctccaaagctaagcggcatctgaaaactccctcaataggagacagtctggtcagcctgaggcaaaaggaacagtgagtgtactgcgccacaaagggaggaatggaaggaaagtcatcaaaacccactccattggagtgcaagttacagacctttaagaaatattttgcaggggattatggagttaagctgaccccccaaaggttgagaactctctgtgaattagaatggcctccttttggtattggatggctgaccaaaggaactatagacagggaaataattggccatgtatttaaggtggtgacaggggtcggaggacagcctgggcatccagatcaatttcttatattgactcatggttaaatatagtacaaacaagactggcctggatccagccctgtttagcagcttatcagaaaacacttgtggcctgagctgagccaaaaatgaaagtaagagcagcttcgctggcagacacagagttaaagggaaagtcccagaggaagcaaaagaagccagtcttgcaggagctgccagaaggagcagagattcttcctccatgtgttccaccctttgctgaggccaacagccccccaagaacgaaattcaggagctagcacaccccaggtttcaccccaaagggaaggatcggagcctcgagaggccagggaaggaagtcaagatagtcaagcaggccgtctcagatctgaccatgcttaagctatgcaagtgcctctcagggagacgtgaggacccatttattgtgatgaccaaggccaagtccagggggggcaacggacttgcatctatcagcccttttcaaccactgatctcttaaactggaaacaccatactccctcctatatggagaatccccaagctcttayagatctgatgcagtccatccttctgacacacaatctaacctggccaaactgcaggcagcttcttctcacactgtttaacactgaggaacacaggagagtaacccaggcagctctccaccagcttgaagcccatgcaccagcagacacagtgaatgctcaggcatacactccgggccagttcccagaccaagatcccagctgggacctggaagatgtgacccagcttcagcatttgcagaggtactaagaggcacttctgcaagggctaagggatggtggaaaagaggcaatcaatataggaaagatctcagaggtgcttcagggaagtgatgagagccctagccagttttatgaaagactctgtggggtataccagcttttcaccccatttgtccctgaggctgttgaacatcagcatatggtaaatacatcatttataggacaggcccagggtgacataaagtgaaagcttcagaaactgggaggcttctcaggcatgaatgccacccagcttatagaagtggccactaaggtgtatgttaactgtgaccaggaggcaaagaaggaagcagatcagaggcttaagaaaaaggccaatttgttggcagcagcccttatagaaagagagattagtaatgtgagaggacatggacacggacgtggatgtggaagaggtctagttagacagggattcaagagctgaccaaggctagagaaggatcaatgtgcacagtgtaaaaagaaggaacactagaaggatgaatgtccaaaaggcaatgagggaaatggccaaggctgtgagacaaagaggccattggccaggggctgctgcaccctagaggaaccagatactgatctaatcgggctggcaggggctgaaggatatgaggactaggacagaccaggatcattctcattgggcctccaggagcttatggtcacattagaagttggaggacaattgatggactttatggtagatactggggctgaacactctgtagtaactcaacccttagtgccattatccaagaactataaaactattgcaggggctactggagtctcagagaagaggccattctgccagtcaaggaggagtgttataggaggatgaaaagttcagcatgaattcctatagctcctaaaccgtccagttcccttgttagggagagacctacctcaaaaactgcacgcacaggttacttttggcccacaggaagatatgactttaaatctaagtcacccgaaggccatggtgttaatctctatcatcccacaggctgaggagtggagactttatggaaagaaactacaggcaccaacgcagccttgtacataggatgaagagaaattatttcagttagttagagaaattcctggagttgggctgaagacaatccatctgggttagctgtaaatcaggcaccagtagtaatagaattaaaaccaggagcaactcctgttcgggttcgtcagtacccagttccccaaaaggctgtatggggcatctgtaaacacttagagtggctctataaacatggcattttagtccaatgccagtcgccctaaaatattccacttttaccagtacaaaagctgctgccaggaccaaggtctgatgagtatagaccagtgcaggacttgtgtgttgtgaaccgggccacagtaaccatccatccagtggtacccaacctgtatactttaataggacttattccagcaagtgctacctggtttacagtcttagaattaaagggcrctttcttttgtatccacttggcaccaattagtcagcctatctttgcatttcaataggacaaagaagctacacagttcacctggactaggctcccacaagggtttaaaaactctcccacaatctttagggaagcattggcctcagacctcaaggcctataccccaccaaatgataactgccccttgttacagtacttggatgaccttcttgtggcagccccaaaccgagaggactgttatcagggaaacsaggatctcctctatctcctgtagaaagcaggttacaaagtatctaaaaagaaagcccaaatttgccatgaagaggttaaatatctaggtttcatagtgagccacagggaatgccggcttggctatgagtgaaagcaagccatttgtgtgcttccaaccccaaccacccgacatcaaataagagaatttttagggacagcaggattctgccacatctggattccaaatttcccactgatggctaagctgttatatgaagccacaaaggggggagaaaaggagcccctccttttggaaactaatcaggaaatagcagtcaaacagatcaaggaagctttaactcaggctccagccttaggactaccagacataactaagcctttctttctatatgttcatgaacgaaaaggaattgctgtaggggttctgattcaagtgatagggtcatggcatcacccagtggcatatttatccaaacaactggactccatggtgctgggattgcctccttgccttaaggcattagccaccaccatcttgttaacacaagaagctagcaaattcattttaggacagcagctaaccgtctgggtgccacattcagttataactttgatggatcaaagagggcatcattggttatcaaaccagaagatgactcagtaccacaggcttctgtgtaaaaatgcttacattattttagaaagagtgaacaccctaaacccagctactctgctctcagttgaaccaggagctcccctccatgactgtgtcaaaatggtagatgcaggtactctccagttggaaagatcttacagacagacccctcagagacccagatgtcaagtacttcacagatgggagtagttttgtgctagaaggggttcaacatgccaggtatgcagtggtaacattgaactcagtattagagactcagcctctgcctactggaacatctgctcatgccaagaccaactcagtcgtggagaccataacccagcggcactagaggaattaaagacaaacatacagaaatatagagtgtggagtgggaaatcagggggctgacagccttcagagctgagagccatgaacagggatttacccacatatttattgacagcgacccaatgataagtattgtttctatagattatagattaactaaaagtatttcttatgagaaacaaagagatgagccgaaacaaagagataagctctggctagttatctgcagcaggaacatgtccttaaggcacagaaagctcatgctattgtttatggtttaggaatggctttaagtggttttccaccctgggtgggccaggtgttccttgccctcattccagtaaaccaacaaccttcagcatgggcatcatgaccatcaagaatatgtcacaggcctgcagaaattttgtttatggacagttttggggccagtttatgaccagatttgggggcctgttcccaacatgttacccctttttgtgtttgcaagacgataaaagcaaagacggctttatcacactgagctacttcttgcaggagtcgggagccacatctgcagactgtataaagacaacacagattaaaagcacaatcatcattgaaatcacaaagccttcaagtgtttttatctattttaatgggttactagctgctaatccgtctgcagctccttcaagcattccagttcctggcattaaggtcaggtgtgcctgggatgctttaaatacttgttcttttaatttttcaacatccaaagacaagtttgtagagtgttcttctggatgctttttttaattatttcccaaatttttatgttattaagagccattaatagtttccacaaatcctatgtttagctcctacagtaggccatatcatttgaggttgaggtgccactataccgccatgtttccagataataggaactcttgccgtacttcttaccatttctaccatctgaccatttcgtttacaccagctgaacatagtgtggccgtggtatgcagactgagaggtgcaattcaacctaaacatccccttaggggaccaatcaataatgattycataggaatcattgcgcagcacctctgcctgttctgcaaatgcagtgttcccaaacaagtacattcactatttctgaccaggtccaattctgtttacaaataggtttttgagggcgatatgcctcaattataggagcagatttattatggtaaatactgagatcagaaagcatgtgtaactatgtcatagagtgattacatccaggcattattgccagccaagattgataaatatgcccaataagtataattgttctctgtgtcagcccttgctaaaggaatactcatggcaatgktgatcaccgctatcatagctatcattaaattacgcattatgactggttgtcacactttcctcaggttctcttccaccatctgtgacagcttcttgatctgtccccaggtaggtggctgtgttcgacagatgttgcttgtgacagttggggtcctcctcgcatcagtcttgacatggctgcaaccgggggggtcctggggatcctcccagaatctcttcctcagcatctggatcatgataagatttcaggtgtcttgatggtatccaaagtggctgctggttctgtcctagagaaacacaagcataacctctaccccaagttattattttacctatttcccaactttttgttatcggatctctccaccaaaccagttgtcctgcttctgcctttgcagttggtttctgtagatgctgttcagctgccgatagcatctggcctttaggcaggctcaaaaaatttaaagtcaataatgctagattcaactgcatatggggtgtcctgtagtccctgtttctcctctttkgctttttcaactgctgtttcagggagagattcattatttctactatggcttgtccttgagaattwtatgggatgccagtaatgtgcttaatattccacatagagaaaaatgtagctagagcttggctagtatagcctgaggcattatctgttttaatagaagctggaatgcccatcactgcaaaacactacaaaggtgacatttaacacaggcagaagactctcctgattggcatatagcccaaagtgagaaaaggtgtccacacatacatgtacataagctagtctcccaaaygagggaacatgtgtgatgtccatttgctaaaaagaattaggttccaatcctcgaggagtaactcctcctataaaagatgacgaatgcaccatttggcaagttgggcatcgctggataatagctttatcttctttccaggtaatgctgtatctgtgtttgagaccaacggcattaacatgggttaaattgtgaaagtgcctggcattagatattgcggtagcaactaggtgatcagccatttgattccctgcagtcaaaggtcctggaagaggtgtatgagccctaatgtgagtgatgtaaaaagggtgcattctactcctaactgctatttgtaattgggtaaataaagtcatcagttgctcatctgtatgaaatagcaactgagcattttcaattaactgtgtggaatgaaccatgtatgaagaatcagaaatcacattaataggcatattaaaagtagtcaatacctcaattacagctacaagctctgctttttgagctaaagtatagggcatctggaaaactttacctttcaagccagaataagaagctttaccattactagacccttccgtaaaaacattctcagcaccgtcaattggtttaaatttagttattttaggcagaatccaattagttaatttcaaaaattgaaacagtttcattttaggaaaatgattattgagaatacccacaaagtcagctaaayggatttgccaagtaagactattttataaaagcttgctgtatttgtgtcttcgtgagtgggacaataatttttccaggatcatatccatgtaatttaacaatccaagttctcccatttcctatcatagtagcgatttgatccaaataaggagttagagtctgtgaattagtatgtggaagaaaaagctattctactaagtcctgctcctggacaataatacgggtaggtgaatgctgagttggaaaaattagcaaatctagagtcttctctgggtctattctatttatttgggctttatggacrtgyttttcaattcgctgtaactctgcctcagcctcctttgttaattgtcaagggctagtgagactagaatctcctctaaggatagaaaatagattactcatggcacacgtaggaatgcctagagcacgtcgcatgcaattactgtcccctagtaatttttgaaagtcatttaatgttatcagttgatccctatgtatggttactttctgtggcacaatggtagtgtcatttactaaggtacccaagtaggagtagggagtagtagtctgaattttgtcctgagctataattaaaccagtgcaagaaacccagttttgcaggtgatcataaccttggaataatatttcttgagtgggggcagcacaaagtatattgtccatataatgaataacgtaacactgtgaaaatgttttaccagtagattcaattgcttgccccacataagtctggcaaattgttggactgtttaacatgccttgtggcaacactttccagtgaaaatgcttagcaggctgcaggttgttcaccgcaggatttgcaaatgcaaaccgttcacagtcttgctcagctaaggggatagtaaagaaacagtcttttaagtctatgactgttaaaggccaatttttcggaatcatagcaggagaaggcagtcctggctgtaatgtccccataggttgtataactgaattaatggctcttaagacagttaacattctccatttacctgattttttcttaattatgaaaactggagaattccaagggaaaatgttggagctacatgtcctttttctaattgttcagtaactaagtcctctaaagcctccagtttatctttactcgggggccattattctatccaaattggcttatctgttaaccattttaaaggtataggttctggaggcttaacaatggccaccatcaaaaatgatatcctaaaccttggcaggaactttgtctttctgtgtgaagcggttccttcaaaacttgcaaatttttttctagtcccataccaaggacataccccatttcatgcatcatatgttgactttgagggccatataattgctctggaattagaacttgtgctccccattgttgtaataaatctcttccctataaatttataggtagagaagttacaattggttcaatagtcccaggttgtccatcaggcccttcataatgcaaaatataactactttgatatatttcaggggctttatcaactccaaccatgttaaattgagcaggttgaattggccacatggacagccagtgctgtagagaaatgattgaattgtccactcctgtatctagcaaacctttaaatttctttccctgaatagttatttcacaagtaggatgtttaccagtaatttgattcactcaataagctgctttgccttgtttatctgtgtttctaaatactcctgtttgtttaatttcacttttccccatttccacatatggcacaatcaggagctgtgctatacgctctcctggctctgctttccagggaacagaagtagatataacaatttgaatttccccattgtaatctgaatcagtgactcctgtatgtacttgcactccttttaaatttaaactagatctacctagaagtaatcctatcatccccgctggcaagggtccacagacccctgttggaactttttgcaggggttccccaggcagaaggctcacagcttttgtgcagcataaatctactgcagcactaccggctgtgttgggggacagatattgtacaggggtgagggagtggcctcagccggaaatghcccagtaaaccaacaaccttcagcatgggtgtcattgcccttgtgaacatgtcacaggcctgcagagattttgtttatggccagatttgggggcctattcccaacatgctcaaaaggcagaattaatagccctgacaagagcactgtgttagcagagacaagaaggttaatatttacactgattctaagtatgcttttactacattgcatgtacatgaagctatatacaaagagagaggacttttaacagctggaggcaaagaaataaagtacaaggaagaaattctacagctcttggaggctgtataggctccagaaaaagtagctgtaatgcactgcagaggacaccaagaggcagggacgccagaagccaaaggaaacaggcagacagagaggcaaagcaggcagcaatgattacaccgcattttcaagaggaagccttagctatgcctctcctgccagaacctcctctccaagggacccaagttatactccaaatgaaagagcctggtttgcccaggaagctagaaaatatattaaaggaaggtggtagaaattattcgataagagattagccattccagtgatgttagctcctaagtttgtgaagcaaattcatcaaggaactcatatgggaaaaacggcactagaaacgttactgaaatgccatttctatgtgccacagctctctgctatcactcaagccattggtgaacaatgcttaacctgtgctcagaacaacccatgacaggggcccacttggcccccaggaattcaggaagtaggagccacgccttgtgaaaacttgcttatagactttaccgaactgccccsygctggaggctgtcagtatatgctactgcttatttgcatcttttcaggataggttgaggctttccccaccaaaacagaaaaagcacgagtagtgaccaaagtactgctaaaagacattatccccaagtttggactgcctctatctttaggatcagacaataggctggcatttgtagctgaaatagtgcaagatttaataagactattaaaaataaaatggaagttacacacagcctgttggccgcaaagttcaggaaaagtggaacgcatgaactggacactcaagcagctactgaagaaatattgccaaaaaactcatctgagatagkatcaggtctagcctatggtcctcctctgagtcagatgcacccccaccaaacaactaagaattcaccatatgagattttgttcagtcggcctcccccagtcataggtcaaattaaaggtgatctccgtgaactaggagaattaatcttaagaaagccaatgcaggttttaaggacagccttgcaaagtgtccatagttaggtacatgaaagaatacctataagcctgacagacccagtacacccctttaaacctggagattttgtttaggttaagaagtagaaccaaacttctctaggacccatatgggatgggccctatgctataatcttgtccactcccactgctgttaaagttgcaggtgttgtgccttggatccaccacagtctgctgaaaccggaagctcaggacaagtggaccagccagcaggacccagatcatccaatcccgctgatcctaagacgagaccaagctgctgttaaagacaaccagcctgctgtggtcactccggaagctgaccagtctactcatggctgaaacttgaggagacaacaagccctgctctagtcatacaccggaagctgactagtctatacatggctgaagcttgaggactcatcaagcaagtaaaggtggttagaaatcttaggactagtagttttccttgtaatactaactgttttcctattgttctgttgctgtgctcaacctcctccccctcttctgtccttgctggatatgaatatgccatacattgttttgctgttgttaccccccttaaccatgctagaagaagcacctatagaagggtgtccccactgtacacatactacctggtcaaggaacagtataactataactctattgtaccatacttataagtgtacaaggactcacttaagaacttgtacttacaatcagaccacctattcagtctgtgacccagaggatggccagccttatgtatactatgaccctaaattttcacctggtgaatggtttgacattcacgcagagtcaaaggaaggtccccttttaaaaccagaccaaggtccctcttttttaccaagggcctatttctctgtactttgatgcctgtcaggcagcatacctagactcacctgtctgtggtaacttacctttagaaagatactatagaaatgactacaaatatgtatgcatgccaagagcaactccaccttgttcccctgggaccccagaaaaacattgtcagtaatgcatatcatggcaccctagcacacaacaaaggccaattatgcttactgaaatgccggtaaaccagattatgaaacaaaaacctgtaatcctgtaaacttcaccattctaaagccagacctacccatgtggactgcaggttgccccatacatgtctacatacacacatacccagcaacttacctatatgttatcaaaaaaggaacccggagccgtccagcccagcaacagttccaagtctttaagtcattctataagcatgtagaccaaaagttaccagagcctcctcctgtagccaaaaatctgtttgctcagttggctgaaaacattgctggcagcctaggcatttcctcatgttatgtttgtggaggaactaacatgggagaccagtggccttaggaagcaaaagagtcaatgccacaagataattttactctgactgacttttcccccaaaccratgcccacaagttcaagcgtctggctcttaaaaacttctattaggccaggcgtggtggctcactttgggaggccaaggcgggcagatcatgtgagatcaggagtttgagaccagcctgaccaacatggagaaaccccatctctactaaaaacacaaaattagctgggcgtggtggtgcatgcctgtaatcccaacaactcgggaggctgaggcasgagaatcgcttgaacctgggaagctgaggttgcagtgagctgagattgcaccattgcactccagccagggcaacaagagtaaaactccatctcaaacaaacaaacaaacaaaaaagccacttctattatcaggagatactgtgttgcttactggggaaaagcttttacagaccgagtaagagaattaacatgcttaggacagcaatattataatgaaaacctaagaaaaactttgtggcgaggtaaaaatcgttccaaatcacctcatccaaatccattctcctgctttctcttctgtaaatcacacctggtatcagcctgaagctttttggatgtgaatccactgagctggtgagttccttaaataaacatcctcctgtattccccatatcggtctctctggtcctcagtttaccgcaacaggcatgatagatttgtcatgaacaataatagctatagcaacctgtcaagaggtaagtaatataaatatatgtaaattcagacaactaaaagtcaaaatggggggatagagttaaagtgtagaactggtctttttttccttttttgtttatcttcttttctttgtgatcaaagtttagttgtcatctgtttaaaataacttgttatatctgtaagatacattttttggtttcctcacaggaacyacaatgcaaaaaaaaagaaaatagattcactgcaagtaaaaaaaacaacgaattaaaacatactaccaaagaagatcacgtagccacaaaagaagacaacaagaaaggaagaaaggaagacaaaattacaaaataaccagaaaacaaacaagaaaatggcagtagtaagtcctttcttatcaataataaaacagaatgtaaatggactcaattctccaattaaaagggttagagtgactgagtagataaagaaataagacccaactatatgctactacaagaaacccacctcacctctgaagacacgcatagactgaaagtgaagggatggaaaaagatgcttcatgaaactggaaaccaaaagacagcaggactcactatacttagatcaaatagaatacaaaataagactgtagaaagacacaaaaggggtcactatataatgataaagggatcaattcagcaagtggatataataattataaatttgcatgcaacaccagagctcccaagtttaaaaagcaaacattaataggtctgaagggagagatggcatgcaatacaataatagtaggggactgtctcagtaatggataaatcatacagacaaaaaaaatcaatagagtaacatcacaattaaactgcacactatacttaataggcctaagtaacatctacataacatttgcccaaatgctgcataacacacattattttcatcagcacatggaacattttccataatagaccacaccttaggccacaaaacaaatctcaataatttttttttttttttttgagacagagtctcactctgttacccaggccagagtgcagtggcctgatgttggctcactacagcctctgtctcccaggttcaaccaattctcctgcctcagcctcctgagtagctgggattacaggttcctgccaccatgcccagctaatttttgtatttttagtagagacagggtttcaccatgttggccaggctggtctcgaactcctgacctcaagtgatccacatgtcttggcctcccaaagtgataggattataggcatggccactgtgcccagcctcagtaaattttaaaaagtagaaatcgggccaggcgtggtggtttacacctgtaatcccagtattttgggagactgaggcaagaggatcacttgaggccaggagtttgagacaagcctggcaacaaagtgaaactccaactctacaaaacattttaaaattagctgggcatggtggcacatacctgtagtcctagctactcaggttgttgagtggggaggatctcataagcccaggaggtcaaggctgcagtgagccatcatcatgccactgcactccagcctgggcaacaaagcaagaccctgtctcaaaaaaaaaaagaaaaaaaaagtaaaaatcatatcaagtatctttcctaactacaatggaataaaactagaaatcaagaagaaaagaaatgttagaaacttcacaaacacatggaaactatgcaacatgctcctgagtgaccaaagggtcaatgaagaaattaggaagaaaaatttaaaatttcttggacaaatgaacagggaaatacaacataccaaaatctattgaacacagaaaaagcagtactaagagggaagtttttagcaataaacaccttcaccaaaaaagcagaaagacaggccaggcacagtgactcmtgcctgtaatcccggcactttgggaggccgaagtgggaagtctgcttgaggccaagagttcgatatcagcttggacaaacacagtgagacctcatctctacaaaaatttttaaaattagctgttgtagtggcacatacctgtagtcccagctactcgggaggctgaggtgggaggatcacttgagcctgggaagtcgaggctgcagagagacataattgcacccctgcactccagcctgggtgacagagcgagactctgtctcaaaaaacaaagaaaaaagaaagaaagagtagacagacttcaaataaaaaatctaacaatgtgccccaaggaactagaaaagcaagaacacacttaatccaaaattagaagggaagaaacaataastatcagarcagaaataaatgaagttgaggtaaaatatatatatatatatwcagaatatcaacaaaacaattagttttttgaaaagataaaatcgacaaacctttagcaagtctaaggaaaaaagagagaagacccaaatacataaaaccagaaacaacaaaaggagactaaataactgagaccacagaaatacaaagaaacattagagactataaacaactatacaacaacaaattggaaaacctagaataaatggataaattggacacatagaacctgccaagtctgaaccatgaaggaaagaaaacatcaacaagccaataacaagtaatgagatcaaagctgtaataaagtctcccatcaaagaaaagtccaggtggcttcactgctgaattctaccaaacatttaaagaactaataccaactctactcaaactcttcaaaaaaatgaaaaggagaaaatacttccaaactcattctatgaggccagcattaccctgatatcaaaccagacacacacaaaaaaaaagaaaatgagaagctaataacactgataaatgtagatgcaaaaatcctgaacaaaatactagcaaactgaattcaacaacagattaaaaagatcattcaccatggtcaagtgggattcatcccagaaatgcaaagatggttcaacatacataaatcaagaaatattaagcatttattgatttatgttatacattatttaataaacatttattgatttacatgatacattaatgtgatacattgcatttacagaaccaagaacagaagccatataatttcaatagatgctgagaaagcattcaataaaatttaacatccctttatgataaaaatgctcracaaactgggggtatcccatacctcaaagtaatacaagccatatattagacaaacccaaagccaacatcatacttaatggggaaaaattgaaaatcctttctctaacatctggagccagacaaagatccccactttcaccacttttattcartataattctggaagtcctggctagagcaattagctgagagaaaaaataaagggcatctgaactagaaaggaagaagtcaagttagacttgttggcagacaatgtgatcttatatttagaaaatcctaaaaactctaccaaaaaactctttgaactgacaaattcagtaaagttccaggatacaaaatcaacatacaaaaatcagtagcatttatatacatcaacagcaaacaatctgaaaaagaaatcaaaaagcatttttttatttacaatttgtccccatttacaatagctacaaagaatataaaatacataggaaccaatttaaccaaagaagtaaaagatcgatacaaggaaaactataaaacactgatgaaaaaaattgaagaggacaccaaaatatggaaagatagtccatgctcatggactggaagaactggtattgttaaaaagacaatactactggccgggtgtggttgctcacgcctgtaatcctagtactttgggaggccgaggcaggtggattgcctgagctcaggagttcaagaccagcctaggcaacacggtgaaactctgtctctactaaaatacaaaaaattagccaggtgtggcagcgggcgcctgtagcccctgctactcaggaggctgaggcaggagaatcacttgaacccaggaggcagaagttgcagtgagctgagatcacaccactgcactccagcttgggtgacaaagagagactctgtctcaaaaaaaaaaaaaaaaaaagacaatacaactcaaagcaatttgtacattcaatgcaattcctaacaaaataccaataacattcttcacagaaaacattcttcacagaaataggaaaaaaatcctaaaatttatgtggaaccacaaaagaccccaaatagccaatgcaatcctgagcaaaaagaacaaagctgaagatagcataatacctgatttcaaaatatagtatgaagctatagtaaccaaatcagtacgggactggcataaaaacagacaaacagtcgaatggaacagaatagagaacccagatacaaatccatgcacttacagccaactcattttcaacaaaggaaccaataacatacgttggagaaagggacagtcttttcaataaatgatgctgggaaactgaataaccatatgcagaagaatgaaacgagacccctatctctcaccataaacaaaaatcaaataaaatggattaaagacttaaatctaaatcctgaaactatgaatctactagaagaaaacattgaggaaacactctagggcattggtctgggcaaaaaattttttgtgtaagacctcaaaagcataggcaacaaaggcaaaaatagacaaatggaattacatcaaactaaaaagcttccgcacagcaaaggaaacaaccaacaaagtgaacagacaaccccacagaataggagaaaataccacaacctatccacctgacaagggattaataaccagaatatacaaggagctccaacaactttatagtaaaaacacaaataatccagtttaaaaatggacaaaagagatccgaataaacatttctcaaaagaagacataaaattgctaacaggtatataaaagaatgttaaacatcactaatcatgagaaaaatgcaaatcaaaagcacaatgagctatcttctcaccacagttaaaatgacttttatctgaaaaacagggaataacagatgctggcgaggatttggagaaaggggaatcattgtacactgttgatgggaatgtaaattagtacaaccactatggagaacagtatggaggctcctcagaaaactaaaaatagaattaccatatgatccagcaawtccactactgggtatatatcccaaagaaaaggaatcaatatactaaagagctatctgcattcccatgtttactgcaacaatattcacaatatccaaaatatggaatcaacctaagtggccatcaatggatgaatggataaagaaatgtggtgtatgtacataacggaatattattcagtcataaacaagaatgaaatcctgtcatttgcagcaatatgggtggaactagaggccatgatgttaagtaaataagccaagcacaaaaagacaaatattgcatattctcactcatacgtgggagctaaacaaaaaaacaagtggatttcatgaagatagagagtagattggtggtaaccagagttcagaaagagtagaggtaggggtctgaatagaggctggttaaggggtatgtattagtcttttttcacactgctataaaaaaatgcctgagactgggtaatttataaagaaaagaggtttaattgactcacacttccacatggctggggaggcctcaggaaacttacaatcatgttggaagaagaagcagtcaccttcttcacaaggtggcaggagagagaagaacaaaggaggaacttccaaacatatctcacaaaccatcagatcttgtgagagctcactcactgtcatgagaacaccatgggggaaactgccccttgtgatccaatcacctccctccctccacttgtgggaattacaggtccctccctcaacacgtgggaattacaattcaagatgagatttgggtggggacacagagccaaaacataccaaggtgtaatacacagttagacagaaaaaataagacctggtgttcaataaaccagtaggttagctatggttaacattaacctactgtacatttcaaaatagccagaagagaatcatttgaatatttccggcatacagaaaagacaaatacttggcgatagatatcccaatttccctgctttgatctttacacataatattaatcaaattatcacatgtacccccaaaatatgtgcatctattatataccaatttttaaaattaagttaaaaattaaattttgggttttgcatgtgaaaaaagagagaatatgggagaaaagaaattggaaacatcccttagggacaatttttttaggagttttgctgtaaagcaaagcagagaaatgaggtagtggctggagagaaatagggtgcaaggtaaggggttttatttattttatggacaatattacagtgtattcattagtatgctrataattcagtacagaatgaaaatcttgaaatacagaagagagagaaggacctcattcatgagaaagcatttaacatccagggtgcaaaagaattttctcatataggaactagggccagtgactcagaatgaaaagtagagcatacagtttctaatgcagagaggagggcagatgtgcctgtgaggcggtatagaagttctctttactcagtaacagaaagcaaagtcatcagcactcagtgagatgggaggagttgttggcggcttgaaaagagagtagaagaccaggcatggtggctcagcctgtaatcccagcactttgggaggctgaggtgggaggatcgcttgatcccaggaggtggagaccagcccgaacaacatggtgaaacttcatctcttaaaaaaaaaaatacaaaaattagcctggtgtggtggcgcaagcctatagtcccagctacttaggaggctgaggtgggagggttgcttgtgcccaggaagcagagattgcagtcagccaagatcgcactactgaactccagcctggctcaaaaaaataaataaataaataatgaaaagagagtagaacctgtgaaatagtcatttaggagaatggatggactaagaaatgtagaaggatagccaggcagcgtgaagggcccacttgaacttaatggttataaactgaaaatgaaaccaatcatcccagccatgtggttttctcaaacaacctctgccgtacaggcgcaggccaggaactggattcaagcagatttgggtttccatcaagagaataaaaccaagaaagactgggacaagagagttaagggtaacggcacatacacaggactggccataaccatgctccatggcctcttaaattgagtgaggagagaagtgagcacatgaggaagtgaaggtcagggccagggtggtaaatctaaatagggaaaagctctgtggttttccaatgaagaatgaggagaggagtaaggtccaagggagacattttgtgttccccaggcaaaaggtaagacagcatctctgaggaggagaccgaaggggacgtgggcctctccaagcatcgcaggctgaaaataatagtcccccaaatatgtccatgtcctaacccccagaagctgtggatgttaatttctatggcaagagggattttttttgaaatgtgattaaattaaggatcttgacgtcaagagattatcccagattagccagctgggcctgatgtaatcacaacagtcgttattagaaggacccacgaggagccagtgcctgagcatgtgatgtgatgatgaaggcagaggttgcagtcatgcactttgaagataaaggagcgagccataagccaaggaatgcaaacagtcactgggaactggaaaaggcaaagaaatattctcatctagaacctccaggaggaactagccccaccaacactgactttataaagcccagtaaaacttgatttcagacttggcacctccagaagtttaagagaatacatgtttgttatactactaagtttgtgttaatttgttgtgacagcaattggaaactaatacaccaaggaagggggaggatgtagaagagaggtccaggcaacatctctttcctctccaaaataaatctgaaagaaaggaattgggaaaagaccaaacgggtagctctgtgtcactcggtgagaagtgaaataaacgtaaaatcctggtatcaacaacccttgtgtgcgtttaggagagttctgactgctgggagccacttgtctaattccctcacctcctgtgtttgttccaagatcccctatttaaaattgcaaagtacacccccagtcctacacacccacaaacgcacctcgccacaccccgcccagctctatgctttcagtaccacctcatgacacacacgacgccatatatttactatatttatggattgcttgtttccccaactagaatagggcagtgacttttgtgcaagcatcttgaacagctcctggtacacagttggctctcaattaatatctgttaaatggatgaacttcagaggtgagatggaagatgccgaatggcaaatattcacttcagaatgttttgaaaggtaaagatgaaattatgggtatttacatccttttcccccaatagtattttaacaaatgaaaatcaccttaacaggtattcctaaaataattcttatttgtttgtaataaaaaacgaggaggaggacttgaatacacgcgtcgctgactcaaagatggtcccctccgcccaagaatcccgctccgcacagcgcagagttcaggggcccgcgccggaagtgggcgtggttcgcccgcggcttgctgggacttgtatttcggggccctaggcgcgcgagcggtcagcatccggaatctggcccctgcaggcgtggggttccacgtgggaggtgagactggccgggcttccccagccgctggcagaggcgttcaggggtcaggaaatgggtgtgccgcgggtaaggcgctgggccgccgagctgcggaagccgggagggcggcgatggtagggcaygcgaccagcggaggcgcggcccgcggcggcacgtgtgtcccggcgccgcatttccgagctgctgcgcccccggggccgggctgcggccacaccgaagcctgtggggccctgcagctgagcggccgcgcctccgatggcccctcctccctcctggccgagctctggcctgggccggctgggggcttcgtggttggccacgccggccttttcctcgcctgtgacgggcgttattgcaggggggttttcggtggacgttaggcgacggacgggggctcctgtaagagactgaggtttctgtccgcagcactgccttcgctgaaaagagcttgcatctgagcycccgcaccgcaggaacgagccaggctcctgagaatgaggtcggggaaggcgtcttgggcaaccgaaatccatcccgagaagcttctcctcttaactagaactttaggacagagatcgggaaagtcagaggaaatgggcacggcttcgagctgccggcggctgcggaatttacctagcctcttggttttggggggaaaacttggcttgtttaatcgaaagccctgtggagagagatgaaggtggtgacagaaaatgcttcacctctcacctgatggagggagtgtgggtggaagtgactgaagaagcgtcagaggcaggagcggagtaactttttccccgcagtcttgctggacttgattttcatggctttttctctttccctaactctgcctttccaggaatccatcccctctgggagtaagaaatgaccagggtccgggtgagttggcgttccatttctcctaaaatgccatctccctgaaatgtccctgtgccatgtgttgttttctttattgtcaggcccccagtacggtattttatagctatggatgtagggacattaagatactaaggacatgtagctagcagatgatgtcaccagggtctgcacagagagttttcactggcccatcctgcctccaagaatttattccactcctcagagcagtgggctgtgccctcctggggagcctctcaaagcctgccttttcctgccagacatttcactcacattgaaagtcattccaagctattccatactcatcccagtgctaagtggtctcagcaaaacagatagaatgataaaccacggtgcttttcttcaaggagcttaccatcttgatgaacatattatattacctgtacacaaaaaaatgcatattaatagtgataatttattaactatgagtcaaaaacgaggaaattcgttaaatggcagcacagtggttacaaaatcactctagaaatgcttttcaactaggctatgcatcagaactctctgtggtgttttttaagaactaagcttccttctctcttccagacctagtgaaaggagagtttcactccttttttattctgttgatctttgtacatccaaaggtttattgtgaaatatctctctatacactataagtgtctctagggtaggtaaaatgagttattcatcctttatactcaggttgatttgttctctttcactagcatgtctacatatttaactgttccagtaaattttaaattaccaagtcgtacttttttaaagagagttttcagttgtccccataaaaccatctgtaggaggttacctcaaaattaacccttagactcccagggtatttgagatggtcagcccccacttagaatcccatggtgtttgagatggtcggccccctctttgccctgtcctggcgttttatggtggagagctctaactcggctaactctgagagagccgaaggaaagtgccttgtcctttgtttcagagagcagaaggccagaaataaaccccgtgttttcttccttcaggctgttctttctccattaactaaacaggtcatcacatcagaagttgtttgaataaaatatcagactgcgttttaagggaaaaaaaatgttttttaacactaccagcaaaggccatctttttgcttggcaaatacagccctcacacacatgagctcttagaaaaaatctgtttagaggacagtaagctgacttgaggtactgagagcatggcttctctgtgccctgaaaagtrattgaggacttcaagggagattaaccttagtagaatcaatacattttccttccttcgcttctgcctgctccctaatgattaagtattcactgccgctgcaactggggattgccagtttagtaaattttgagattctggtgtgtgttacacaacaacttttttaatttaaaggaaggacttcattccaagcattgtgtgttttctatgtaccacacattgtccttaggtctgctgaaaggcgggagtcttagttaaccctgcttttcctctgtgacattgggtaagtcacttcgcccttatgaactgtggtttttttctctgtaaactgagggtcttgggcttgactatctttatgttttcttttagttgtattattattcatttaaattgaatgtgaatttatatttatctttcagattccaagtcaattgtggtagttgctggggatttaaagatgagttgaggccagacatggtggctcacacctgtaatcccagtactttgggagactgagtggggaggatcacctgaggtcaggagttgagaccagcctggccaacatagtgaaacctcatctctactaaaaatacaaaaattagctggtcatgttgatgcctgttgtaatcccagctactcgggaggctgaggcaggagaatctcttgaacccgggaggtggaggttgtagtgagctgagatcatgccactgcactccagcctgggcaacagagtgagactctgtytcaaacaacaaagatgagttgagtgtagcccctatccttcagaatcttccagccaacttgggagagacttaatagctatagtagagggatgtgaaagatgctatgagatctcagaggaggagaattctaactcatcctcatgcttcagaaagaggctattgtcctgagactgaaagctccaaaatggatgggagaactcaataagttagggcttactatagaaaggactgtgctagactcaagtgtaatgtgttgaatgactccaggtaatctagtgtgcctcttcctgcttttccacttcaaagtaaattgttagatacagcagagatgggctctagaaagaagtggaaggccacatgatggcatgtatgtagttctgaggaggtcgacatttgtctgatagaaacaggaaacaattgaacttgtgaccttcctctttggttggcctttagaatatcaagtctgctctcccaactgtaagcaggagcacagccttggagtgactccttagtgccactgatacctgggaagactgttgattattcagtgtttcagtcccacctttgtcttgctttaacaggagcactaatttcctttccttttctcctttcccttgtcacaatgattcttttcatttggtctactcctgtcattttttttacctaccacaaagttagtagtccaccaacatatcctttcccttctcagaatggagtcccgcctgccattttatcttgaggaccttaaaaaattaataactctggttgtctaacctagggactggaagatgacaaaaattgtactacaaagaattggtaaggagttattgtagcctaggtaagaaaaaaaataagggtcttactaagactggcagtggaaatggaaaagaggtaacacattggagggaaatttaggaggcagaattgacaggatctgaaatggtttgaatattgttgaggtagagaaggaggattagacaatccagacaactgaatggaagacggataaaaaaataagggagagaaaagataattggtgggcttgcatctctgaagatagaagaagggatttgatctagaatgcacaggaagagattagccttaaacagaaagaaatttttttttctctgtggtctgaagagaaggtctggttgggaagagcagccagtccacttgcttttaatatgccatgggtcatgccttgctaaaggatgtggtgatggagcttgaaggcagcaacctttgcttctgtttgtttgtcccacctttactccggggcttgagcctccttttccagccctcttcctcagaatggagaccagtgaccttgaacagaaagcttgggagacagcacccatccttaccttcatctttaccctcatccttccccactggtgacaagttgggtaagtcatgtcactcctgcagggcaggcccaaggaaggagggagtggtgcctctttagcctcaggccaaagctggcttagctgatcaaatttatgagacagcctttatgactttttatatattctatcactttacttttgaaattgtgccttagagagtggtgccagcccatgcactgtgcagatataagtactgaaattgagagtttcaaaaacaaaaaaaaactggttcttcaccacaggtagtttaagaagcattgcttcatcagacagagccctgaagggaaccagatttgctgacattgactgagtaaatatttggactccctttatgtgccaggccctgcttgaggtcttggggatgcagtcatgaacaaatgaggcagcctctctattcttggggaatttaaatctcagcagggaaagacagtaaataagaaagcaagtgaataagaaaataaggtaaggcataagttataagaagaaattaattaaattaaaccaggaaaatgatatatacaggatgctccagtggattagatggtcagtgacatgctttctgaagaggcaacagttggactgagagctgaatcatgaggaatggagagggcagctagtgcagaagctacaatgagtttgatgcagttcaagggcctgctgggtcactggtgctgaatatgatcataagagaggcctaggttggggaggtgacaggagagcctcatgggccaggatgaagagtctggattttactggatggccactgaaaagcctttggagggtttcatgcttggccttgtttttgttttaaaagatcaccttggctgtcatgtggaaaactcaygtttgggggagcaggagtagagtcagaccaaccaggaggttgatgtgggtgagagcaagtgctgcctaggcctagagaggtgacagtgcagggcaggggagctgggtggatgccgatatgctttagcggtaaaggaggtgggtgataggtgagatgtgaggatgagaatgaaatgacatcggggattttggtttgagcaattgagtggttcrtgtggctgtttactaaaatggggatgactggggaagagcagatgctgatggatattgctggagcaggagttctgttggggcctgttaagtgttttgttttgttttttgtttgtttgttcaactcactgcaacctccgcctcccgggttcaagagatccttccacctcagcctcctgagtagctgggactacaggcacacatcaccacgcctggctaatttttgtattttcagtagagacgaggtttcaccatgttggccaggctggtctcgaactcctgacctcaagtgatccgcccacctcggcctccccaaatgctgggattacagccgtgagccatcgtgcccagctagggcctgttaagttttaagcactttagacgtcccagtgtagatgttaaaaggtagaaaggtggagtctggaggtgaggtaagaggttagggctggaaataaatatttggcagtgaatggtattttaagtcaagggatccctcaggagagtgttttatggctgtgtgtatatgtgctattttattttcccagtaatgttcaattacttagtttagaagaggaagaacagaaagcataggaagtgatttttaacttgtaggatattagagagattcatattttaagagtagaggggtccaggtagtggactagtcccgattatggttattacagtttgatgaaatgtggctgagatcattggcactgtggagattaagaaatgtgaggtcagagtgttgggtaarttgttcctgcgagtgttaaggttgtcaggataatggtgggaatggggtgaagatgacaactcagcaatgacacaagaagagagtgacacagaaagattcagtagctgagaacttgagcgtagatatgttgtgggcaggagggaaatgatttggatggaagtagccaagtaagtgagaaaggaaagactttccaacaaaacttggcttagctcactcagatccctgagctgcaaacttcttctatacctttcttaccttttccagtgctgctgacttcaccccacttgcagggcatttgtgcagatggttgtttgttgaggaggaatgtgcttaatgttttaggaaccagttacattcaaggatgcctctgtggccttcaccgaggaggagtgaggtcacctggactctgctcccaggaagctgtgcggagctgtgatgctgggcaactacagaaacttggtcttggtgggtaaggacatgtgaacttggacacctgcccattggcttctttgtttcctacttcctttttgacacaaaaggatgttttctgactattctaagcagctaaagaacttggtaaaaattggagaatggtagttttactgggttgtctcaaaaaccataccttttccatcctttataagccagaggtgggactgattttgctttctgcacaatcacccaatccctgtgagtttctgaaatgtgatctctcagatggagcaagataaagatcattatataatagcaagtgaacctcaaagagcaccaggcatcatggcaagttataagccaggctaatccacagcagaggaatccctttttcaacgttccaggagttatctggtatcttgcagtctgtgtcgaaagcagggacttccaggatgtttcctatgtgctactgttttacctgatctattcacttactgcccttctacctctgcaggaggttgtggtctttcccagtaatggtcacttgcttctctgtactcctgcctttccccacatttccccaacattggtcatgtgccatctttgcttggactttatttttcattgaatgtcctccccctgcctggcaatatccagtttccattatttcttttcttacacattcaggaattcatccctctcccctcccaaaaataatcgaaattcatggtgagacactctcataccctacaaatagataaaacacttttttgttttctttttttgagacggagtctttttgttttgtttgtttgtttgttttgagacggagtctccctctttcatccaggctggagtctggagtgcagtggcacgatctcggctcactgcaacctccacctcccaggttcaagtgattctcctgcctcggcctctggagtggctgggattacaggcatgagccaccacacccggccagataaaacactttttgactacctgaatcaaggagccttaaacattttcaaatgcagtaattcattttttagatatctagtctaaggcaataattagtaattttaactgaaaattgtgaacaaagatattcattatagaattatttaaaatagtgaaaaaattatttacccactagatgtatcacaggggattggtcaggcaaattatcatggatcacagaaaagtatgtagccattaaaaaatatgttcatgaagaacttaaattagatggggaaatgaatgtatacctactaggttgaaccatatgaacttgccattttatagccaaaagcagccattctacaaaaaacactgaaaagtggctgggcacagtggctcatgcctataatcccagcactttgggaggctaaggcgggcagatggcttgagctcatgagtttgagaccagcctgggcaacacagcgaaaccctgtctctacaaaatatacaaaaattagcaggacatggcggcagttacatgtaatcccagctactcaggaggctgaggtgggaggaccccttgagccaggaaggcagagttgcagtgagccgagatgacactactgcactcctgccctggtgaccgtgagaccctgtcaaaaaaaaaaaacactgaaaaatgtgtcatcatgttagctttcagggtttttgcctccctcagtccacagtgggaccctggttctcttccctcagtaactgtggcctttcagtttctattttcagctaatcctggggagtaaagagaatgctacagggcaaagtggttacctccaggtagtgaaccaggcctttccacgttctttatataaacccagtgcctgtgctctgttcttgtaccaaaattgcccacttggaagtcactactgaacttttgtctctttcagagtttgttccttttttaatttttatttcagcatatttaccattatcagttttattgatggtttctatagtgttgaccttctcttgaaattctttgtcatgcatgaaatcayagtttttctgtttcctccagcttctctcttagtcctttgctctgcagattctctggcttctttttctttttttttttttttttttttttttttcttgagatggagtcttgttctgtcgcccaggctggagtgcagtggcgtgatctgggctcactgcaacctccgcctcctgggttcaagcaattctcctgcctcagactcctgagtagctgggactacaggcgcgtgccaccatgcccggctaatgttttgtatttttagtagagacagggtttcaccatgttagccaggctggtcttgatctcctggcttctgtcttttttctaacttgaaatctcaaagggctctttggttttaagttacatcatcagtgtttctcggcctttttctttatcattactctctccctgccaaaaggagacaaattaaatttctcctgtagaaaaattaagtatgaaggaataaggttttgtcaggtaggattgtttttatgagtcccaaaccagcataatatgtaagatttgtttggccaggtgtggtggctcacacctataatcccagcactttgggaggccgaggtgggcggatcacctgaggtcaggagttcgagaccagcctggccaacatggcaaaatcctgtctctactaaaaatacaaaaattagctgggcgtggtggcgggtgcctttaatcccagctgctcaggaggctgaggcaggagaattgcttaaacccggaaggtggaggttgcagtgagccgagatcgtgccactgcactccagcctggttgacagagtgagactctgtcccaaaaaataaaataaaataaaaagatttgttgtgtcccctatgaaccaattctcaccccttggggacattattgcccctgagaatgcatggtatgtccacttataggaggagctgttacacatttaatggtgttcaactctcctttctattttgataagcctaaaattattttcctttttaagttcccttcttatagtcccacttttgtcagtattaaagttgttccagtctcctagtttagaaataggccatgactatattcggtttctcttgggccaggcgtggtggctcatgcctgtaatcccagcactttgggaggcagaagcaggaggatcacttgagcccaggagttggagaccagcctgggcaacatggcaaaaccccttctacaaaaaatataaaaaattagccgggcctggtggcatacacctgtagtcccagctacttgggaggctgaggtgggaggatcacctaagccagagaggttgaggcttcagagagcaaaattctccagcctgggcaacagagtgagaccctgtctcaaaataaaaaaattttttaaaaaaaatttctctcttctcgtcctcagtatctaaaatctcccaccaattcttttttaactttaacttcttttaagtttattaacactcctagatcccacagatgttgccctaaagtcattctgtttaacgcttaaaatagggtaaaaattagtcagattgttgccatcgtttttcaagctcaagttagatgttgcaggtacactwgtctcctttaaacatcatttatgatgtcattctttggagtgttactatacggtcagtaagtcctgtgaagaatggaacaccgctctgagagaacaaagacgtgatgkaatgcgggttgtgtatgtgtcttacggagagcctctgaagtgacattaaactgggagctaagggatcaatagtttaaacaggtggctagggaggggaagaacattccaggcaaagagaaccatgcaagaagagacccaaagacctggaaggaggagtgtggtagaccacagggtgcatctaagaaggactgagaagaggtggtgaacatggcctggctcagttatggcgttgaaggccctggtaaaaagtagatttatgacaaaaaattagccaggcatggtggtacatgcctgtaatcccagcttcttgggaggctgaggtgggagaatcgcttgagcccaggaggtggaggttgcagtgagctgagatagtgccagtgcactccagcctgggagacactgtgtgaccccatctcaaaaaaaaaagtagatttatcttcagtgggcagccattgtatcaaggaatggtgtgctctgattgacccagtatcactgtgactgctctgtagagagtgatttacaagtagacaaaaatgaaataggagatgggcttccaatttcaagctctgctctaggttttcattgttattaacataaaatggaacatacttgttcaacatttttcttttatgcaagtaagacataaaagtctcaaaaactcaaacaacacagtataatatgaaatcaaatcactttctatggactctgtacttatgtatgtacattacaagtatatgtattaaaattttatgagattacactgtgtatttttaatgtgctgttttatgcagtatgtgttagagcttttttctgccatgttaaatccctataaaaggaccccttttctcatgtcagtattttctcctaatgttatacactcattcttcatatttttttttcttcttcttcttttagacgaaggctcactctgtcgcccaggctggagtgcagtggcacaatctcggctcactgtaagctccacctcccgggttcaagtgatttctcctgactcagcctcctgagtagctgggactacaggtgcccactaccacaccctgctattttttgtatattcagaggagactgggtttcaccgtgttggtcaggctgatctcgaactcctgacctcaagtaatccacccacctcggcctcccaaagtgctgggattacaggcatgagccaccgtgcccagcctcattcttcatattattttaaacatttttttaaaagctaacatcacactttcattaaaatgcacctttcataaaattcctcccccattcattttcatatacctataatttctataaccactagccatttccaagtattgtatgatatggctgttgaagcaatatcctttaaaatccatttaatcatttcagcccatttcatgatttaacgctacaaactgccctgtttttcttttgtcatttttctttttcatttttgccattacttttgaaatttataaataaagtgatacactcacctgggtaaaacaagttgtgtggacagctcatagtaaaaacattcctgtttcctgactctgctgctccatcagccacagtgtggcttccaaaggcactcagttttcacctttctagctgttccatattgggtttgtcttcctactccagacaatatgtttacatattgttatttttctctctcatgtaaacaataaatgcattcacatggttaaaaaataaatataaaacgtgcacagtgaaaagtttctttcatgtctgtagctcttgtctatccaggttctggtcattggcctttaaaaagtgagctgtctcatgtaaatgtcatttcacaaattatgcctgaaaatctgaagagtaaaactctaagttggaatgctgagtgcatatatttatgacattgattgataattgtcaaaatgtctgtccttcgtatcagtttacattcacaagtaatgtgtgtcttcagacttcgggtttgtgctagtgtaacaggtggaaaatggtacctcagtatcctttaaatttagtgtattgtgatatactgttatttctcagtttatcaatattttgtaatttctattgacttccctatattatagatgaggatgtagcttttttatattacctccccaaatgcctagcttcccaagaatttatgttagagtcatgtcagtgatgaatgcttacattgctttgactttgtaattagttgttcactgtagagtcaagtagtacagtatgattatagttctttttaatttttttatttttcctctgaagctaatacttgctttttaaaaatatattttatttggggggttttgactccgtgctgttattgtagagttttgtttatttttttcttttatttttcaactatggttttggggtttgggggtttttgttttgtattttgtagagagagttttgccgtgttgcacacactggtctcgaactcctgagctcaagcaatcacctcacctcaacctcccaaaatgctgggattacagacatgaaccaccatgcctggcctaattatgtattgtattgacttcttggcttactgctatttcttgcagcatgtatcctttttcttaaattttaaaaaattttgctatagtatattcctgaatgattgttttagtaattgaatcttttcgtgtctgaaagagtgtctattttttcctcccactgaaatggttaattggctgggtaaaaattataatttcacaatgacttttaacccaaaatttgaagatattgaagatttgcaatattgccaattagttgttcagtgtcaatataattctcatttatttgcacataacctggcttttctgtttggaagcttttagcattttctgtttctttgtttgtttgtttgtttgtttgtttgtttgttttttccttgaagtcctgaggtttaaaagagtatgtttagtttggggtctttttacataccattttttagcatttattgggccctgaatcttgaattctaggaaacatttttttgttattatttctttgatcattttctctccctgtgttccatcttcactgtcctcatgcagctccttgaagatgggcttttacttttatctttctatttgtctgtcttttcatttgcattcttggagaattcctcaatcttccatcttagccatgtgttcattttactatttaactcatctagattgcaggcgtttgactaaaacagcctgacacatatctaggaaacaagtgacataacctatcatcatcttcagtcattttatttagaattattatttttcatagcaatatgtttatattttattattagattgtgtttaaatgtgatatcctctccagtttttctgggwttttaattatgtaccttttaaattctgttggtctccttatatattttttcaaaattcttgtgttctcagcatgatattrgagtgtgtcctcaacccatgcttgacccactttggcatgcatatgtgttttactttaggggacacttctgctgattgggctagggagggaggtaataagaatccagatggtggatattataggcctttttttttttttttttttttttgacagttggcagagctagctgaggttttattttgggaaaaagaaaaaatttgaattgttttgtagctggatacatgggcaaggggactacccaggcagtaaactggccccacggatgggctaagggctaagggctagggctgagcctcaggtgggcctcctattccctgtactcccctgcacagtggtgtaggccattttttaagtccacctcttttgccactgagttatctggggcatgccctgcttctttatttccagcgctgggctatcttccttgtcagaactcccattaaaaagtttagcttgaagttttatcctgggcacttatgttgtcaattacttcttttttgtaccttaatccattggtcattgtgtacgttcaacattacctcaacctctgcttctctcttcagtccagttaatattattagcagtctttctttggcagatcatttattttattcttgaggctttatatgagggcactgctgctagccatccaatatttctatttctaagaggaagagggtgggctgggagagtgctgctaacagcaaaaactagcacagctgttaggaatgcctaagttgaattaggaaatgtcttactttatcattgtttattattttctgagacatagactccagagaaatggggtcagtgctcccttactttgtaattattgattctgagtttggtaattgaatttctatgatttcttaggatgttttacccacgaagaagccttctgttatacataatttgagctgtacatttttttcccctagttcctccatcactcctaatccatctgctccttatcatttaggagttcctcaatgtttttattctgatgatatcagcctttctgttttcccaagagtattatggatttcttgtcatttcagtgtaatattaggctattcactctaattgtttaagtctcggggagggttttgtttttgtttttgttttttaatataccagtaagtctaaactctgtattcctagcacagttctctcacaggagttccagacctatatatatctcacagcttackgaccagtactgcaagaatgttccaccaacaccacagattatacaaggcagttctgctgccttccctayttcagcctcttcctgttgcatttcctatctgattatatagcaccaccataccgtcactcaggcaggaatcccaaggaacaggcttggtgcctcctttctcttctaggtttagtttatcatcacatgatctagaatgaatttctcctattctctccacaactatcatccttaccgtttttcttctgatttgctatggcagccgtctcgctacctaaagtcttgctttccagtggtgtttattgtcacaaagtcagtcatttcactctgaattaaaattctttaatagttttcaatcccttcagggtttagccccarggtccttattattagacactaagccctttgctctgtcctcttacttcccctccgtggcacattcttcaccactcttactgtttttatctccttcgtaagaagccgcttgtagttttctttaacatgtcatattttctctccacatttcacttccttttttttgtttgttttttgtttttcctgtcattttctcccagaaatcttcctaaacaccagggtctgagttgagtgttcctctgctgtgctttcgtggctggttaggcatacatctcttgtactgtattgtactatacattcatctacaccactcacttagtattatcattatttggtgtatttgtcttcccaggaagctttagcttgttaagcaaaaggatttatattttcttccttgtattccccacacctatgaaagcagaataccaattaaatgcaaatttacttaaaggaaagtaggcygggtgtggtgactcatgcctgtaatcccagcactttgggaggctgacgcggatggatcacttgaggccaggagttggaggccagcctggtcaacatggaaaaaccacacctctactaaaaatacaaaaattagctgggcatgatggcatgtgcctataatcccagctacttgggaggctgaggtgggaaaattgcttgaacctgggaggtggaggctacagtgagaccagatcacaccacggcactccagcctgggcagcagagtgaaactcygtctcaaaaaaaaaaatgaagtgagatgagatgaaatgttattgttagcaaggatataggacttacagccttctataggattagttagggaagactttccttggctatgcttaaaagccaagagaaaatttctgtcttgtacccagatacaaatgtacctgaccttaacccaaaggacatgactataaagacaagctgaactttttcctagttactaagacttcaggccttaggcactctcactctgaaatcttgaagtctaccctttgttcttaccactgaattgtctttgttccctaggagacttgaatgaaaattctgtggagaatcttcarcagaaaacacttcaggatctgttacatgagctttcctcctggctagttttggaaggcatggccagtacaattactggaagtcaggattgtattgtgaatcatcgaggggaagtggatggggagcctgaactagatatttccccttgtcaacagtggggagaagcatcttctcctatttccagaaacagggacagtgtgatgactcttcaaagtggttgtttcraaaacattgaaagtgaaacatatttgcctttgaaagtctcaagccaaatagacacacaagactcttcagtgaagttctgtaagaatgagcctcaggatcatcaggaaagcagacgtctctttgtaatggaagaaagcactgagagaaaagtgataaagggggaaagttgttcagagaaccttcaagttaaactggtgtctgatggacaagaactggcctcgccattgttaaatggtgaggcaacttgccagaatggccagttaaaagaatctttggatcccattgactgtaactgcaaagacattcatggatggaaatcacaggtggtcagttgtagtcagcagagagstcatacagaggagaaaccctgtgaccataataactgtgggaaaatacttaacaccagcccagatggtcatccatatgagaaaatccacactgcagagaaacaatacgaakgtagtcagtgtggtaagaacttcagtcaaagctcagagctactacttcatcagagagaccacacagaagaaaaaccctacaaatgtgagcaatgtgggaagggcttcacaaggagctcgagtctgcttatccatcaggcagtccacacagatgagaagccttataagtgtgasaagtgtgggaagggcttcaccaggagctcaagtctgctcatccatcatgccgtccatacaggcgaaaaaccttataaatgtgacaagtgtgggaagggctttagtcagagctccaaactgcacatccaccagcgagtccacactggagagaagccytatgagtgtgaggagtgtggtatgagcttcagtcagcgctcaaacctgcacatccaccagcgagtacacacaggagagaggccctacaagtgwggtgagtgtgggaagggcttcagtcagagctcgaaccttcacattcaccggtgcatccacacaggagagaagccttaccaatgctatgagtgtgggaagggtttcagccagagctcggatcttcgcatccatctcagagtccacactggagagaagccctatcactgtggcaagtgtgggaagggatttagccagagttccaaactcctcatccaccagagagtacatactggagagaagccctatgagtgcagcaagtgtgggaagggcttcagccagagctccaaccttcacakccaccagcgggttcacaagaaagatcctcgctaactgacattagcccattcaggtcttcacagcgctcatactgtaaaaactgttaaatatttagtatcactcttactttatattctacaaaggagagagatgtaagggttatttagatatgttccctcactgaaaaatcactcattcaaaatatttaagtatcaagcactttgttatgctgtacaatgaatggattgttcttgtttctcagatgggtagagtaaaagtgtctgtactttacaattcaactacwtgttctacccagcattttaacggcaagaactttatatttattctcaagcagggcatgtttccctttgttcacattctctgakaaattgaaactctggtttctcttcaaattttgtgccttgtgtttttcatacttctttccagtcctgattagccccctctaaactatgattgtacactgcgtccattttaggccaagagggcagttggaaatacaatggacatggaaattattgtgtttattgcaaaaagatataatagtttgtagccacacaacaaaaagctggaagagagttactcatgtagtacattcccatataccattttgataggaagttgaacagcccctcccaggcaactattcaggaacataagtagtcctttttggtgagtacagctagtttattgggatacttccagagtgaatgtgaggaagggtccaaagtaacatgcctggcactttgggaggctgaagagggtgcatcacttgagcctaggagttcgtgaccagcctgggcaacatggcaaaatcttgtctctataaaaaagtgcaaaaattagctggtgtgctggcacagacctgcagacccagctactcaggaggggtacctgagagcaggtgataataacaaataggttccagaggcagagctggaaaaatgaatacataaggagcagggggcagcttagaggctgcagaaatcatgttggggcttgataagctaaaaatggctagcacagaaagtattcgagaatgcacttttgttaaacatgtctcatcacattggacaacattaagatgcgaggaaaatttaatttatcaaactacagcaataaggagaataggagaaagactatcagcaaatgaaaatttgaaagatggaaagatagccagtagagcagaagcaggcacagttatgctgcttgcatatggggataaggaaaagaaggaaccaatttggcaccaggctcagaaatgcttagtaccttggaagatgggagtgagatgtgaagagaaagcaatgaaactaatggccatttgtatatggaacatacctcctcattacataaacacacactgctccccaactcctgtacgtggctgaccagaggtttaacgtccagcaagaaatgggaagtttcttctctgcagaagttgaatggccccaagggaaagacctctgtattatgggaattcgggaatcctacagcaaagctactttctagcttaagtacacataaacagagcttcaaaattcatgaaataaaaactggcaaaattgaaagaggcacaatttcaattataattagatagttaaataagtaattgatagcacaagtcacttaggaggtataagccttgaacagcactatcaactaacttgactaattggcatttgtagaacactcattagcatgatatattaatatatttttattttttagggacagtgtgtcactctttcacccaggctgaagtgcagtggtgcaatgagttaattgcaaccttgaattcctgggttcaatcaatcctcctgtctcagcctccagagtagctaggactataggcatgtgccaccacacccagctattttttatttttgtagggatggagtctagctctgttgcctaggctggtctcgaactcacaggctcaagcaatcctccctccaggacctcccaaagcactgggattacatatgtgagccactgtgcccaacctgtatacattcttttcaagtgtgcctactatggactgtaataaaacagtcttaaaattttttaaagaatgaaaaccatacaaggtatattctctcaccaggacagaattaagtaagagaccaataacaaagatgtctgaacaatctcttagtatttggaaattaaacaacatactcctaaatgagcaataaagagaaagtaagaaaaatttgaaaatattttgaactgaatgaatatgtcagaatttgtgaaatgtagctaaagcagtgcttagaggtgaaatcagagawaaagatttcaattcgatagtctaaacttccaccttacgaaatgagaaaaagaacagaaatcatccaaagcaagtagaacaggagatgatacagagctaaaagtcacaaaaatcacaagtggacaaacaatagagaaaatttaatggaaccaaaacctaactctttgaaagggttgaaaggattcctgtatcaggaatgaaagagtaaatatcactataggtcctatacaccaagaaggtaatacaggaattttattagtaacttaattccaataaattcagcaacttaaatgaattggaaaattttatcctaaggactatagaaccaaagcccacttgagagaacttgaatagtcctattaaattgaatttttagctgataaccttcccccaaagaaaagtcatgagaccaacattrcccagataccaaagccaaaaaggacatcataggaaaaactcatagatcaatatctcttaatatagatgtaaaaatcctttttaaaataccaagttgaacacagcaatctataaaaggaaacacatatggccaagtagggtttatcctagaaatgcaagctttaacattcaaaaagcaatgtttcatattaatattaaaaagaaaaaccacataatttttttaatgtaggaaaacatttgaaaaaatttaacacccattcatgataaaaccgctcagttgattaggaattaaattgagtttcaagaatctaagaaagagcatctatgggagaacctacatctgacatcgtacttactggtgaagtaaaaagcacttttctcctaagattggaaacaagagaaagatgtctagtcaccacttccagtcaaccttgtagtggatgtcctagccagtacaataagccaataaaaaagaggctgggtgtggtagctcatgcctaaaatcctggcatttttgggaggccaaggtgggaagattgcttgagcttaggagttcaagactaacctggacaatatagtgagacctcatttctaccaaaacttaaataaaaattagccaggcatagtggcatgtgcctgtagtgccacctactcaggaggctgaacaggaggatcactggaggcccaggagatcaaggctgcagggagctgtgatcgcaccactgcactccagcctgggcgacagagtgagaccctgtctcaaagaaaagggatacagaatgtgaaagaaggcatgagactgctgtgacatgattgtctatatggaaaagcataaagtgtctgaaaatgtttttaaaactagtaagtatgtttagcaaggtcacaggatacaagctcaatatttttaaaaagttgaaagtatgaaaacggcatcaaaattatgaaatgtagggacaaagttactagacctgtactaaagctacaaaacatgtactaatgctagaaraaagtaaataagtcctaaaaataaatagatacactgtatgcatgagttataaacctcaaggacctacaaagtcaaaacaattttttaagatttttttcttcttctttgagatggagtctccctctgtcacccaggctggagtgcagtggcacgatctcggctcactgcaacctctgcctcccgggttcaagtgattctcctccctcagcctcccaagtagctgggattacgggcgtgtgccaccacatccagctaatttttttttgtatttttagtagagacgaggtttcaccatgttgaccaggctgatcttgaactcctgacctcaggtgatccacctgccycagcctcccaaagtgctgggattacagacttttttcaaaactaaagatatagtgatcaagatagtatggtactggatctaggctacacatacaggtaaacagaattggactcacccatatattttcaagtggttttcaacaaagatgcaaagataaagggaaaagatagagttttcaacacagttctgtaacaattgaatctttgtataggggaaaaatgagtaatataagcatgaaaaccataaagtgcctagaagaaaatcttcattaaagaggacatgaaaaacgtaaatcttagaagaaaaaattaagttgggtttcatcagttttaaaacttatgttgtttgaaacttcatatcaagaaacgaaagttatggagtggggggaaatatttataggacaaatatgtgatgaagaaggacttatatacagaatatattaaagactcttacaacccagtaattcagaaaaacattcaaaactggacaaaaggccaggcacggtatctcacgcctgtaatcccagtactgtgggaggctgaggtgggcggatcacctgaggtcaagagtttgagaccagcctgatcaacatggtgaaaccccgtctctactaaaaatacaaaaaaaaaaaaaaaaaaaaaaaaaaaaaaaaaaaaaaaaaaaagctgggtgtggtggcggtcgtctgcaatctcagctactcaggaggctgaggcaggagaatcacttgaacccaggaggcagaggttgcagtgagccaagatcgcaccactgccctccagcctggacaacaagagcaaaattctgcctaaaaaaaaaaaaaaagaaaaagaaaaagaaaaaaaactagacaaaagaatgggcattttatgaaggaacatatgcaaatggtcagtaagcacctgaaaggatggtcaatatcattaatcatcagagaagtacaaattcattttatgatgccaatattttcctaataccaaagttgtcagacagtagtactaagaaaactgggattacagttttcattacattacattacataccatacccagcccaatatccttaatattgaaggatacaggatacagatcaatacccttcatatcctgcatacacaaagtcctcaaaaaacattagcaaattgaggctgggcatggtggctcatgcctgtaatcccagcactttgggaggccgaggtgggtggatcacctgaggtcaggagctcgagaccagcctggccaacatggagaaaccccatctcttttaaaaatacagaattaaccaggcatggtggcacatgcctgtaattccagctactcgggaggctgaggcaggagaatcgcttgaacgtgggacgtggaggttgcagtgagccgagatcgcaacattgcactccagcctgggcaacaagagcaaaactccatctcaaaaaaaaaaaaattagcaaaytgaacccaaaaatatatcaacagaatcatgcactacaactaagtgaggcttattccacgaaggcaagaatagttcaatatattaatccaccatattaataggccaatgaagcaaaagcacatatcaaataatgtaggaaaaaatgtgacaaaattcaacacccattcatagtaacctcaccaagctaggaaaagagagaaacctcctcagctttacacagagcacctaaaaatatgtacagttactatcatacttaatggtaaaaaaaaaaaaaaaaaaaaaagcagtgctttcttcataagattgggaacaaggcagggattccactcccacagctcttattcagcatagtacacgaagtcctagtcagtgcaataaggcaataaaaaggaaaaagacatatagatttttaaaaactgtcactgtttgcaaatgacacaattatctacacagaaaattcaaagggatacatgcatacacacacgacgagaataaatgagttcatcargatcacagaatacaagatcagcataccaatatcaactgcatttctgtgtgctagcaatgattatgtgaaaactgaggttaaaggctgaataccatttacaatcactcaacaataaaaaaattacttaggtataaatctaataaaacatgtataggacttgtatgctgaaaattacaaaacactaataaaagaaatcgaagaagatctaaataagtcgagacatacatattcattgatatttgagatgtcarttctcttcaaactgatctgtagttttaacataattcctatcaaaatctcagcaagatttttttgttgatgtatgcaggcttactctgaaatttatatggcagggcaaaggaactgcaaccactgaaaatgtttttgaaaaagaatacaatgaaagaaatcattctacctgactttaagacttccttatagttaaaaaacaatcaaacagtttggaattggcagagataaaacagtttaatggaacagaagagagaatccagaaatagacccacacaagtaaagaaaactagtttttgataaaagcgcaaaagcaattcaatggagaaaggacaatattttaaacagtgctggagcaaatagatagccataagtcagaaaaaaaaaaaacttcaacctaaacctcacacctaatacaaaaattaattcaaaatggatcctggttttaaatttaaaactataccacttgccgaagaaaacactggagaaaatctttagtacataagctaggcaaagagttcttgacatattaaaatcataatgcataaaacaataaatggaaaaaatagaattttatcaaaatttaaaacgtttgcactgtaaaagaccctttaagaagatgaaaagaaggccgaggtaggcggatcacctgaggtcaggagttcgagaccagcctggccaacatggtgaaactccgcctctacttaaaaaaaaaaaaaaaaattasctggacatggtggcaggtgcctgtaatcccagctacttgggtggctgaggcaggagactagcttgaacttgggaggtgcaggttgcagggaggcagaggttgcagtgagccgagatcgtgccactgtactccagcctgggtgacagagcyagactctgtctcaagctacatactggaagaaaatgtttataaaccatatctgacaaaggattgtatcaagtaagaactttcaaaattcaacagtaagaaaacaaacaatccagttagagaatgaacaaaagatacaaagacacatttcactaaagtgaagatacaaatggcagataagcacataagaagacgtcaaacagccattagagaaatataaattcaaaccagaatgagttatcactacacacatattagaagagataaaatagtaaatataacaaatgcaggcaaggatatgaaaaagtggatctcagccaggtgtggtggctcacccctgtaatcctagcactttgggaggccaaggcaggcagattacctgagatcaggagtttgagaccagcctggccaacatagtgaaaccctgtctctactaaaaatacaaaaattagccgggtgtggtggggcatgcctgtagtcccagctactcgggaggctgaggcaggagaatcacttgaacccagaaggcagaggccacagtcagccgagatcgtgccactgcactccagcctgggtgacagagtaagactctgtctcaaaaaaaaaaaaaaagaaaagaaaagaaaagaaaaaagtgcatcttgagaaattaatggtaggaatgtagaatggcatcccactcccgaaattagtttggcagtttctttaaaatgtaaacaaacactatatgacccagcagttgtacccttgtgcctttttcccagagaaattaaacttatgttcacagaaaacctatacataaatgttcattacacctttcctcatagtagcccaaaactggagataacctaaatgtcctacattgtagagtttaaaatattgcagaacatgcaccaatagaacatgcaccaatagaacacacagatgaatcttgtaacgtgcataaacagaacacacagatgaatcttgtaacacgcataaatagaacacacagatgaatcttgtaacgtgcataaatagaacacacagatgaatcttgtaactgttatgctaagtaaaaaagccaggcaaaaaagaatacacactgcatgattacaattctacttttatgaaactgtagaaaagacaaaactagtgataagcagcagaccagttgttgccagtgggtggggrtgtgaaaaagaaataattacaaagtggcataaggacatttttgcagtgatggaaagattctatatcatgtcaacaaactacagtgcacaggcccaattcagcctgccacctggttttgtaagttttattggaataaggatttgttcatatatgtattttgcactacagttgcagagttgagtagttgtgacagagacyggaygtcatgcaaaacttaaagcatttactatgtggccctttacagaaaacgtttgccaaccgctgcaatatatgtttgcggtggtggtaacacagatgtatatatttgtcaaaaattccttaaattgtccatttaatgacattggcagatattattgttcataaattttaattcaataaagctaattttaatacctagtacttgcatgacactttttaaatccatttagcctgtataaaaacttgcagagaaaaaaaaatcagtctaacagccacattcataatatttaaatatgtataataaactggacatttttaatcaaacwttttttaggcaggagatttttattcatactctatgactttaayttctaagtaaataaaaatgcaactgaaaaaaaggaccagttctgctgaagaggtaacacacttcaacccgtctgtgccacaagctcaatggatttgtctagtaaataaatgcataggaaagtttcttcttaaaagccctttggagccaggcrtggtggctcacacctgtaatcccagtactttgggaagctgaggcagatggatcacttgaggcaaggagtttgagaccagcctagccaacatgacaaaaccccatctctacttaaaaaaatttttttttttttttttttttttttgtgagacagagtcttgctctgtcgccaagctggcgtgaagtgatgtgatctcagctcactgcagcctccacctcctgagttcaagcgattctcctgcctcagcctcccaagtagctgggattacaggcacgtgccaccacaaccagataattttttttttagtagacatggggtttcaccatgttggccaagctggtcttgatctcctgacctcgtgatccacctgtcttggcctcccaaagtgctggaatcacagatgtgagccactgcgcctggccaaaaatattttaaacattagccaggtgtaatcccagctcctcaggaggctgaggcacgagaatcgcttgagcctgggaggcagaggttgcagtcagccaagattgtgccactgcactccaacctggataacagagtgagactctgtctcaagaggaaaaaaaaaaaaaagccctttggggccaggctcagtggctcatgcctgtaattccagcacttttggaggctgaggcaggaggatcaccagagcctggaacttcaaagtgggcagcaaagtgaaaccctatctctacaaaaataaaaataaattagccaggcgtggtggtgctcacctgtagtctcagctactcagaaggctgaggtgggaggatcgctcaggcctggcaggttgaggctacagtgagctatgattgcrccactgcactccagcacgggcaacagagtaagaccctgactcacaaaaaaaaaaagaaatgcatgatttccttccacctctgcatccaatatgcctagatgtagtattagtttaaatctattatcagaactttgctgaatgcagcaaaaagaaaccaatattcaattttcaaattttcctaccatttcagtggtgtttgcctaagttttcaagatttcagtatctgtatccttccttccaaagccctaactccaataataagccaattatttggaggacctcacttttttkgggggggcggggggaaggagtctcgctctgtcgcccaggctggagtgcagtggtgtgayctctgctccctgcaagctctgcctcctgggttcacaccattctcctgcctcagcctcccgagtagctgggactacaggcacccgccaccatgcccagctaattttttgtattttttagtagaaacggagtttcaccatgttagccaggttggtctcgatctcctgacctcgtgatctgcccaccttggcctcctaaagtgctgggattacaggtgtgagccaccacgcccagccaggrcctcacttcttatggcaaaattatcacttagggactgtccctaataaaaatccacaagggacctggtagtgaatacaaaagtctttgcagcaggaattgaaattcatgttcagttgtttcccttgaggctaatgaagtttctagactggagaagatacacaacaattttgcagaataaataaaaacagaacttctaggctgagcatgatggttcatccttgtaatcccaccactttgggaggccaaagcagtaatcacttgaagccaggagttcaaggacaacagagcaagaccttgtatcaaaaaaaaaattaattaattaattaaaattaaaaacaaacttcaagggaacccacttcagacacactttcacatcttcattgaatcttctcatgaaaggaaaatgggaaatatgaaagaaccagatatatactagttgatgaacaagttctgcagtgataattctcaaaggaaaaaatagctagatttggaagggagggtgggtgggattgctagatgtaacaactggtgactctaattaaatcccatctcattaagtgatttacaagtccctctttccattagtgtctaccctgtgagatggaacctggatgtcctgcctaggtaatatttttgcaaacacccaagcattgatgactctttgtactccaaaagcaaacctcagttacttgcaatttttagaagctctgtttatgcaaatgtttataaaaataagggacagcaatcattaaactacttcacagattcacctcaacacttaaagagtacttggcatgtaggaaaacgtgtcctttgtgctgtggaaactatggtgaccactcctgtcttcacaataaaatagagattgattaaataatgaacaatgcaactatggattttttttttgagaaaaggtctggatctgtcacccaggctgcagtgcagtggcgtgatcatatctcactgcaaactgaaactcctagactcmagtgatcctcctgcctcagcctcccaaagcactgggattacagtgccactgtgcctggcctcacccatggaattataaatggatatagcatccatgaagatcattatggggcacartgaaagtatgtaagattgtagtaagaaggtgggtggcacaagacattttagcatcttttgacacagcatttggataccagaatgtttgaaaacatttagaaatgtaaacacacttatcagaattataccaataccagtgaatttgctttgaaagaggattttctgcagcaaaacagtgacgcctattttattttattttattttattgttttattttattctattttttgagacaaagttttgctctttcgcccaggctggagtgaagtggcgtgatctcatctcactacaacctccacctcctgggttgaagcgattctcctgcctcagcctcccgagtagctgggattacaggcgcctgcctccacgcccagtttatttttgtatttttagtagagacggggtttcaccatgttggccaggctggtcttgaactcctgacctcagacaatccacccacatcagcctcccaaagttctgggattacagtgagccacagtgccctgctgcctctttttktttgtttgtttgtttgtttttttagtatttattgatcattcttgggtgtttctcagagagggggatgtggcagggtcataggataatagtggagagaaggtcagcagataaacacgtgaacaaaggtctctggttttcctaggcagaggaccctgcggccttctgcagtgtttgtgtccctgggtacttgagattagggagtggtgatgactcttaacgagcatgctgccttcaagcatctgtttaacaaagcacatcttgcaccgcccttaatccatttaaccctgagtggacacagcacatgtttcagagagcacggggttgggggtaaggtaatagattaacagcatcccaaggcagaagaatttctcttagtacagaacaaaatggagtctcctatgtctacttctttctagacagacacagtaacaatctgatctctctttcttttccccacatttcccccttttcttttcgacaaaaccgccatcgtcatcatggcccattcttgatggtcgctgtctctttggagctgttgggtacacctgcagaaaggctgtcacttcacacttggaagattgcacagcagccaggcagaggcgcttctcactccccagacggggcagccgggcagaggcgctcctcactccccagacggggcagccaggcagaggcgctcctcacctcccagactatgggtggcagggcagaggtgctcctcacttcccagatgatgggcagccgggcagaggtgctcctcacttcccagatgatgggcgggtgggcagagacgctcctcacttcccagacggggcagctgggcagaggcgctcctcacttcccagacggggcggccgggcagaggcactcctcacctcccagatgcctcttttattcttaagtgaattttcaattctgcataatttaatcttttccaatttttctaatattatctttgcataaattattataacctgtatcaattattttctatataaatttcacatgatgtgatctgtcaatcaggtgtttatttgtataatgcaatgaatttatgtgtatgatgttctcttctagctctaaaaaaaaaaaaaaaaaagaagccaggtgtggtggctcactcctgtaatcccagcactttgggaggccaaggcgggtggatcacgagatcaggagatcgagaccatcctggctaacacgatgaaacgctgtctctactaaaaatacaaaaaattagccgggcgtggtggtgggcacctgtaatcccagatacctgggagtctgaggcaggagaatggcgtgaacccaggaggcagagattgcagtgagccgagattgtgccactgcactccagcctgggggacagagcaagactctgtctcaaaaataaatgaataaataaaaataaaaataaattagccaagcatagtagtgggctcctgtaatcccagctactctggaggctgaggcagagaattgcttgaacctgggaggyrgaggttgcagtgagccgagatcacaccactgctctccagcctggatgacatagcgagactccgtctcaaaaaaaaaaaaaaaagaagagagagagacctaagatgatgtttcctcctccagaggaatttttcttgctgctaacrggggacacactccttgatatctttaaaggaatttcgtgttaggtgcagtgcctcatgcctataatcccaacactttgggaggccaaggcaggaggattgcttgagtcaaagagtttgagaccagcctgggcaactggacaacagaccctatctctacaaaaaaaaaaaaaaaaaaaaaaaaaawtcctgggcatggtggcacatgcctgtagtcccagctatttgggaggatcatttgagcccaggaagttgagaatgcagtgagccatgatcacaccactgcactccagcctgggcaacagagcaagaccatatctcaaaaaaaaaataaaaataaaaggagatttcagggctkaagaatgttctgggctttccaaacatcttgaagtccactgcaatttgtgggaaggaaggctgatgttctttttgttcatgctacctgtacagaatcttccaagggtccggtcaaggcagaggtatcctggtccatctcatccatgggccacagaggtctctttctgccccatcatccctgcaacacccttaaaagcaaacctcagcctattacctctctcaggtcagcctgagtctccagagcaaaggcagcctcatacgttgtgctgacatggaattcccattctttttacatcataccccagtgatcactgtcttattatttatgtgcttagaaagaatgttgaaagtatttttatttttttcgagacagagtctcactctgtcacccaggctgtagtgcattgatgcatcttggcccactgcaacatccacctcctgggttcaagtgattctcatgcctcagcctccccagtagctgggattacaggcatgtgccacaaagcctggctattttttgtatttttggtagagatggggtttcaccatgttggccaacctggtctcaaactcctgacctcatgtgatccgcctgcctcggcctcccaaagtgctgatattacaggcaagagccactgcacccagcctaaaatatttttttcagctttgtccattttctytattacacaggttgatcaaaattatcttgtctacttttaatggaataatcccctacacgagcaaaagcagaagttgtctaaatgtcaaaatataggatatgggtaaacccaaatgcagttttgaaaagtggaaaaatatttggccattaagcatattttcaagatagaatggggcatggaaagagttcacagcatatcacaaaattttaaatgcaagttacacaagaacattggctgggtacagtggctcacccctgtaatcctagcactttgggaggctgagccaggtggatcwcttgaggtcgggagtttgagaccagcatggccaacatggtgaaaccctgtctctaccaactctactaaaaatacaaaaattagccgggcatggtggtgagcacctgtaatcccagctacttgggaggcttaggcaggagaatcgcgtgaacccagagggcagaggttgcagtgaaccgagaccacaccaatacactccagcctgggcactgggcaacagagcragactctgtctcaaaaaagaaagaatatttaagacatgatctcatttttttataagtatacatataccctaaaatctaaactgaagtgtaagaaacaaagaaaaattcaatcaatacaaaacaattacttgggccaggcacagtggtttgtgccagtaatcccagcactttgtgaggctgaagcaggaggatcacttgaggccaggagttcaagaccagcctggccaacatggtgaaaccccgtctctactaaaaatacaaaaattagctgggtgtgatggtgcagacctataatcccagctactcaagaggctgaggcatgagaatcatttgactccaggaaactcatcacagccttgacctccgcagctcaagtgatcctcccacytcagccttccagtatgattgcttrgtgctagcacagccttgttaatcctgagcccagggccactgtgttagcccattatcgcattgccataaaggaacasctgaggctggtaatttatgaaaagaggcttacttggctcatggttctgcaggctgtacaggaagcatggtgccagcatctgctyagcttctgctgagggcttcaggaagcttccaatgatgctggaaggcaaagggtgagccagygcatcacatggcaagagaggaagaagagagacctgaggaaggaggggccaaactctttaaaacaaccggcactcagctctccagagaactgaccaagaactcactcatcaccaagggaatggtgctaagccattcatgagggatccgcccccatgatccagtacctcactaggcccgacctctgacagtggaggtcatatttcaacatgaaatgtggaggggacacacatcctgaccatatcagccatgaacccaggaactatcaatgctgaggaagacatgagggccctaacactccacggagactgagtgtggttcctaatctctctcaatttccctttctctttaacagaatgttactctgagaccacagaacatgatggcacccaggcgctaagctgtacttgtgcagycttaacatctgagctccctctcctggacccactgagcacgaggcagggggcacacattagacaagyaataatggtttgttcaaggcttagttccactcttccagatatagataattctacccacttatagatgaagagatagaggctccaatgggaggagaaaaggctgagtaattggggcctgaaaggctcattttaagcttttgttatggactgaatgtttgcgtctcctatgttgaagtcataatccccaatacagctgtatttggagattctgcctccaaattacatcctcaattaaggatgcaactaaggtaaaatgaggtcataagggtggcatccggctctgataggattggtatccttatagggagagacatcagggagctctctgtctctctctctctgcactgaagcaccaaagaaaggctatgtgagaccaggcacagtggctcacacccaaaatccagcactttggaaggctgaggcaggtggatcacctgaagtcaggagctccagaccagcctggccaacacagtgaaaccctgtctatattaaaaatacaaaaattagttgggcatgatggctcacgcctgtaatcccagctactcagaaggctgaggcaggagaattgcttgaacctgggaggtggaagttgtggtgagccaagatggcaccactacactccagcctgtgagacagagcaagactctgaaaaaaagaaagagaagagaagagaaggaggggaaggaagggaaggagagagaaagaaagaagaaagagagagaaaaaagagaaagaaagaaaagaaagaaggaaggaaaaatatcgggggaaacagcccccaatatttcaatgtagattctttctattttccataagtgatggctggctgagaaataaaggaaagagtacaaannnnnnnnnnnnnnnnnnnngtctcaatctcctgacatcgtgatccacccacctcagcctcccaaagtgctgggattacaggcatgagccaccgcacccggccaaggattctgtcttaaaacaagaaagaaagagagagagagagaaagaagaaagaaagagagagaaggaaggaaagaaggaaggaaggaaggaaaaaaggtaaagaaggcaaagagacaaagaggaggctcatgcatgtaatcccagcactttgggaggctgaggcaggtggatcacctgaagtcaggagctccagaccagcctggccaacacagtgaaaccctgtctatattaaaaatacaaaaattagttgggcatgatggctcacgcctgtaatcccagctactcagaaggctgaggcaggagaattgcttgaacctgggaggtggaagttgtggtgagccaagatggcaccactacactccagcctgtgagacagagcaagactctgaaaaaaagaaagagaagagaagagaaggaggggaaggaaaggaaggagagagaaagaaagaagaaagagagagaaaaaagrgaaagaaaagaaagaaggaaggaaaaatatcgggggaaacagcccycaatatttcaatgtagattctttctattttccataagtgatggctggctgagaaataaaggaaagagtacaaagagaggaattttacagctgggcctctgggggtgatatcacatatcgataggactgtgatgtccacttgagccacaaaaccascaagtttttattaaggatttcaaaaggggagggggtgtacgaatagggagtaggtcacaaagatcacatgcttcaaaggacaaaaggcagaataaagatcrcatgcttttgaggaaacaggacaagggcaaaatcagaactactgataaggatctatgttcagctgtgcacatattgtcttgataaacatcttaaacaaaagaaaacagggttcaagagcagagaaccagtctgaccacaaatttaccatggtggagtttcccaatcctagtaagcctgagggtactgcaggagaccagggcgtatttcagtccttatctcagagactgcctaagacagacactccaagagcggccacttatagtcctcccgcaaggaaggcattccttccccagggtattatttattaatatttcttgctaggaaaataatttagtgatatcttccctacttgcacatccttttataggctctctgcaagatgaaaaatatggctctattttgcctgaccccacaggcagtcagaccttatggttgtcttcccttgttccctgaaaatcactgttattctgttttcttcaaggtgcactgatttcatattgttcaaacacacgttttacaatcaatttgtacagttaacaaaattatcacaatagtcctgaggtgacgtatgttctcagcttaygaagataacaggattaagagattaaagacaggcataagaaattataaaagtattattggggaattgataaatgtccatattaaaatgaaatcttctcaatttatgttcagagattgaagtaaagacaggtgtaagaaattataaaagtattatttgggaactgatatatgtccatattaaaatgaaatcttcacaatttatgttcctttgccacagctccagccagtccctccgttcagggtccctgactttccacaacaaaggaacgaaggaaggaaaaagaaaagaagaagaaggaaggaagaagaaggaagaggaaggaaggaagaaaggaaggaaggaaggctggctggctggctatgtgaggacatagcaagaaggtggccatctgtaagccaggaacaaagagagcactcacaagaaasttaatcttccaggaactcagtctgggacttctagccttcagaactgtgagagaataagtttctgttagttaagcaatctcttccgtagaattgtattttattttattttattttacagacagattatcactctgtcacccaggctggagtgcagtggtgctatcttggctcactacaacctctgcctcctgtgttcaagcgatcctcccacctcagcctcctgagtagctgggactgccggtgcccaccaccatgcccagctaatttttgtatttttagtagagacagggttttgccatgttgcccaggctggtctcgaactcctgagctcgagtgatctgctggctttggcctcccaaagtgctaggattacaggcatgagccactgcacctggccccttctgtagtatcttaaggcagcacaagcatactgatgcagattttggcaccataaagtggggtgctgctataatacctaaaaatgtgcaagtggctttgggactgggtgatgggaagaggccaaaagagctttaaagtacatgctagaaaaagcctagattgccttaagggactgttggtgaaaatactaagattaaaggaaattctggtgagagctcaaaaagaaagtaagagaaacagagagagcctctattgtcccagaatacatatgtcaacatgaacacaatgttcatagatatgtggatgtgaaaggccattctggtgaggcckaaacagaaatgaggaccgtgttactggaaactggaggaaaggcaatccttgttataaggtggcaaagctggctgagttgtgttctagttttgtggaaagtagaatttgcaagtgataaaaccagatatttagttgagatttctaagcaaaacaaggaaggtgtggcctgggtctttctgattgcttacagtaaaatctgagaagacagagaattgaagaaatgattggcaaaagcgaacaagaacttaaagatttgtaaaattctgagcctatccacactgcaaaagagaagcatgttctgaagaaaacactgaggatgtgactggattgccgctcaacagagagattaagggattatataagtagaaatactgtcaaattgaactgaaggtgatggaaaagggaagactgctgggcttcttggattttgcaggatgggacaacagagctatttggttgggagatgcactattctttgaaagggaagaatgaccccaaagatcataaaggctccctccttggtttcaaagaataaagccaccatttcttcagtttaaacaggccaggytaaccctgcctagggccttgtgggcaggtccacccgacagagtatgtggtggaacaaccacctagggccatgggggttgaggccaccaccccaggcaggaagggcattgagccaaagaggtgttttgttttgttttttcccttgagacagagttttgctattgttgtccaggctagagtgcaatggcatgatcttggctcactgcaacctccatctcccggattcaagcaattctcctgcctcagcttcccaagtagctgggattacaggcatgtgccaccacgcccagctaattttataatcttagtagagaaggggtttcaccatgtttcaggctggtcttgaactcctgacctcaagtgatccacccgctttggcctcccaaagtgctgggattacaagcatgagccaccatgcttggccaataaagaggtcattctcaagccttagatctaatggaatttgttttgctggttttggactggcttgggaccgtcactcctttctttcagatttcttccttgtggaacaggaatgtctatcctatgcatatacaaccactacattttggaagcccatactttgtctggtttcacttgtttcatacctggaaaggaactttgcctcagaatgaatcatacctcaatggtcaccctttcatgatttagataatatttagatgacactttggacttcagatctacagaattaatgctggaatgagtaacacttttgggattgttgggatggaatgcatgtatttcaaatgcaaggacatgaactttgaggggctaggagcagaatataataaatgaaatgtttgtgtccccccaaaattcatatattgaagcgataagccccagtgtggctttattttgagatagggcctctttggcagcagggaaggttcaataaggtagtaggagtgggccctgatctaatagaatatgtctttcaaataagagatactagagcacatgctctmtctccccatcccccaccctgcaagccatgaggaagtgccatgtgaggatatagtgagaaggcagcaatccagaagccaggaagcacttaccagaaagagaatttgccagcaccttgatgatggacttcaagcctacagaattatgcaaaaataaatgtctgttgtttatgccaccaagtctgtggtattttgttatggcagcccaagcagaycaatacagcatctcaaacatgcccaatccttgcccactcccaatatatccatgggatcttcaaaaatccatactaatggagaaagagactgtcatctcaggaactgaaggagaaagagtcttggctggtgggagcttgaattattcccaactctgtatgagatctgggaagtgtttgtctttgagttccccaataattgctcctttggcagcagctgttctttgccaagccttaaagaacatgacccgttgcatatgcagattggtactcagatttctcaaattgtctctgctagctccctttccagtatgctagtccacatactacagctgccttaaacttcttgaactctgaaatatttatgcttcawagaataagaatatgtttggagttatctctatctatgccatagtctaggaatttccttctgacaagaagctgtgccaatcataagactggccatatttgcttcctttctttcaagaatcatggttgtgcaattcctaatatccaagtcttaaaacagttgtttcatacatttttccagttttctagttatttcatctatcttggccagtttgccagttgtttaagaccacaaatactggagaatgggtggaagcaaaaattccttttataggtggaagcaaaaatcctttaaataattttgtatttaactgttgcatagtttattattccatttggctgactctgagtttacagtcacactatgtggattcttttttaataatamctttttaatatagagacagggtctcatcatgttgcctaggctggtctcaaaatcctgggctcaagcaatcctcctgccttggtgccttcgtctcccaaggtgctgggaatacaggcatgagccaccatgtctggcctctctggattccttaccgggtaagtagtttagtaataatggtgtattagtccattatcacgctggtataaagaactatatgagactgggtaatttataaagaaaagaggtttaattgacgcacagtcctgtcccacatggctgaggatgcctaaggaaacttacaatcatggctgaaagtgaaggggaagcaaggcacatcttaccatggcagagcaggagagacagagaaaaggggtaagtgctacacttttaaactatcagatctcatgagaactcactatcacaagaacggcaaggaggaactccacccccatgatctaatcacctcccacccggcccctcccctgacacatggggattacaattcaacatgagatttgtgtgggcacacagagccaaaccatatcaaatgctaacayttatttatgtatgagtagaatgtaacaagatttcaacacatcaatttactctctacaaatattttatttaaaatatacattttttcttatagctataaaaagaaaaacattaagtgtgggaaattttaaacacatcattaaaattattaaattaagggcacatttacataagattatgatgagttcctgtgacaaaatcaacacatataatctttctcttataaagcacactcgcagagggcattgcaagatggccgaataggaacagttctggtctgcagctcccagcatgatcaacgcagaagacgggtgatttctgcatttccaactgaggtacctggttcatctcattgggactggttggacagtgggtgcagtccacagagggtgagctaaagcagggcagggtgttgcctcacccgggaagcaaaaggggtcaggggatttccctttcctagccaaaggaagctgtgacagactacctggaaaaatggggcactctcacctaaatactgcacttttcccaaggtcttagcaaccggcagatatggtgattgtctcccgtgcctggtttggcaggtcccacgcccacagagccttgctcactgctaaggcagcagtctgagattgatctgtgaggcagcagcctggctgggggaggggcgtctgccattgctgaggcttgagtwggtaaacaaagtggcccggaagctcaaaccgggcacagcccaccacagctcaacaaggcctattgcctctaggctccatctctgtgcgcaaggcgtagctgmacaaaaggcagcagaaacttctgcagacttaaacgtccctgtctgacagctgtgaagagagcagtggttctcccagcacagtgtttgagttctgagaacggacagactgcctcctcaagtgggtccctcacccccatgtagcctaactgggagacacctcacagtaggggccaacagacacttcgtataggtggctgcccctctgggacaaagcttccagaggaaggatcaggcaacaatatttgctgttctgcaatatttgctgttctgcagcctccactggtgatacctaggcaaacagggtctggagtggaactccagcaaacaccaacagacctgcagctgagggacctgattgttagaaggaaaactaacaaacagaaaggaatagcatcaacatcaacaaaaaggtcatctacaccaaaaccccatctgtaggtcaccatcatcaaagatcaaaggtagataaaaccacaaagatgcagagaaactagaacagaaaagctaaaaattctaaaaatcagagtgcttcttctcctccaaaggattgtggctcctcgccagcaatggaaaaaagctggatggagaatgactttgacgagttgacagaagtaggcttcagaaggtcggtaataacaaacttctcggagctaaaggaggatgttcaaacccatcgcaaggaagctaaaaacgttaaaaaaaaattagacaaatggctaactagaataaacagtgtagagaagaccttaaataacctgatggagttgaaaaccatggcacgagaacttcgtgacgcatgcacaagcttcaatagccaattcaatcaagtgggagaaagggtatcaatgattgaagatcaaattaatgaaataaagcaagaagacaaggttagagaaaaaagactaaaaagaaacgaacaaagcctccaagaaatatgggactatgtgaaaagaccaaatctacatctgattggtgtacatgaaagtgacaaggagaatggaaccaagttggaaaacactattcaggatattatccaggagaacttccccaacctagcaaggcagaccaacattcaaattcaggaaataaagagaacaccacaaagatactcygcgagaagagcaaccccaagacacataattgtcagattcaccaagrttgaaacaaacgaaaagatgttaaggcagccagagagaaaggtcragttacccacaaagggaagcccatcagagaacagacctctcggcagaaaccctgcaagccagaagagagtgggggccaatattcaacattcttaaagaaaagaattttcaacccagaatttcatatccatctaagcttcataagtgaaggagaaataaaatcctttacagacaagcaaatgctgagagattttgtcaccaccaggcctgccttacaaatgctcctgaaggaagcactaaacatagaaagaaacaaccagtaccagccactgcaaaaacatgccaaattgtaaagaccatcgatgctatgaagaaactacatcaattaatgggcaaaataaccagctaacatcataatgacaggatcaaattcacacataacaatattaaccttagatgtaaatgggctaaatgctccaattaaaagacacagactggcaaattggataaagagtcaagacccatcagtgtgctgtattcaggagacccatctcatgtgcagagacacatataggctcaaaataaagggatggaggagatctaccaagcaaatggaaaacaaaaaaaggcaggggttacaatcctagtctctgataaaacagactttaaaccaacaaagatcaaaagagacaaagaaccccattacataatggtaaagggatcaattaaacaagaaaagctaactatcctaaatatatgtgcacccaatacaggagcatccacattcataaagcaagtccttagagacctacaaagagacttagactcccacacaataataatgggagactttaacacccctctgtcaatattagacagatcaacaagacaaaaggttaacaaggatatccaggacctgaactcagctctgcaacaagcagacctaatagacatctacagaactctccagcccaaagcagcagaatatacattcttctcagcaccacatagcacttattctraaagtgaccacataattggaagtacagcactcctcagcaaatgtaaaagaaatcacaacaaactgtgtctcagatcacagtgcaatcaaattagaactcaggattaagaaactcactcaaaaccacacaactacatggaaactaaacaacttgccctggaatgactactgggtaaataacgaaatgaaggcagaaataaagatgttctttgaaaccaatgagaacaaagacacaacataccagaatctctaggacacatttaaagcagtgtgtagagggaaatttacagcactaaatgcccacaagagaaagcaggaaagatctaaaatcaacaccctaacatcgcaattaaaacaatcagagaagcaagagcaaacaaattcaaaaggtagcagaaggcaagaaataactaagatcagagcagaactgaaaaatatagagatacaaaaatacccttcaaaaaaatcaatgaatccaggagctggtttttttaaaagagcaacaaaatcgatagaccactagcaagactaataaagaagaaaagagaaaagaatcaaatagacacaataaaaaatgataaaggggatatcaccactgatctaacagaaatacaaactaccaccagagaatactataaacacctctatgcaaataaactagaaaatctagaagaaatggataaattcctggacacatacactctcccaagactaaaccgggaagaagttgaatctctgaatagaccaataacaggctctcaaattgaggcaataattaatarcctaccaaccaaaaaaagtccaggaccagacggattcacagctgaattctaccacagctagaaagacgagctggtaccattccttctgaaactattccaatcaatagaaaaagagggaatcctccctaactcattttatgaggccagcatcatcctgataccaaagcctggcagagacacaacaaaaaaagagaattttagaccaatatccctgatgaacatcaatgcaaaaatcctcaataaaatactggcaaactgaatccagtagcacatcaaaaagcttatccaccacgatcaagtgggctttatccctgggatgcaaggctggttcaacgtatgcaaatcaataaacataatccatcacataaacagaaccaacaacaaaaaaccacatgattatctcaatagatgcagaaaaggcctytgacaaaattcaacagcccttcatgctaaaaactctcaataaactaggtgttgatggagcatatctcaaaatgataagagctatttatgacaaacccacagccaatatcatacttaatgggcaaaaagtggaagcattccctttgaaaaccagcacaagacagggatgtcctctctcaccactcctgttcaacatagtgttggaagttctggccagggcaatcaggcaagagaaagaaaaaaagggtattcaattaggataagaggaaatcaaattgtccctgtttgcagatgacatgattgtatatttagaaaaccccatcatctcagcccaaaatttccttaagctgataagcaacttcagcaaagtctcaggacacaaaatcaatgtgcaaaaatcacaagcattcctatacaccaataacagacaaacagagagccaaattatgagtgaactcctattcacaattgctacaaagacaataaaatacctaggaatccaacttacaagggatgtgaaggaccccttcaaggagaactacaaaccactgctcaacaaaataagaggacacaaacaaatggaagaatattccatactcatggataggaagaatcaatattgtgaaaatggccataatgcccaaagtaatttatagattcaatgccatccccatcaagctaccaatgactttcttcacagaattagaaaaaactactttaaagttcatatagaaccaaaaaagagcccgcattgccaagacaatcctaagcaaaaaaaacaaagctggaggcatcaagctacctgacttcaaactatactacaaggctacagtaaccaaaacagcatggtactggtatcaaaacagatatgtagaccaatggaacagaacagagccctcagaaataacaccacacatctacaaccatctgatctttgacaaacctgacaaaaacaagaaatggggaaaggattccctatttaataaatggtgctgggaaaactggctagccatatgtagaaagckgaaactggatcccttccttacaccttatacaaaaattaattcaagatggattaaagacttaaatgttagacctaaaaccataaaataccctagaagaaaacctaggcaataccattcaggacattggcatgggcaaggacttcatgactaaaacaccaaaagcaatggcaacaaaagccaaaattgacaaatgggatctaattaaactaaagagcttctgcacagcaaaagaaactaccatcagagtgaacaggcaacctacagaatgggagaaaatttttgcaatctacccatctgataaagggctaatatccagaatctacaaagaagtcaaacaaatttacaagaaaaaaaacaaacaaccccatcaaaaagtgggcaaaggatatgaacagacacttctcaaaagaagacatctgtctgggtgcggtggctcatggctgtcatcccagcactttgggaggctgaggcgggtggatcacgaggtctggagatcgagaccatcctggctaacatggtgaaaccctgtctctactaaaaatacaaaacaaaaaaaattagctgggcatggtggcaagcgccggaggctaaggcagaagaatggcatgaacccgggaggcagagcttgcagtgagccaagatcacgccactgcactcgagcctgggcaacagagcaagactccgtctcaaaaaaaaaaaaaaaaagaagacatctatgcagccaacagacacatgaaaaaatgctcatcaccactggtcatcagagaaatacaaatcaaaaccacaatgagataccattcttgccagttagaatggcaatcattaaaaagtcgggaaacaacagatgctggagaggatgtggagaaataggaacacttttacactgttggtgggagtgtaaattagttcaaacattgtggaagacagtgtggcrattcctcaaggatcttgaactagaattaccatacgacccagcaatcccattactgggtatatacacccaaaggattataaatcatgctactataaagacayatgcacacatatgtttattgtggcactattcacaataataaagacttggaaccaacccaaatgtccatcaatgatagactggattaagaaaatttggcacatgtacaccatggaatactatgcarcmataaaaaatgatgagttcatgtcctttgcagggacatggatgaagctggaaaccatcattctcaaaaaactatcacaaggacagaaaagcaaacaccacatgttctcactcatgggtgggaattgaacaatgagatcacttggacacaggaaggggaacatcacacaccagggcctgtcaggggatggggggctgggggagggatagcattaggagaaatacctaatgtaaatgatgagttgatggatgcagcaaaccaacatggcacatgtatacctatgcatcaaacctgcacattgtgcacatgtaccctagaacttaaagtrtaataaaaaaaaaaaagaagaaatccactacagaaggaaccaaggaatttaagcatcaaaattcccacctgccccccaccatttttttgtgagcccaggatggctttgaactcccaggctcgagcaatcctccccagtcagcctccagataattacaggcatgagctaccaagcctggttcatcttctctgatttttctcaatgtcacttgagtcttttgtggcccacactagttaggggaatagcctgatcatctggccagatctaaactgaaatatctgatgaggcagctatatttggaggggctgacctgagatatagaagattaagatctggtactgaggattcaggcttgtaagggaaagcttcgaatgcaaattatatgcaccctaattttttttaaccgattctttcttctggttataatttactttttttggagattgcatatatttacacttatttgctaggtgcttgtatttcttttctgaattgccttttcatcttgatggtgtattttttgttcagtcacttagaataaaaattcaagtgtgaagaaagaaaaatactttaaggcttagaaatgtaaccttttgctttattttrgaaatttttatttatatgattatgcatttcctagatactagttctttctgttcaaggccatttactccaacacccaagtggatttcttgattgcagatttattactataggatgtatttgggtagaattatttcttcccattatactggccttattcacacttctgtgctttaacacaatgaaaaattgctttracattgaagttctgtattgagtcccacaagatattattcccttacagcgcttgtattgtaagytgcaaactgaacatttgaaaaatcaaaatgaaagcatgtagcataaaggtctgccttttttttttttttttttttgagacagagtctcactctgtcgcccaggctggagtgcagcagagcgatctcggctcactgcaagctccgcctcccaggttcacgccattctcctgcctcagcctcctgagtagctgggactacagggacccgccaccacgcctggctaattttttttgtacttttagtagagacagggtttcaccgtgttaaccagaatggtctcgatatcctgacctcgtgatctgcccacctcggcctcccaaagtgctgggattacaggcgtgagccacggcgcccagccaaatgtctgcctttgaaggataatggcgtgcatgtaaggtgctgttaaaaagtattgattgcattagcagcaccttgattttagcacagaggtcagcaaattagtggctgtaggccaagtccagcccgctgcctgtctttgtaagtactttttttttaacctttaagctctgttggacttgagtaagtaaagttttacggaacacagaaaataaaataaaatgaaataaaaaataaaaataaagcacactcacacaacattatgacactttgcatttgtatttggtgtatttatgactattcgacctaattgtgctttttgaagttagattcctagtacacagtatgtctgtaactgaatattttcaataaaattttggtatatcagaaacaagaattttagtataatatttctaaaggaagtttttagtctcaattaccaaactgacatttccagtgagctaaaatctctcatgtataaccaaaamtgaatcattttcaaagttacaacttattcaaaatattcgtaagatgtttcaaatatcaaatatctgctgctcactaagatggccctttatttctgggcaaaatatttctcatacttacaaagtttctccccttcactgtttttaatgtaaactgagtaggttaagtaagaaaaggtttctggactttcagaagatgctaacagggacttctctctrtactttctcagattagtgaattctgataaaagkctctccacatttgtagattcacaggatttctgccttctgtgtgttttctgatgtgctataagtgatgacttctggtagaaagtcttctcacattcattacatttgtagggtttctctcctgtgtgggttctctgatgtactgtgagggatgacttgtggtaaaaagttttgctgcattcattatatttatgaagtttctctcctgagytctttgatgtttagtaagtgctgatttctggttaaatgttttgctgcattgaatacatttatatggcttctctttttatgtcttttttgatgtacagtaagggataacttctgggaaaaacttttcccacatgcattacatttatatggtttctcccctgtgtgtgttctctgatgtactgtaagagatgacttctgggaaaaggttttcccacattcattacattcatagggtttttcccctgtgtgagttctctgatgcacaataagttttgacttcactgagaaagacttcccacattcattacattcacagggcctttctccagtatgagttctctgatgataagtgaagtctggcttttgtgagaatgttttcccacattcgttacattmatagggtcttacacctatgtgtatcctttgatgtactatgaggaatgaattgtaaacaaaggtttttccacattctttaccctcatgggatttctcccctgtgtgagttctctgatgtacttggagataygacttctcacagaattttttcccacattcactacactcattgggtttatcacctgtgtgtgttctctgatgtactgatgtactgtaaggactgacttatatctaaaggcttcccttcagatataagtcacataacctaatgacactttgcatttgtatgtatcgaatgtgcatgacacattcaatacattcttagggtttttgccctgtgtgtatctgccaatgaactgtaaggcctgacctatttgtgaaggttttctcacattcagtacattcataaagtttctcccctgtgtatatcctattatgtactatgatagatgaactgtggctgagagctttcccacactcattacattcatagaactttcctcctacgtgtgtttgctgatgtttagggagaactgacatatgccaaaaagaactcccataatgactattttgaaaggttttcttttctgcgtatgtatgctgttgagagagacttggtttcttaaagatttccctaccttcattacattcaaagcttgtttttcctttttgagttctttcagtgtcaataaagagtgacttttgccaaaattattctcacactcatagtattttttccccatgattcctccatggtgtttatttagagatttctcaccaacagacctcctcccacagcaattaaactcgtagtgattttcccttctgtgagtactctgatgaacaaggaggtttggattgtcagaaaaggctcttagttgttcattatattcacaaggtttctcccagaagcacactctcttatgggtactgaaggctgcctcctcatgaaaagctttcccacactcaaggtattcaaaaatttgcttcagagtttgaatatcctgatgctgaaataagtcctcattctaacagatggctttctcatttctrtcacactcaaaatgtttctctctggcataaggatgctcatgtcatatgaaggagcaatttcgcatgtgcactgagctcatcaagcttccttccaaaggagtttctattactaacaattaattctgaaatataattcacgttcattatacataagtcatatttatcaggtatttttctcattggaacaaggtttgaatttatattaaatgtttctcctaaaacactatttctgtcttccatcagtattttgttgttgacaaaaccagctttcctcaaatgctggtcttggttttcctggttcttctccatcaggtcaactttccagaattctagaaatgagaatagtttaccatatcttataaatattaacacatttcatrtggaaaggggatgtaacatgcaaatgctctaggatagcccaggcatctggtctgaaagtaatcctgaaggcatacatctcactcccttaggattagacaaaacaaactgaatatgaaaaaaggagaggaatctgcaaataaaaacacagtaatctggcactttagaaatgtgaccttcaaaactggataaagtggaataaacaaatacarcaaatggtattttaggatgaatggtagaggcatgaaggggaatcatcgaaagcattgaatagtaggtaaaattgccagaaaaaaaatcaggtgatagtgtttgaggggygacrgcaaagraaaaattaagtttggaggaggcaaatgtaggtttttatctcctgctgtaaaatactcactaatacatatgtttccaatgcatcactaattcttttctttgtttttattttttttattttttgttttttgagacagaatgtagctctttgcccaggctggattgcaatggcacaatcttggctcattgcaacctccacctcccaggttcaagtgattctcctgcctcatcctctcaagtagctgggattacaggcacccgccaccgtgcctggctgatttttgtatttttagtagagacagggtttcgccatctttgccaggctggtctcgaactcctgacctcaggtaaaccwmccacctcagcctctcaaagtgcagagattacaggcatgagccaccgcaccctaaggtcctagcaggtgttgctctatctctgatttcttttaaattatctgaatgagtagtaaatcagtggacacatactagcaagtggtatttgtatttttagtagagatgggatttcaccatattggccaggctggtctcaaactcctgatttcaagtgatctgcccacttcagccttccaaagtgctgggattacaggcatgagccactttgcctggctcttcttttctcttccactcatcaacaccaaattacaatttcagacagcaataattttccatgtgcaaaagaaaactcctattgcccagacagtaattcttactctagctgattcacaccaaaagccaatgtccagagaaagcatacatgtaggctatggaaacaagatcaggtatgtagttttattctgctgttgtatcttcattttcttytaccacagttgtcattaatgaasctgtcatagccatcaaatcataaaatttccctatttatcaatttatttcataaacagtcttgtacctcacacaaccctatttttgtatatataaagtcatcctttacttttcatatacatataatatataatatataygtgtgtrtatattacatatatgaatatacatatataattttttaaccatttatttatttcagcatgtctggtttctctttccagtgtgagctttaaagaccatagttttcaacctaatcttagaatctttactgatcttcatacagttaatcctcattattcatggattttgtgacaacaaattcatctactcattaaaacttatttgtaaacccaaaatcaagactcttggtgctttcattgtcaagaacatgcactgagcacttaaaaacttcagtcacccagcacacatattcccaggtgaaactgaacaaggccatgctctagcttcttgtttcagttctcatactataaacaagtgcccgtccctggtactgttagtgccacatttttcagttttgtgggttttgctggtgatttcactgtttaaaatagtccgctagtgtaggactgaagtactgtctctcgtgttcctaagtgcaagaargctgtgatgtgcctgtggagaatatatgtgtgttaaattagctttattcatgagatgtagtgccattggccataaattcaatattaataaatcagctatatatatgggtatatttttaaaaataaacccatattaaaaaggattatgtatggattagctaacaaaaatgtgggcagaggctggcaggaactaaccctgtatttcatctgggagcaatgattcaatattcattaattcagtgcttgtggtaactttccagaacatgaataccatgaatcatgataatcaaccatatctttttattatgaagcttcctctgacaactatcaccctgttcttacccagattcaacacaatattaacaatactatggtcaaaaacctaccacatccctgagcctagtgtcccaaaggactaagaaacaaaacagataaagtcgacactcacagaccagatctgacaaatggattctatttgctattggcaactgtcactccttattaccacagtcaccatcctctgctgtccacaatccaaaccatctttcctccataattgctcatccccaaccacagacctgcgttataagcatccacttgggtactgggcctttcaatgttagcctactcagcagctggatgccttcaagaaatagctattatcccataatatcccaaaaaatcttcataaatctttacagttaaaaggtggtgatattaactttatcactttgtatgkcactgctctataacaaatatttctttctaactgtttaactttaaaatattttcatgctggttttgttyttttgccacaaatgcaccctaaggtcctagcagtgttgctctatctccgatttcttttaaattatctgaatgagtagtaaatcagtggacacatactagtaagttgcatgcatcacaatttcttggaaggctatttcaaaacacaaaccttaaacttcttgccaatttacacccaataatcaagctgaatatattcaccttagcatrtctacttaaaaagagttccttggttttctgtgtgaataaatgtaaaagagtactcacaacccaggccatacaatcaacaaagaaatatctactgcatcttacctagtaaaggaaggaagagtraaagagggatctttctctctgggggtagaaaaatttaagtggaaaaaaaaactagtcaagaacttaatctggtcaggtatcagataatcaggtattagatagtctaatattagattaacatacagtcattttgtgtacatgaataatgcagctaatggatatttcacacaaaaaaatagcaaacttcagctgtaacctaaaatgtatgtaacaagaacaacagcaataagactttattatatatgcaaggtactgctttaaccacttttcacttattcattcatttaaccatctggacaggaaagatacacactagaatgaaaagggcaaacaagataaggagcactacatgtttgaaagacatctaggtgactttaccaaatggagttaggcagggtttggggcaacagagaaaaataaatttggtcaggctaaatgtggccacacgtgaggcttgttaaagaactaacattttaggccaggcacagtggctcacgctgtaatcccagcactttgggaggccaagataggcggatcacaaggtcaggtgttcgagaccagcctggccaatatggtaaaactccgtttctactaaaaatacaaaacttagctgggtgtggtggcgggcacctgtagtcccagctgcttgggaggctgaggcagaagaaatgcctgaacctgggaggtggagcttctagtgagccaagatcgcaccagtgcaatctggcctgggcaacagagcaagactccatctcaaaaaaaaaaaaaaaacttacattttaggtgttaggtaagaggagagaaatcatagatttatcctgccaggctagtaacaaggtaaatcagaagtttgaagttttacattttaagtctaattctatcatgaattagattaatcagagcaagatcataacaaatatatggatctgcttgtgggtgatgtcagtagaaagtaagaataagaaggtattttgaagacactttataaaagtgaaacaagaactgcaaaacaacagtaagagtgtgataatgtatggtggctcacacttgtaatcccagccactcaggagactgaggcagaagaaacatttgagcccaggagtccaggaccagcctgggcagcacagcaagaccccatctcaaaaaaaaaatttttgagagagctagaagatttaaagtggtttcatttttgtcagttatagtagacctaatgaattaaaaatgtcaagtgatgaattaaaaatatgaagtgaaaattttaaatttgtgagatataattttactttttagcttttgctgtattgagaaagttagaattaaaacccaagaagaatttaacgtaagtaggtraaatactgtaggagtctagagcaaacgggacaagtgagaragtgataaaatttgagaatcacaagctttaagtcttgagaatgtataagagagttgtgaataatgttttgagagaattgctgtaagagagaacagaaggtccatagggtagtttttgaagatgcatagaagagccctgggaatcgccatccatccatctaatagatatgttattatgggacaattgtgtgccaggcttcatgccagaaacagagtatgatggtctgagcagggcagacaagaggtggataagcacttcaagattgagtgcttatcaatcttgatagataaggggcaatatggcaagatggtcatcaaaaggggcatcagaaaggggcaatatggcaagatggtcatcaaaaacataaactttagaggtgtccccctttatggccaatgaagacagtctgggaacctgtgtggcactggcatatgaagtgctatacctaggggacataaattcagtcaatgtctgtagcaatagtgatacacggcggggtatccatttgctcctttgtaacttaaatcagagaactcccaactaaaccagctgcttggggcctagatgggaggtagaactttcattgaatgccttttccaaaagctcaccactgtgtattctgcgaagtgccttggtcactatcagtaatgtctggtcagaaaggtgtgttcaggtgaggtcctgtattgtggccttgacacctgttactttgatttttattctgggtatctgtgaggcaagagattcccagagatctttaccccaaagggggcaactcttaggcaatggcctaaaaatgtagtgagagtatcattttttggccaggtttaggacatccagtgctaggacgactgcctgaaagtggccactggtgctgacccttggtcaggagcatcctgaataaaggatggaaagcagcaacattccaccgagctccagcatgtatagtctagaaactcctatttctgttcagttaatctcacagggatcctcaggtagccaaggacctcctccagtaccatggtayttgccaagaaactgagaacaaagaaagccacccctcccacagatggagtatgccagagggctcgggtgtggctccatcctacatcaaggaggttttggtagctgtgccaaacttgcagcgccctgcttctgtgacccaaggaacaatgggcagctggtatggagggtcacaagctcaggacctgtaaaagcctctatttccaagagaccccagtatgtraccaacagttgctgctctaatgatgtacagtgcaatgtcaaagagggcagtttcttgcgtcaggggctcatgggcaatttgtggccaycatgagttatgagagaaggctgctaaagcccctatggtaaaggagtctttgaggagactcatgggattcctgtcatattgcaatgtggacagattctaaagccttttgttgaagggaatccatccaaggtgggccaacttgcaagtaacagcatcagtgaaattaagtaaaacttgtaaatgaggaatatgtcacctctagatctcaaagaggactgaaagatatttgtattaacattgtgtgtactgagaaagtcaatagctgtttcttgatggtgtcagggatgaaatggccctcagattaccaaataactttcaggaatttaacagaggtggcaagacccctcacacaacgtgtggagaccactttttgtgtgctcctttttcagtacttgtatgtcctgaattagtgtgtcaaaagtatcttctcagaagatgtcatcaatgtaatatgatagttgtcctcttagagaaatttggacgcagttgagatcttgcctacaaagactatgtgatgacaaggctgctacggtaccccatggataacctggtagaggcatactgtgtccctttagagatgaaggaaaactacagcctagaggctgttgaaataggctctgaacagggcatattagccatgtgatggttaataccaggtgtcaacgattggattgaaggatacaaagtattgatcctgagtgtatcagtgagtgtgttgccaaaggaggctaacatttgagtcagtgggctgggaaaggcagacacacctttaatctgggtggggcacaatctaatcagctgccagcatgactagaatataagcaggcagaaaaatgtgaaaaagactggcctagcctcccagcctacatctttctcccgtgctggatgcttcctgccctcaaacatcagactcttcagttttgcaatttggactggctctccttgcccctcagcatgcagacagcctgttgtgggacctcgtgatgatgtgagttaagacttaataaacccctctatacatatatatgtgtacacacacacaaatacacatattccattagagttctgtccctctagagaaccgtaatacagattttggtaccaggagttgttctagaggaagagaatattaagtatgaaggtctttcattggttttggagtttctggagttagctgcttgctatgattagacccaaaaatgccaaggactctacttctaatagtatgaaaaacactgatagtccttggcatgaactgtttagatagttatgcaaaataaacgcatttgacactcctgattcattgctcatgacaggcaaggagtttagtaaccctatatatacctttgaccatatgtggagaaccaaggaacataatgaagctggttggttgctcctacattcagtggacaaagtggtgaaagaaaatgatgaactaggctgggcacggtggcttatgcctataatcccagcactttgagaggccaaggcgggcggatcacgaggtcaggagatcaagaccatcctggccaacatggtgaaatcccgtctactaaaatacacacacamaaaaaaaattagatgggtgtggtggtgcgccctgtagtcccagctactcaagaggctgaggcaggggaatcacttgaaccctggaggcagaggttgcagtgagccgagattgcaccgctgcactccagcctggcggccgagcgagactccgtcaaaaaaaaagagaaaatgaactcagggattctctctcccagcttcagaagcagatactgagattcaaatctgctaagattgccctgagtgagtcttatctcctgtagagaaagagcgaaaattgtggaaaaacagacacaagctcttaccatgagagtggctgacatgcaacaaaaggtgaatgcacagccacgctaggtatctattgcaaaagtaagggcattgattggaaaagaataggacctgcaacttggaatggtgatgtgtgggaggaccctgatgaagctgaggacactgagtttgtaaactctgatgaatcttttttgccagaagaaacagcttccccatccctggtagtggcaacatcccctccctgacccatgctgccatcagcctttccacctttgtctgaggagataaaccctgtgctgcctgaggcaatggtgatggttgccaggcaagataatgttgattttcctcaggagccacccccaacacccgtttgcttctagacctataactaaagtcccaacaggcccctagaggtgaggttgagagtatgcactacactcaaaaggaactgcttgagttttctaattcatataaataaatctgcagaacaggcatgggaatggatattaagggtgtgggataatggtggaaagaacayaaagtttgatcaggctgaatttattgatttgagtccactaagtacggactctgcattcaatgttgccacttgggtagttaaaaaaggttctaakagtttatttgcttggttagctaaaatacagataagaagatgatccactgtgagcaagctggatatgcctcatctcccttggtttaaygtagaggaagggatacaaaggcttagggagattgggatggtggagtggattagtcactttagacctactcatcccagctgggagggcccagaagatatacccttgaccaatgccttgtgaaacagatttgtgagggcaacacctgcatctttgaagagccctctaattgctcttctctgtatgtcagatctaacagtgggaactgcagacactcaactacaaaatttaaatataatgggaataattggatcccaaggtggcaggggccaagtggcagcactcaaccatcaaaggcaaggtgggcgtggctactctgatggacagcagaggcaaagtggcaatcagaagatcctgactaatgtagagctctagcattggctaatcatggtgttcctacaagtgaaagtgataggaagcctactgcattcctacttaatttatataagcagaaaatttctaagtcgaagggacaaaagtctaatttgaattataaaaacagagaatcagccagcacagtggctcacacctataatcccagcactttgggaggccaaggcaggtggatcacctgagctcaggagttcaagactagcctggccaacatggtgaaaccccatctgtactaaaaatacaaaaattagccaggcatggtggcacaaacctgtaatcccagctactcaggaggctgaggctggagaattgcttgaacccaggaagtggaggttgcagtgagtcgagatcacaccaatgcattccagcctgaatgacagagggagactctgtctcaaaaacaaacaacaaaaacaaacaaaaaaacaaactagagaatcacaacccctcaatcaatttccagacttgagccagtttacagatccagaacyccttgaatgaaggggagaccaggtccccttgaggaagaaccctactacattaccgacaatttacatagtgactctttctcccatccttccacaaggagacctccaaccttttaccagggtaactgtgcactggggaaagtgaaatgatcagacatttcggggactgctggacactggctctgagctaacgattccaggggacccaaaacatcactggtcctacagttaaagtaggggcttatagagatcaggtaattaatgaaattttagctcaggcccaacttacagtgggtccagtgggtccccggacttaccctgtggtcattcctgagtgccagaatgcataattggcatagacatacttagcagctggcagaactcccatattggctccctgactggtaggataagggctattatggtggtaaaggccaaatgaaagccattagagctgcctttacctagaaaaatagtaaatcaaaaacaatatcacatccctggagagactgtggagattagtgctactaccaaggacttgaaagacgctggggtggtgattcccaccacatccccattcagctctcccatttagcctgtgcagaygacagatcttgkagaatgaccatggattattgtaagcttaacaaagtggtgactccaattgcagctgctgtaccagatgtggtttcattgcttgagcaaattagcacatttcctggtaggtggtatgcagccattgtcttggcaaatgtcttttcctccattcctgtccataaggcccaccaraagcaatttgccttcagctggcaaggccagcaatatacctttactgtcctacctccagggtatatcaattctctggctttgtgtcataatcttattcggaagcaccttgatcgctttttcttatttggagacaccttgatcacttttcgctgccgcaagatatcacactggtccattacattgatgatattatgctgactggatccagtgagcaagaagtagcaaacacactggacttactggtgagacatttgtgtgccagaggatgagaaataaaactgacttaaattcagggaacttctacctcagtaaaatttctaggggtccagtggtgtggggcctgttgagatattccttctaaggtgaagaataagttgctgcatttgaccaytccttcaaccaagaaagaggcacaatgcctagtaggcctatttggattttggaggcaaagcattcctcatctgggtgtgttactccagcccatttatcaagtgacccgaaaggctgtcagttttgagtggggtccagaacagaagaatgctctgcaataggtccaggctgctgtgcaagctgctctgccacttgagccatatgacccaacagatccaatggtgctggaggtgtcagtgacagacagggtgctgtttggagcctttggcaggcccccataggtgaatcacratggaagcttctaggattttggagcaaggccctgccatcttctgcagataactactctccttatgagagacagttcttggcctattactgggctctggtggaaactgaaggtttgactatgggtcatcaagtcacctggcaacctgaactgcctattatgaactgggtgctttctgactcatatagccataaagtgggtcatgcgcagcagcattccatcatcaaacggaagtggcatatatgtgatcaggctcgagcaggtcctgaaggcacaagtgagttacatgaggaagtggctcaaatgcccatggtctccactcctgccaccatgccttctctcccccagcctgcaccgatggcctcatggggagttccctatgatcagtgaacagaggaaaagaggactagggcctggttcacagatgattctgcacgatatgcaggcatcacctgaaagtggacagctgcagcactacagcccctttctaggacatctctgaaggacagcggtgaagggaaatcttcccagtgggcagaacgttgagcagtgcacctggttgtgcactttacatggaaggagaaatggccacatgtgcgattatatattgattaattggttgtagccaatggtttggctggatggtcagggacttggaagaagcattactggaaaattggtgacaaacttggggaagaggtgtgtggatggatctctctcagtggtcaaaaactgtgaagatatttgtatcccatgtgagtgctcaccaacaggtgacctcagcagaggaggattttaataatcaagtggataggatgacccgttccgtggacagcactcagcctctttcctcagccacccctgtcgtcgcctaatgggcccatgaacaaagtggccatggtggcaagagtggaggttatgtatgggctcagcaacatggacttccactcaccgaggctgacctggctatggtcactgatgagtgccctatttgctagcagcagagaccaacactgagcccttgatatggcaccattcctcgggtgatcagccagctacctggtggcaggttgattatattggacctcttccatcatggaatggacagaggtttgtcgtcattagaatagacacttactctggatatgggtttgcctatcctgcacacaatgcttctgccaagactaccatctgtggactcacagaatgccttatccaccatcacagtattccacacagcatgtcctctaaccaaggtgcttactttatggctaaaaaagtgcggcagtgggctcatgctcatggaattgactcatctaaccatgttccccatcatcctgaagcagctggattgacagaacagtggaatggccttttgaagtcacaaatataacaccaactaggtgacaatattttgcaaggctgrggcaaagttctccagaaggctgtgtatgctctgaatcagcatccaatatatggtactgtttctcccatagccaggattcatgggtccaggaatcaagggatggaagtgaaagtggcaccagttaccatcacccctagtgttccacaagcaaaatttttgcttcctgttcccgcaaaattaygttctgctggcctagaggtcttagttccatagggaggaacactgccaccaggagacccaacaacaattccattaaactggaagattgccacctgaacactttgggcttcttctacctttaagtgaaccggctaagaagggagttacagggccgggcacggtggctcacgcctataatccccgcactttgggaggccaaggcgggcggatcatgaggtcaggagtttgagaccagcctgaccaacatggtgaaaccctgtctctactaaaaatacaaaaattagccaggcatggtggcatgtgcctgtaatcccagctactcaggaggctgaggcaggagaagtgcttgaacccgggaggcagaggttgcagtgaaccaagatcatgccattgcactccagcctgggcgacagagtgagactccttctcaaaaaaaacaaacaaaaaaaagggagttacagtgttgcctgggatggttgtcccggattatcaagatggaatcagtctactactccacaatggaggtaaggaagagtatgcatggaatacaggagatccattagggtgtctcttggtattaccatgtgctgtaattagatcaatgggaaactacaacagcccaatccagccaggactacaaatgacccagacccttcaggaatgaaggtttgggtcactccaccaggaaaaaaaccatgacctgctgaggtgcttgctgaaggcaaagggaatacagaatgggtaatagatgaaggtagtcatcaataccagctatgaccatgtgaccagctgcagaaacgaggactgtaattgtcatatttcctccctcttttgttaagaacatgtttgtgcatatatatacttgtactaaaaaaatcttcattttatttcctttccctttatcatgtgacataagatttattgacttcacatcagcatttatgtattgttaactttatgtaatagtatttgggttgggaattggtacgtttcccattgtatgaaggacagttgtattatgttaggcataattatgaccttattattgtctttatttgaagattatatatgatctcaggagatgtgtatgggttcaagttgacaaccggtggacttgtgatggttaatactgagtgtcaacttaattgtattgaaggatacaaagtatkgatcccgggcgtgtctgtgagggggttgccaaagaagattaacatttgagtcagtgggctgggaaaggcagacccaccttaatctgggtgggcacaatctaatcagctgacagcgaggctagaatatatayaggcagaaatacgtgaaaagagagactggcctagcctccccgcctacatctttctcccatgctggatgcttcctgccctcgaacattggactccaatccttttggaactaatccttttggaagttggactggttctccttgctcctcagcttgcagatggcgtgttgtggggccttgtgtttgtgtgagttaatccttaataaactcccatgatatatatatatatatatatatatatatgttccattagttctgtccctctagagaaccctaatacaagccaaatctacaatagcaaaatatttaccagttgtttattagatagagtcagtaacttcaataatattgggtatcaggtctgaggaccttaaggttccagtaatcacaccatgaggcactattcacattcatgctttccaggttaaaaaggccaagtttggctgctagatgcaggtgcagtgggataatcaccccttcatacaagtttcaattctttttttttttttggacagagtcttgctctgtcacccacgctggagtgcagtagtgcaatcttgactcactgcaacctccacctcctgtgttcaagtgattctcatgcctcagccacccgagtagctgggattacaggtgtgcaccaccatgcctagctaatttttgtatttttagtacagagagcgttttgtcatgtgccccagctggtcttgaactcctgagttcaagcaatctgcctgcctcagcctcttgaaatgctgggagccaccgtgcccagccttaattcttgaaggccctgttttaatttacattggccacattaactattttatttaattttatttatttatttattttgaggtgtagtttcactcttgtcacccaggctgaagtgcagtgatgcaatcttagctcactacaacctccgcctcccrggttcaaacgattctcctgcctcagcctcccgagtagctgggattacaggcatgcaccacyacacctggctagtttttttgtttgtttgtttttgtttttgttttttgtatttttgtatttttagtagagacgggattttgccatgttggccaggctggtctcaaactcctgacctcaggtgatccacccgcctcggcctcccaaagtgctgggattacaggcatgagccaccgtgcccagcccgatattattttaactgtggttttcacaaggtcccttttcattaagccaagttgttaagtgccaatgacttcattttaatttattgctcactgattccatgtccaccacggtacattttaaggtcataagtgctatgaccatgtggtatcttggagagacaacagttaaggtgaggcatacttatttagtctctattttatattcagaaactcccctaaaaacatacagacaaggaggggaagttctttttattctgctcatatttatagatttctttctccagagagcctcaaatcattatcatcagggtgagaggcctcctccttccctgcaaggcaatggttggtttacagggtttaagaacctcaggcttaagctgggtttgaattaaccccctcacaatgccacagggtgccatagggtggcttttccctatgaccctacagaggaggatttttcttgcaatggaggctcrggcagcaaagtactgcagtggaaacctgcaaggcccatggcccagtggtgggtggactgaaactatccttagcaacagtcccgccttttccatgacacaggcttttttattgctgtctatatataaattgccaaacaatattttagatttctagccacaataagttgcagctttccatttcagtcactgtcccatcaccatgtggaccttctggatgagaacagggaaaggttcaggggcccaatggcccaccttgtaggcagctgccccttctgacagggagggccaatcaatatctccagggttaggatccacatccaggaaggtcattttgtttatggcccaggtgggagccaacaagctgtgccattacaagcttagccctctggcttcttggyaagcagccatactaagcaaagcccaggtgcactggctaggggttttgcatggggaaagcagttgagctacattctccagcaggagaggctggtaccaaatgctcctkctattttttcatcagcycctsggttgtgggctacaacagatttgcaccttcatgctcttagacaccaggagagcacgctgaacagaagcaggggaagcaacagcacaagtgccaggcaaggccattactcttgcctgaaaaacactcactaggcatccatggtgccatgtttaattctccctggagtagtggtcttctttcttcctttccgctaacctcaggaagggcagacctgtcccagggggtgggtgcacratcacaaataacatctgtatagctcccccaggtagccagtgatggttcacagagtagacacagcaacaaaagagatctggcctgactcgtggtaagctgaactcaagcaccaactggttagggtgctgtgttgttgctgcctctacaggagggagcctcataaaccacctataaacacaccaaacccaagagcacagaatgccactgtacagtcaaataacaatcctcatgttggagatgagagccacctagggtgggaagaagtgaaaacaatgaaggccaaagcacaagcccaccagcaatggccagtttggacccaggcagcctttgctgtatcatggagccagttatccaccaagaacagttaattacagctcaccaggggccctgggaccatcctgttcattatgccaattgtcatcccctcctcttcaccctgtgggtgaggaaggaattcctacccttgggtcgtgggatggctgaagcatactcaacacctcataggtgattttgacagcatttatcagtcacttgtacttacggcccaggagaggagggcactgcaacaggcaagaccacagagatatttcactcgggaataagtgaacaaccaagggctttgggaggcaggcttttcactatcaagagagctttattcccctagttcctgcaggaggatgcaattgtctggtttaattctgagagctggcaggaaactgaaacatactactcagggataagcaggaactgtgcctggaatttattttattttattttatttattttagagatggggtctcaatctgtcatccaggctggagtgcagtggcattatcacagctcacagtagcctcaacctcctgggcccaagtgatcaccctgcctcagcctcccaagtagctgggactacaggtgtgcatgccctattaatttttcaattttttgtrcaaagtctcactatgttacccaagctggtcttgaactcctgggctcaagcaatcctcccaccttgacctcccaaagtgctgggattataggcatgagccacagagccgggcctgggcctggtccttttgataaggaaggtttttcggctcagggacttcatctacaggagcaaagtggggagtagaactgtggctactccatcatgagtaaatgttcctgacaagaaatgctaaaaatccttcacggcaaagtgaaagyacaccagacagtaactcaaatccaaatgaaaaggaaaagaacactggtaaaggtaatcacacaggcaaacataaaagtcagtattcatgcatttttgacaactgaaatcctcttttctatgtggtttaaaaaacataaaatgggctgggtgtgatggctcacgcctgtaatcccagcactttaggaggctgatgcgggcagatcacttgagatcagaagttcaagaccagcctggccaacatggtgaaatcctgtctctactgaaaatacagaaattagctgggcatggtggcaggcatctgtaatcccagctactcaggaggctgaggcaggagaattccttgaacctgggaggcagaggttgcagtgagctgagatcacaccattgcactcagcctgcgtgacaagagtaaaactccatctcaaagaaaatgaataaaacataaaacagtaattataagacaatgttgatgagcaaacattgtataaaaatgtaattatggaccaggcgtggtggctcacacctgtaatctcagcactttgggaggccaaagcgggcagatcacaaggtcaggattttaagaccagcctgactaacacggtgaaaccccgtctctactaaaaatacaaaaattagccgggcatggtggcgcacacctgtaatcccagctactcaggaggctgaggcaggagaatcacttgaatccgggaggcagaggttgcagtgagccaagatcacaccactgcactccagtctaggtgacagargaagactctgtctcaaacaaaaaaaaaatgtaaatatgacataataacttaagggggacagagctatataggagaaaaatttttgtatactataaatatcaagttggtattcattcaaaccagagtggtaaagccaagcatggtggtgcatgcctgtaatcccagctattagggaggctgaggcaggaggaacgcttgagcccaggagttcgaggtctcagtgcactgtgactgtacctgtgaatagccactgcactccagcttgagcaacacagcaatactccatctctttaaaaaacagcaacaaggaggctgggtgcagtggctcacgcctgtaatcccaacactttgggaggcttaggtgggcagaatgcctgagctcgggagtttgagaccacctttggcaacatgtgaaacccggtctctactaaaatacaaaaaattagccaggcgtggtggcaggtgcctgtagtcccagctactcaggaggctgaggcatgagaattgcttgaatccaggaggcagaggttgcagggagccaagatcgtgccactgcactccagcctgggcaacactgtctccaaaaaaaaaaaacaacaacaacaacacaaactagagtggtataaattaagatgttaactgtaatccccaaagcagccactaaaaaagttatttcataaaagaaatgaaaaaattcaaaatggtacataagaaaacatgtgccgggcatggtggctcacgcctgtaatcccagcactttgggaggctgagatgggtggatcacgaggtcaggagttcatgaccagcttggccaacatagtgaaaccccatctctactaaaaaatacaaaaaaattagccaggagtggtggcggacacctgcaatcccagctacttgggaagctgaggcaggagaatcgcttgaacctgggaggcggaggttgcagtgagccgagatcgcgtcattgcactccagctcgggcaacagtgcaagactccgcctcaaaaaaaaaaaaaaaaaaagaaagaaagaaagaaaacatgtatctaacacataagccagtaaaggaggaacttaggaacaaaaaatatataagacatatacaaaacaaaaaccacaatggcataaatccttcattatcaataatcaatttaaatgtacaatcatgtgtcacttaatgacagtgacacatttctgagaaatatgtcattaggtatgtttacaaaaacctaaatggtatagctactacacacctaggctatatgatacggcctattgctcctacgctacaaacctgtatagcatgtgactatactgaatactgtaggcaagtgtaacacaatggtaagtatttgtgtgtctaaacataraaaaggcatagtaagtatacagcgtgaaagataaaaaggctgaagcacagtggctcacacctgtaatcccagcactttgggaggtagaggcaggtggattccttgagaccaggagttagagaccagcctgggcaacatggtgaaaccctgtctctacagaaaaatacaaaaattagttgggcatggtggtgcatgccttgtagtcccagctatttgggaggctgaggtgggaggatcgattgagcccaggaagttgaggctacagtgagccaggatcatgccactatactccaccctggacgacagagagagaccttgtctcaaaacaaataaacaaaaagactaaaaaatggcacacctgtatagggcacttaccatgaatggagcttgcaggactagaagttgctctgggtgagtcagtcaatggtgattgaatgagaaggcctagaacagtactattactctagactttataaacattgtacacttgggctacactaagtttatttttaaaatagttttcctttcttcaacaataatcttagtttaccataacactttttactttaacattttgactcttttgtaatcattgtatagctgtacaaaaatattttctttatatccktattctccaagcttttttctatctatatatctatttgtttatttttactttttaaatgtttcattaaaaactaagacacacacatacacattagcccaggcctacacaaggtcaggatcatcattctcactgtcttccacctccacatcttgttccactggagggtcttcaagggcaattaacacacacataaagctgccatctctatgataacagtgccttctggaatacctcttaaagagactgtctgcagctgttttacagccaccttttttttttttttttttttgagacagggtctcactgtctcccaggctagagtgcagtgctacaatcacagttcattgcagccttgactcccaggctcaagagatcctcccatctcagcctcttgaatagctgagactacaggcatgtgccaccacatctggctgatttttatatttcctgtagagatggggtctcactatgttgcccaagttggtcttgaatacctgggctcaagtgattcacccggcttggccccgcaaagtgctggtattacaggcatgagccaccgcacctggcctgcccttttttaaataagtaggagatgtacactctgaaataatgataaaatgtatagtaaatacataaaccagtaacataggcatttattatcatcatcaagtattatgtatgatacatcattgtatgtgctatactttttaggactgtcagtgcagtagatttagaacagcaccagcacaaacgtgaataatgagttatttaggtatttagtttcttttttttttattatactttaagttctagggtacatgtgcacaatgtgcaggtttgttacatatgtatacatgtgccatgttggtgtgctgcacccattaackcatcatttacattaggtatacctcctgatgctatccccccccaccccacgacaggccccagtgtgtgatgttccccttcctgtgtccaagtgttctcattgttcaattcccacctgtgagtgagaatatgcggtgtttggttttctgttcttgcaatagtttgctgagaatgatggtttccagcttcatccatgtccctacaaaagacatgaactcatccttttttatggatgcatagtattccatggtgtatatgtgccaaattttcttaatccagtctatcattgatggacatttgggtggttccaagtctttgctattgtgaatagtgccgcaataaacatacatgtgcatgtgtctttatagcagcakgatttataatcctttgggtatatacccagtaatgggatggctgggtcaaatggtacctctagttctagatccttgaggaatagccacacattgtagtatttagtttctttcaacaatgttttgtagtttcagtgtacaagtcttgcctcatttggttaaatatactctgaagtatcttaatttttttaatgctattgtaaatggttactgcaccattgtactccagcctgagtggcagagcaagaccctgtctggaaagaaaaaaaaaaaggaaagttaaaaggttttgtgggttttttttgtttttgtttttttttgagacagggtctcactctgttgcccaagctggaatgcagtggcactatctcagctcactgcaacctctccacctcctgggttcaaaagattctcctgcctcagcctcccaagtagctgggactncgcatgccactatgctcagctaatttttgtattttcagtagagatggggtttcgccatgttgaccaggctggcctcgaattcctgacctcaggtgatctgcccacctcagcctcccaaagtactaggattacaggcataagccactgagcctggcctagaaaagttaaaagtttgtaaaggaaaaaagttacagtaaactaaaattaatatattgttgaagaaaaatattttttataaacagtgtagcctaagtgtacagtgtttataaagcctacagtagtgtacaataacgtactaggccttcacactcaccactcacccactgactcatgcagagaaacttccagacctgcaagatccatgcatggtaagtgcctatacaggtataccattttttttcatcttttatactatatttttactgtaccttttctatgtttacatatataaatacttaccattgtgttacaattgtctacagtattccatacagtaacatgctgtacaggtttatagcccaggagcaacaggctatatcgtatagtctagatgtgtgrtaggctataccatctaggtttgtgtaagtacacactctatgatgtttgcacagcaatgaagttgcctaacatgtcccagagtgtatccttgtcactaagcaaggcataactgtatgctgaatctacaggtaaatttagagagcgtgacaatttcaagatattattaggtgttccctatctccatatttatgtttcctttaatgcttttcaatatacttttcttgttttctccattaaaggccttgctgaccaggcccagtggctcatgtctgtatttccaacactttgggagtccaaggtgagagaatcgcttgagtccagaagttcaggaccagcctggcaacaagaagaaaccccatctccacaaaaatacaaaaaaaaaaaaaattagctgggcatggtggtgtgcgcctgtggtcccagctactcaggaggctgaggtgggagaatcagctgagcccgggaggcagaggttgcggtgagctgagattgcaccactgcactccagcctcggtgactgagcaagatcctgtctcaaaaaaattaaaaataaaggccttgttattgcaaatggtttaaattctttgaattggagccaggggtggggggttgttttttgtttgtttttttgagacagggtctcactctgtcacccagactggagtgcagtggtatgatcatagctcactacagccttgatctcctgcactcaaacctgaatcatgttttctaaagatgactggtgtggccaggcgtggtggctcatgcctgtaatcctagcactttggaagggctaggtgaaaggatcacttgagctcaggagttcaagaccagcctgggcaacatagtgagaccttgcctctaaaaaaatataaagatgaagccaggcatggtggctcatgcctgtaatcccagcactttgggaggccgaggcaggcggatcacctgaggtcaggagttcaagatcagcctggtgaaatcccatctttactaaaaatacaaaaattagccaggtgtggtggtgcatgcctgtaatcccagctactcaggaggctgaggcaggagaatcacttgaacctgggaggcggaggttgcagtgaaccgagaccgcaccattgcactccagcatgggcgacagagtgagactgtctcaaaaataaaataaaataaaatgaaatagatgactggtgcttagaaagacaacagattatatacattgatcttacatttgccaacttgctatatactcagagtatttttaatcatctgtctgcagacaatttttttctttttctttttttttttgagacagggtctcactccatcacccaagttggagtgtgacagtgcaacctccgctcactgcggccttgactgcccaggctcacgagatccttccacctcagcctcacaagtagatggggctacagatgcatggcactttgcctggctaatttttgtattttttatagaaatggggttttgccgtgtgcccaggctagtctcgaatttctgggaggctgaggtgggcagatcgcttgagcctagaaggtcaaggcttgagtgagctgtgatcacaccactgcactccagcctgggcatcagagtaggactctgtctccaaacaaataaaataaartaacaaaaaaaaccctcaaaatccaacttatctttgtcttttatcaggagaatttagtcaattttcacttcctgtaattattaaaatatctggccgtttctttatttttttggtcaggggtgcagcttttaggtgttccacactttccactctttactctccaatactttattaccctttttggrtctgattcaatttgtttacaatggttggttttaattttccactttctctcatttgcaggtttgaaagtgatagtgttttgcttattttagcatttgttcattaaattttaccatgcatatttcttaacgtgtcttcggaaaaacaaacattttagaacagaagtctaactgctaactgacctatgtgctatttttcagtattatgtgtttgtcctttttacacgcaacaagtattactcaccaaagaaatgtttgtttagatttacctacaatcttttttttttttttttgagacggagtctcgctgtgttgcccaggctagagtgcagtggcgcgatctcggctcactacaagctccacctcccaggttcacgccattctcctgcctcaacctcccgagttgctgggactacaggcgcccgccactacgcccggctaattttttgtatttttagtagagacagggtttctccatgttagccaggatggtctcaatctcctgacctcgtgatccacccgcctaggcctcccaaagtgctgggattacaggcgtgagccactgcgcccagcctagatttacctacattcttatcaatttcctctcagcactattgcatcccatttttcgccaactcaataaattatagctctatggactgggcacggtggctcacgcatgtattcctagcactttgggaggccgaggtgggcagatcacttgagtcaggagttcgtgaccagcctggccactgtggcgaaaccccgtctctactaaaaatacaaaaattagccggcatggtggcaacacagctataatcccaactacttgggaggctgaggcaggaggatcacttgaacccgggaggcggaagttgcagtgagccgagatcatgccactgcactccagcctgggcaacagagactccatctcaaaaaaaaaaagaaaaaagaaaaaaatatatatatatatataaaataccaaatacaagacagagtaggtatgctgaatccgagaggcagaagttgcagtgagccgagatcatgccactgcactccagcctgggcaacagagtgagactccatctcaaaaaaaaaaaaaaaaaaaaaaaaaaacaaagaaaaaaaaaaaaaatatatatatatatatatatatataaaataccaaatacaggacagagtaggtatgctgtgtgacacaagagatgtctctctctctctctctccatatacatatatatatatatatatcttttttctttttttttgagacggagtctcgctctgtcgcccaggctggagggcagtggcgcaatctcggctcgctgcaagctctgcctcccgggttcacgccattctcctgcctcagcctccggaatagctgggactacaggcgcctgacaccacgcccagctaattttttgtatttttagtagagatggggtttcaccgtgttggccaggatggtctcgatctcctgacctcatgatcttcccgcctcggcctcccaaagtgctaggattacaggcgtgagccaccgcgcccagcctatatatctcttatgtatcaaacaccactttttcttgtactccaaaaccaatctaacaaatcctgtttggggaacaccttcaacaaacatccagaaataaaacccttcacatgacctccctaactctactgagctagtgcaggcgccatcactgttgtgggccattgcaggatttactgctgcctgctccccaatctgccacccctcagctggcatgttctcttcatgaaagccagagagaggtgagtcagatcctgtcacttctttgctcaaaatcctccaatgcctagaatattcagaaactacacggctcacattctccctcacatcattaaaatttgtgttctgattttgaccccaaaggggtttaaaaacatttgctaaaatatcacaccacattttagtctcctccaaaacaaaagtataaacttcctcacagtaggatcattatattttccacaggtctatccccagctgtaaacctaactggcatgtaaattaataaaaaacttcatacttgttgaatgaataaatgatacacaattaaaataagacaatagaaagggaataaataagaaaaagatctaaaatgagataggcaagaattagatttttgtaaatgctgagaataataactctgtctaaaaaattcaagtgaaaacccaagaacactcagctatgaggtcattacttggaagtgtattatatttattaaggaaaacagaccgattattctaggccacttttacagtggtgcctctaaaaaataaaactcccccatgacatgagtttacctatgtaaacaaaccttcacatgtaccccactgaacctaaaataaaagtcttaaaaaaagacccccaaagagctctctagctctctctctccactatgtgaggatgtaacgtgacattggcagtctgcaacctggaagagggccctcaccagaacctgaccatgctagcatgctagcaccctggtcttggacttctagcccccaaaactgggagaaataaatttcagttgtttgtaacccaaaaaataaataaataaatgaaatgaaatataaaattcctttaaaatagcaaagagcagacacctgaatggacagggaccaatctcactaggcttacagtgggtaggtactcactactcaccaaagtggctttggcttgaggactcttcctctaatatccatgcctcctctccttgctgcaacttgaagaccacctttggcttgctaatgcaataccctgtgaatgagaaatgacttaggactcagccaggcttatagcttcaagccttctgaagaaaaaggtgcagttttaggagctgtagtcaatagttccacttaagcttttcactaggagaggggaaaaaagtttccagtgaccaaaaaaggtcaccttatacctacagcccagggtctcctttgaaccctaaatttcaaccctaaaaaataattcatctctataaaggatcacgtatatcaactgctaaaaaagaaatgaatgctatttgaagtatataaaacgcaatccttacccactgagatgaggaggctgtagttctccagcattacattcatgtacagggtcctctcaatagggcccagatgctaccactcctcctgggtgaagtccacagtcacgtccttgagcgacactgatccctgaaaaagtacatctgtgttcattttacagtgactacaacaaacactatgcaatgtttgggatctaatatcttgtcatgttcactattgatactcaaagaaaaaatgtcacacagcatacctactctgtcctttatttggcattatatcctgtgggagaacaaatcacaaaagtaccttaaccatgtattaatttattgatttgtggaaaaaaaatctaaagttccccaatgtgctggaactgtcttatgttctggggatataaaaattaatactttaaaacactgctctcaaagggttaattatatcattgaaagacatagttaaaaaatatgcctgcaataaggttttgcagaagaaatgcaagaagaatctaaaaggtaatggccacacccgggaaagtgttcaattctgttttgctaccttaagaaattaacgcattgagtcctcacacatcaataatgtatcatggggctgggtgcggtggctcacacctgtaatcccaacacattgagagccccaggcgggcagatcacctgaggccaggaactgaagaccagcctggccaacatggtgaaaccccatctctactaaaactacaaaaattagctgggtgtggcggcatacacctgtaatcccagctactcaggaggctgaggtgggagaatcgcttgaacctgggaggcggaggttgcagtgagccgagatcatgccattgtactccaaactgggagacagagcaagactccgtctctaataataataataacaatgtattatgggccaaagacaaagcaaaaaaaaaaaaaaaagcctggggacactgaaaacacagggcaggttaatagaactacaaatagtactgtttgttggtgaaaggatagagctatattaagatacagatgcagaagcaaaatcaagagctagatgattataagtaatttgggataaattcctttccctaaatattttatcataagttaaacatatgtactataaagtttcttttttgtgagtgtaaataatgtaaacagctaggctagtattttcttccagcgtgctgattttttttttttttttgagatggagtctcactctgctgcccaggctggagtgcagtggtgtgatctcggctcactgcaacctctgcctcccaggtccaagtgattctcctgcctcagcctcctgagtagatgacattacaggcgcgcactaccatgcccagctttttttttttttttttttttttttggatttttagtagagacagggtttcaccatgttggccaggctggtctcaaactcctgacctcaagtgctgggcttacaggtgtgagcctcacgcccagcctcaagwgtactgattttcttaagcactccctaaggtatatctcgaacccaccacttcaagatcacagctgtgggtaacagggagccaataaagaggtgaagtaagcactagagttagatgtccaggtttgcatcttaggggcagtgattttaagaagagtggagaagagcttaagaggaaatgcaaggcaaagaccagagggcaggatgaccacccacattcaggtgtaagaaccggcaggagttggcaagcaattcacagccaaatctggcctgccccattctgtacaggaaccaggaatggttgttacattttttacattttccaatggttaggaaaaaatcaaaagaatattttgggacacatatatgtaaaaattatacaaaattcaaatttcagtgtccataaataaaattttataagaacacaagcttgtgtgtttgtgtattgtctaagctgctttcacacaacagcagggacaagtagtcaccacagactgtatgtggcactctcactgctgcccagcacactacaaatcacaagacatggattcagttataacttcgctgcatttcaagtgccaagcctaatgccatcttgtgacattttattttagttttttttttttttttttagagatggagtcttgttctgccgcctaagctggagtgcagtggcgcaatcttggctgactacaacctctgcctcccaggttcaagccattctcctgccttagcctcccaaaggactgggattacaggcatgagccaacgcgcctggcctattttagctttttattaccagtgcatatcacgtcaaaacaagagaaatgggctttgagtgtcagatttttaaggcacagcggagtgtgggtagttttcttatctaattagctggaatatttcatcacagcttatttggaagccatatatatatatatatatatttttttttttttttttttttgaggaagggtcttgctctgtctcccaggctgtccagtggcacaatcatggctcactgcagcctcgacctcccaggctcaagtgatcctcccacttcaacctcccaagtagctgggactacgagcatgcatcaccacacctggatatttttactgtttgtagagacagggtttcgccatgtcgcccaggctgatctgaactcctagtctcaggcaatccaccctcttcggcttcccaaagtgctgggattacaggtgtgagccatcacgccaggttgttagccatatttttagaaagagttcaaatacaaagacagagaataaagcagtggtttccacaggtgttggaggggtggtaaaggaaatgcggaaatgtaggtcaaaggatacaaacttttaaatatgtaggatgaacaccattagagttttgttgttgttgttgtttgtttgtttgtttttgagaaggagtttcgctcttgttgcctcggctggagtgcaatggggcaatctcagctcaccgcaacctccgcctcccaggttcaaggaattctcctgcctcagccacctgagtagctgggattacaggcatgcgacaccacacccagctaattttgtatctttggtagagacggggtttctccatgttggtcaggctggtctcaaactgctgacctcaggtgatccacctgcctcggcctccaaaagtgctgggattacaggcatgagccaccacgcctggcctgaacacctttagagttctaatgtacaacataaggactaaaattagtaaaattctattagagatttttattaagtaaactgtagctgctcttgtcacaacaaaagcaactatgtgagatgacaratccattaatctgcttcactaaacactttactatctatacatatcccataacatgttgtaagcctcaaaaatacacattaaatttatttttaaaaaataaaatcatgactttgggaggccgaggccggcggatcacgaggtcaggaaatcgaaatcattctggctaacatggtgaaacccagtctctactaaaaaatacaaaaaaattagccgggcgtggtggcgggcgcttgtagtcccagctacttgggaggctgaggcaggagaatggcgtgaactcaggaggtggagcttgcagtgagccgagatcatgccactacactccagcctgggcgatagagcgagactccatctcaaaataaaataaaaaaataaaataaaataataaaataaaatcatgtttgtggactgatatcagtaactggtagtacctatgtgaaacacattttcaaagatgaaatatgtgaaagctcattacaattcaacattagcagatgatgatttgcaatagattttgatgacatagaatagtaacaaagaacctcaattaagcaaaatgttaaccaccccaaaagaattccacttttctcattagtagacctgtattgcaaaacactataacacaatcatgattatattttgaatttcatcaacaaaaactggcggtagcctgggcaatgtggcaaaaccccatcttcacagaaattttttaaattagcagctcatggcgggatgtggcagcgtggtggctgtgtggtcccagctactcaggaggctgacgtggaagaatcacttgagcctaggaggtctaggctgcagtgagccgtgatcacaccattgcacttcagcctggcaacagagtgaggccaaagacctcatatcaaaacaaacaaacaaaataaaacaaaacaaaacaaaaattgtgtaaatttcttctgtctcttgctcaataagtcctacatatatccttgattttatttcttggtccacaaagcataaaatattcgctatctggctctttacaaaagacgttagctaactcctggaaagaagaattgatcctacaaaataagacattaagagatattggtcccaaattcatggtgcaaaagaaagatggggaaattatctcccagagttyctttatgagcctccaggtaaatccaggtgccatttgcaaagactgggaagtgcaaagaaagaggctgggcaaaaggtaagggctagaggggtctcggacatgttgtgctcgaagtgtctgtggaacgggcaggcagggatcttcaggagggagctggatgagtggttctggagctcagaagggaagcccgtaatgaagctgaggactgcggagtcactggcatgttggtggctgctgaaaccagcagtgaatcagatggctcccaaggaaaggcaaaagtactggggccaggtctgagggaacccacacaggtacctggagaacaggacacaaagaataagaataaaattctctgaaacaacaataaaattagcaacctgcactaaacatagagttattcacttatggaaaatgaataaaaaacgaagtagaggcctgtaatcccagtactttgggaggctgaggcgggtgaatcacctaaggtgaggagttcgagaccatcctaaccaacatggtgaaaccccgtctctactaaaaatacaaaaattaaaaattagccaggcatagtggcacatgtctgtagtcccagctactcaggatgctgaggcaggagaatcgcttgaacctgcgaggcagaggtagcagtgagccgagatcatgcccccaggagacagagtgagactctgtctcaaaaaaaaaaaaaagaaaraaaaaggccaggcatggtggctcatgcctgtaatcccagcactttgggagtctgaggcggggaaatcacctgaggttgggagttcgagaccagcctgaccaacatggagaaaccccatctctactaaaaatacaaaattagtcaagcatagaggtgcatgcctgtaatcccagctactcaggaggctgaggcaggggaatagcttgaacctgggaggcagaggttgtggtgagccgagatcatgccattgcactccagcctgggcaacaagagtgaaattccatctcaaaaaaaaaaaaaaattagccaggcgtggtggcgggcacctgtaatcccagctacttgggaggctgaggcaggagaacagcttgaacccagaaggtggaggttgcagtgagccaagattgtgccattgcactccagcccgtgcaacaagagcaaaactccatctcaaaaaaaaaaaaaaaaaaaaaaaaaaaaagtagagctacttcaggaaaactcaggctataacagtaagaactaagataagcaaaacaactgaatatggggggaaaatcacaagaagaaatgggagaaaatctgtttgtttgttttatttattttctttttgtttgttttgttttgtttgaggcagggtcttggtctgttgcccaggctggagtacagtggcacgatctcagctcactgcaacctccagctcagcaggccaagcaattctcctgcctcagcctcccgagtagctgggattacaggcacctgccaccacactggctacccctttttgtatttttagtagagatggggtttcaccatgttgcccaggatcatctcaaactcctgacctcaggcgatccacccgccttcggcctctcaaagtgctgggattataggcatgagccaccacgccggcctcaatccttctacttttaagctatttctgtctttatattaatatgagtttcttgtctatagtatataaatgggcattgctttttttaaaatccaatttggcaacatctgcctttggatatttggggcatttgtatgtaacgtgaatactgatgtgactgtttaagtctataacttatttgtttctatttttcttcttgttccagctgttctttgatcttttttctctttttaagccttctattggatttagtattttttatgattcttccttcaggactttgctccaatgtacctttctcagtgaaactaaatttttgcctaatttatcatttttgacattacaagtattcccatttttcttccatttctacttggaacttgttattggctaacatgtttaacatttgtatctaggccaggtgtggtggctcacgcctgtaatcccaacactttgggaggcggaggcaggaagattacctggggtcaggagttcgagatcagcttggccaacatggtaaaaccccgtctctactaaaaatacaaaaattagccaggcttggtggccggcgcctataaactcagctactcaggagcctgagacatgagaattgcttgaacccaggaggtggaggttgcagtgagcmgagatcacattattgcactccagccagggcgacagagcgagactccatctcaaaaaataaataaaaataaataaataaataaatgtgtatctaattacctgttagctagtgactttttaaatttttttcacttttttagaaatggagtctttctatgttggccaggttggtcttgaactcctggcctcaagcaawcctccttccttggcatgagccactgcacccagcctagtgactttcatataattctgtattcaagttaaatatgttgatgtagtatctccaagaagttggggagtgtttttgttttggtttttctttttgagccagggtctgtctctgttgcctgggctggcgtgatcactgttcaccacaccattgacctcctgggctcaggtgattcttccgagtagccaggactacacgcataggccaccatacccagctaattttttcatattttttttttgtagagacaggattttgccatattgcccaggctggtctcaaactcctggcctcaagcgatcctctcacctcatcctcccaaagtgctgggataacaggagtaagccaccactcctggcctccagtaagtttcttattgttgaagtagccatactttctttgatataaaccctacttggtcagtcatttattcagtgaatatatattgagcatgtgctgctacagtgttggaaagattgttgtgaacaaaattactactttcatggagaggatattctaatagaacatcctgtatttattcgttggtataatcctcgatgtagtctccctatattttttgtgattttcatttgttgtgttacaagattttgttattaggtgtactttctcaaagctgtttatatttttgttttattaccttgcttccttattaatgccagctttagatttaatcacttttatgaccagttgcaacaaactgcttttagttttacacttagctttgctccttattatgttttaattatattcatgattttatcctaaccttgtcctgctttgctttttttccagtttctttgagcaaatatataattcataattattttcagtttagttttaaaaataagttacactattctgcaataaatttacttgttgccctaaagttgtcatgtattctccttacaatttattccagataattaataatttggattttgatatttatcttaagtccaaagttttatttaagggatgatttcttttatgattatatatcataagtaatttatctatttagttttaaagctcacaattaaggatgtaatatcttgaaattctttttttttttgagacagggtcttgctctatcacccaggctggagtgcagtggagccatcttggctcactccaaactccgcctccctgtttaagcaattctcctgcctcagcctgagtagttgggactacaggcgcctgccaccatgcccggctaatttttttttttttttttttttttttttgtattttggtagaggcggagttttgccaagttggccaggctggtctcgaactcctgacctcaggtgatccacccacctcggcctcccaaaatgctgggaatacaggtgagggccactgcgcccggcctcaaaattctacttctaacaaatttctactttttagtattaaaaatgttcgggccgggcacagtgactcacgcctgtaatcccagtactttgggaggcccaggctgggggatcacctgaagtcggaagatggacaccatcctggctaacacagtgaaaccctcatctctactaaaaatacaaaaaattagccaggcgtggtggcacatgcctgtaatcccagctactccgaaggctgaggcaggcgaatttcctgaacccgggaggcggagtctgcagtgagcggagattgcgccattgcactccagcctgggcaacaagagcaaaactccatctcaaaaaaaaaaaagaaaaaaatgtttctgggccgggcacggtggctcacgcctgtaatcccagcactttgggaggcggaggcaggcagatcacgaggtcaggaaatcgagaccatcctggctaatacgatggaaccccatctcatttaaaaacacaaaaaattagccaggcatggtcgcacgcgtctgtaatcccaactaatcaggaggctgaggcaggagaatcgcttgatcctggaaggcggaggttgcagtgagctgagatcgtgccactgcactccagcctgggtgatagagcaagactctgcttcaaaaaaaaaaaaaaaaaaaattcttagtgactagaatatgatctaatgatgaaaaatgagtgatgaaaaatttgttgacctagatcccataataggcatggcacttaatctttttacttcagttttattttgggaaaacaatgatatctatgttacacgtttgttgttgagattagattttataagtttaagatatttagaaaaccatctgacacagaataaataccactgaattttaggtatgattatctcttcaatctttgcaatttttccttgaagagtaaaatattccattgggtagaatacaggctagctggctatctttccttatttttaatctctttgatctgtcataagctgaaagaggtttcttgcctctcttaatagttttctataaccaaggtagcagctgcttttgtatttggctatataaaaagatggcttttatcctcttgcctaattttgctatttaccattgtgtgatatctattttcataccattacgggtacaagttccactttgatataaataaaggtgctcttatttgccttttaattgcttttgccaaaaatattttgcccatttctttgctttccttccttcatctcttttagactttttttttttttgagaaggagtttcactcttgttgcccaggctgtagtgcaatggcgcaatctcggctcaccgcaacctccgcctcccaggttcaagcgattctcctgcctcagcctcccgagtagctgggattacaagcatgcaccaccaagccaggctaattttgtatttttagtggagacgaagtttttccatgttggtcaggctggtctcgaactcccaacctcaggtgatccgcaccctcctcggcctcctaaagtgctgggattacaggtgtgagccaccctgcccaggcttttagatttcttaaaagcatgtttttaagaaacaatatggctgcattttggttttttaaaccagtataatagtctgtcttggataagaaattcagccattcatattttttgtaatgtgtgtattttggttttgctctgaatcttggtttatcaactattatattaatgttggaacataacatatccatttcaatttataccattaatcacactttctcagttcctttacctcttctggtttgttcagaaaagaaaggtctgaaatgtgaaatagaattacaggcacaaatgccagagagtgtaactgcgaactgtctayactaccccataaatacagcctaaatggggaaaaaaaatgatttactgaaatagtctgaagatgcacttgatttcttcctccagatactctacattttatccctgtatcaagcagcaacaccagaaaatggcctagagcagtgctgtccaatttggtagccactagccacatgtggcaactaagcacttaaaatgttactatgtgacttatgaaatatattttaattatatttcaatatccacatatggctagtggttactctactaatctacataccacactagactacaatattttgattctctgaaaacctatattcactgagttttctcatagctcttgagtcctttgttcccactgaagaactactgaaagaggttgaatttctaagttattggaaggttgtacacttcatcgcccatacagagtgcaaaaagagaacaattttagactcattgccaggaagtcttcatgccccattcataatcaatatggtttttctttatggaaatgtaaatcatgtgacagatgtctgcattgtgcaatggctatcaaaaagattcaaatttacagctcaattttgataactatgaaagaccataaaacttgtacttacctatgtattaaatcatgctatcagtctgctattgtctattttcctgttgatttctatatttccattctaatgagccttaaaagcctcatacattgcattataaataaagctgataataacaactaaacaactcacctgggatctgttcattttctactgatcttggaaaaatgtgaagagtaaaggtaatgctgggaaagaggaggtaagaataaagttaggagaaatctggcccgccttgctgctcctggatccaacttcctaaaatgctacacagaagagaccatttgaacaatgtggagacatctctatgaccagattgtgttgagcttagacatgcaatttttcactgggtgaaagtaaacacatgtatcccaatgattaacaatttatgtcgctaagacacaaaaaaatttaaaatacaaacaattcataaatgacaggatcctaatatagaaagtgtcttcattaaaattgatgtggtaggaaacactcatgttgtgctgtttatctgttttcctatgaatataatactgggaatattgttgaacaattcacagaaactctaaaaaatagaatgaatgcttcagtacaagatttttttaaatatttgttctaatttgattacagtttcacaatcttttgataagacttgtttcagctatgcaaaggaataaagaaatcacgaaactttttttttttgaaacagtcttgctccgtcgcccaggctggcatgcagtggcatgatctcggctcactgcaacctccacctcccaggttcaagcagttctcctgcctcagcctctcgagtagctgagattataggtgcccgccatcatgcccagctaattttttgtattttagtagagacagggtttccccatgttggccaggctggtctcgaactcctgacctcaggtgatccacctgccttggcctcccagagtgctgggattacaggtgtgagccaccgcgcctggaccaaattcttatcttgatcagtaacaaaggagtgacctgtaataattcattgattctctcaggctccatacattttatctttcaaatgaggcagaaatagttaaatactgtatactctacctgcactaccatcttgtgattctaaggtgagaataaaggccgggtgtggtggctcatgcctgtaatcccagcactttggggggccaaagcaggtggatcacctgaggtcaggagttcaagaccagcctcgccaacatggcgaaaccctgtctctactaaaaatacaaaaattagctgggcctggtggcacacacctgtaatcccagctactcaggaggctgaggcagaagaatcacttgaagccaggagatggaggttgcagggaggcggacgttgcagtgagccgagatcatgccactgcactccagccttggcaacagagtgagactccatctcaaaaaggataataaataaaaataaaataaaatatcaattattggtcaggcatggtggttcacacctgtaatcccagcaatttgggaggccaaggcaggcagatcacttgaggtcaggagttccagaccaccctggccaacatagtgaaaatctgtctttacaaaaaatacaaaaattagctgagcatggtgacacatgcctgtagtcccagctacttgggaggctgaggcacaagaatcacttgaacccgggaggaggaggttgcagtgaactgagattgtgcacctgcactccagcctgggcaacagagtgagattctgattcaaaaaaaaagaagggctgggcatggtggctgtaatcccaacactttggcaggccaaggcgggtggacacctgaggtcgggagttcaagagcagcctgaccaacatggtgaaaccccgtctctactaaaaatacaaaattagccgggcatggtggcgcatgcctgtaatcccagctacttgggaagctgaggcaggagaattgcttgaatccaggagacagaggttgcggtgagccaagatcacgccattgcactccagcctgggcaataagagcgaaactctgtctcaaaaaagtaacaacaagaaaagaaaagaaaagaagataaaatatcaattatttgctgttcaatgaaatatcacttctaggcaaaagatttctcatctttattgggtgttctcaccccaacctgggttgtttctgctatggaacgagtccaagaaggtgaaggtttctgagccttcaggatgttgacaagggtttcctctatgttgtctctctgacatttagtgaagttgggattctggtaaaagctttcattatattcatagggttgctcccttgtgtgtgttctctgatgtgttgtgagggatgacttctggtagaaggttttcccacattcactacatgcatagggtttctctcctgtgtgggttctctgatgtactgtgagggatgacttgtggtagaacattttctcacattcattacattcatagggtttctcccctgtgtgaattctctgatgttctctaagttttgacttcacagagaaggatttttgacattcattgcattcaaagggtctctctcctgtgtgagttcactgatgattaatgaagtttggcttctgggagaaagttttcccacattccttacactcatagggtttctcgccagtatgtatcctctgatgtacttttagagctgacctatcaccaaaggctttctgacattcattacatccatagggtttctctcctgtgtgtgttctctgatgtacatgaagatttgacttctcacagaagttttttccacattcattacattcataggttttgtcccgtgtgtgttctttgatgtactgcaaggcatgacctatatccaaaagttttcccacattcagtgcattcatagggtttctctcctctgtgtatcctctgctgtaggataaaagaggatttatggctgaaggttttcccacattcactacattcatagagtttttcttctgtatctgttttctgatatacagaatgctttggcttacagcaaaatgtactagcatactgattaattttataggcattctttcctatatgtgtttcttgatgttgagtgaaatttggcttcttgcagaatacttccaaatgtctactacagtcaagttttctctcctctgtaactttgtagaatgaggagtgatttcttgccaaaactattctcactcgcattacactcatagtatttcatctccataaccctgtggtgtttatttacaggtggcctctcaccagacctcctctcacattcattgaattcatggtgactcttccttatgtgagttctctgatgaacaatgaatattggtctatcggaaaaggctctcacatgttcattatattcacagggtctcccatgagcacactctcttatgggtactgcaggctgcctcttcatgaaaagccttcccacactgattgtattcaaaacactgcttaagagtttgaatatactgatgcctaaataagtcctcattctgagagacggctttcccatttccatcatattccaaaggtttccctctggcataaggattctcacgcttcatacagaggagaaatttcccacgtacattacactcagcagggttccttacaaaggagcttctattactaataattaattctgaaatattattcaaattcattccagatgagtcacagttgccacgtatttttcttgatagaatggggtttgtgtcaagagaaaatgtttttcctaatacaccatttctgtccatagtcagtgttttattgttgacaaaatcaactttctgcaaatgctggtcttgattttcctgtctcttctccatcaggtcatcatctatgcagcagtctagaaataataataagttatcacagattataaatgttaacatatttttcatgaaaaagagacatattcacatgctttttttttctttttttttttggcacagtgtctggctctgtcacccaggctggattgtgcagtggtgtgatcatggctcactgcagcctcaacctcccaggctcaggtgatgctcccacctcagcttctcgagtaaatgggattacaagtatgtaccaccatgcctggctaattttttgtattttttgtagagatggagttttttgccttgttactcaggctggtgtcaaactcctgttgcccaggctgtaatgcagtggcagcatcacagctcactgcagccttgacctcctgggctcaagaaatccacctgcctcggctcccaaagtgctgagattacaggcatgagacactgcacccggcccaggctgttcttataacaggatcatatgcatacctttattcatctagaatatcatcatctaactcatagtctgagatttcacttatgcgatcaattatactgtaattattagagtctacagtggttctgcttcatcttctgatttgcctaataattgtgaagagtcttcctcttgtcaattttctactctttgcaattaatggaagaaaataaaagctctgaactctcaactgtgcccattgaattattaaaaaaaaaaaagagagagagagagaggtgggcgcagtggctcacgcctgtaatcccagcactttggaaggccaaggaaggtggatcacctgaagtcaagcgttccagaccagcctggccaacatggcaaaaccccatctctactaaaaatacaaaaattagccaggtgtggtggtgtgcatctgtaatcccagctactcgggaggctgaggcaggagaatcgcttgaacccgtgaggcagaggttgcagtgagccgagatcatgccactgcattccagcctgggtgacagagtaagactccatttcaaaaaataaaaaaataataataaaaagtggccaggtgcggtggctcacgcttgtaatcccagcactttgggaggctgatgggggtggatcacgaggtcaggagctcgagaccagcctggccaacatggtgaaaccctgtctctactcaaaatacaaaaatgagctgggtgtggtggtgcgcacctgtaatcccagctactcaggaggctgcagcaggagaatggcttgaacctgggaggtggagcttgcagtgagcctagattgtgccactgcactccagcctgggcaagagagcaagactccatctcaaaaaaaagaaaagaaagaaaagaaaagaaaagaaaagaaagaaggaaggaaggaaggaagcaaggaagaaagaaagaaaagaaagaaagaaagaaagaaagaaagaaagaaagaaagaaagaaagaaagaaagaaagaaagaaagaaagaaagagagtcaggtgcagtggttcacacctgtaatcccagcactttgggaggccgaggcaggaggatcacctgaggtcaggagtttgaaaccagccttgccaacacggcaaaccccgtctctagtaacaatacaaaaaaataaaaaatagccaggacacagtggtgggtgcctgtagtcccagctactcgggtggctgaggcagtagagtcacttgaacccgagaggcggaggttgcagtgagatgagatcacaccactccagtccagcctgggcaacagagtgagactccatctcaaaatgaaatgaataaataaaataaaaacaacaaaaaaaagaaagaaactacaaataaggtttctccaggcttcttttatatttttgtcacaagtaatgcttcaagcagctcaataagaaaattgaaggatgatgtaatagtgacagtgttctttactattctattatccttacaagcaattccatcattcttttctattttagtttattttaccacagttggacataattgatgagtaatgttgaaataattgctaagaaataacataccaaaatgtttcaaacttaagaaaaatagatcactaaaatagtatcatgcttcttagattataaatgggaccaattcactcaaatgataacagcaaaaacagaatgagtttcattcaattaaaaaataaaagtaggccaggtacagtggatcaagcctctaaaccagcactctgggaggcagaggtggaagaattgcttaaggtcaggagttcaagaccagtctgagcaacacagcaagacctcatcagtacaaatttatatatatatacacacatatatatgtgtatatatgtgtgtatatatatatacacacatacatacatacatatattcacacacacacacaaatatatatatatataaattttctctttgtttatctaagttagaaaaaaaatttttttgagataggatcaaaagagatcggctactgcactccagcctggaagacaaagcgagactccatctcattaaaaaaaaaaagaaaaaagaaaaaagaactgcatcaaaaataaactcaaaagctaaatttgggtccactgagaggtaacattctattttgtttattatttggaccatatatcatttatattccttttatattctaaggtttcatgttcacatttcatatatgattctcaaactccatatagcttgatttttgttttgtttttacagacaggctcttactctgtcatccagactggaatgcagtggcatgatcatagctcactgcagcttcaaactcctgggctcaagcgatcctcccacttcagcctcccaaaactgagactactggtgtatgaccatgcctggctaattttttttttatttatttttgagacagagtttcgctctcgttgcccaagctggagtgcaatggcgcaatctcagcttaccacaacctccccctcctgggttcaagtgattctcctgcctcagcctcccgagtagcgggattacaggcatgtgccaccacgcccggctaattttgtatttttagtagagaaggggtttttccatgttggtcaggctggtctcgaactctcaacctcaggtgatccacacgccttggccttccaaagtgctgggattctaggcatgagccaccgcgcctggcctaattttttattttttgtacagatgggtcctcattgtgctgcctgggctggtctcaaactcttgacctcaagcaatcctcttgggttggtctcccgaagtgctgggattacagcagtgagccactgcactgagcctatataacttggtttttgaaaatccaatttgacaatatccatcttttaataagatggtttagcccctttaactgtattatgatttctaaaatatctggattggttttctctttttcacttaagagtttccagtttttctaatttttacctgcctttccccactttttcattttttttttttcttttcgagatggagtctcgctcttgtcacccaggctgaagtacaatagtgcgatctctgctcactccaacgtctgctgccccagttcaagcttctcctgcctcagcttcctgaatagctgggattacaggcatccgccaccacacccggctaatttttgtacttttagtagagacggcgtttcaccatattggtcaggctggtctcgaactcctgacctcaggtgaccaacccgcctcggcctcccaaagtgctgggattacaggcctgagccaccaagcccgacctcatttttttttttttcagtctaatccaacacatttaar

SEQ ID NO: 6766 - DNA, 18110 bp, Homo sapiens
gtgctgggatttcaggcgtcagccactgcacccggccacaaattgttaattattataactctctgcttgccaaaatattaacttacaaagcagtccatgagttggctctaaagttattatgcattgcataccttaaagattgttgtctatgttgtttatgaaagttgcataccttaaagattgttgtcgatgttgttttatgaaagctattcagtaaagagtttatctggctaaaatagacccaatagaaaaattaaaaagtaagtaagagtttaactagtatattaggtgccaggaactttcctagcccttaggtacataactagcattatatagtgtttgtgggaatcatgggtgagcattaagtagtattagcaaaaaaactatggattgatggtaaaaattaagaggaaaataagagaaaggaaccaaactcaggaaaagcaaaatacctgaagagtgataaagtatcacatagtgcctcacagaccacttcctacatgttgaataggaacctctttctagtctttcttcataattcatttcacagcataccatttattaagattttttaaatgcaactcatgatgaatacaaattgtgaaaagttcagacttcgtaactttaaatgtttaccagagcaagtcatagtgatagtaaaatataagtattcaacatcaaagtttttctatattactattctcctttatattcattgacaacttctgaattagaaaagtcaatctctgatgtcttgtatcttctgcagttcagccattattaacagaactcaaaacatttgaggttctcagataaattttgaagcctgttaaatttgaagttggcctgaaacttttgcacaaagtgaattacccctattttatttagggtttttgcctattgcaactgattttcctttatccacagctattctacataatgttatgcagtgtttggttgaatccttaacacttttcttccaccttccctgcatgtagtttgtactttttacagtttggggttcctgtgtggatttgatttgccacattccgggacctcattgcgagtgattctgttccccagtttgatgatgttcaaagaagcaggtaagtgagagctggggtcagatataagcagaaagtcagaacttttttatttaaaaattttaaaaaaattttttgagggtaagaaagatcttgcagtcttttaggaccactgccctaacaacttcagataggctagctgtaagtagaaagaagctaggactgtggaattgaatttcctggatcagctgcaattacaaggaggataagagaatggttgagctgattcttttctattttcttttcctagaaatagtatgtatttttagtcattaactagtattttggttttgtttaatatcccagaagcatttattcctctcttaatacaggtaaagtgctcctgatgactctctcactcagagagttatcttacccttctttcagggaaagtgaattttacaagttaattctgcatgtttcccctacaactgatttcattctgtaccattaaatggccatttattttctcccttctacttaatccaagattggacattgttgagttttgtttgaacaatgtttgttatgctgaaaaaggacaccaggcctgggggaactcatcctgtgtctagatcaacaaacagaactccagagggtcctctggttcctcccacttggttggaaaggtgcttaccctttccaatcaaatattgacttctgcactaatccaaagggttttcttctgaagctgtaaactgagaacagaaatattgccttgagtgagagaagtctaggaagcagcaggtttcattttttgtcagcctgcctggcctttacttggctaacacttgggagtgttgacagtcctgagcccccttggcagagaacaaaggttagagagaagccctcaggcagggggacagatccctctttgcctcattagggagaattcagccttgtctgtctggttggcagggcacacttaatcactgagactcagcatttcagcagtttgcaaaggaaagtgatatgaagggacagctgcaagtaagccacaacctasatctgaagagatcaagcactcatttcacttggaggaaagagagaaggaaggaagctgaggacttagcagggtaagtttttttttccgtcaacctgtctgcttgcttagtttataattgagtaaagtatttatcaccccaggcagtgttaatcactgattaaacagctgaatgtggccataattacagtgtccttaatgtatttctccttctcttttcctacccccttataaggatctccaatgaccagtttcagtcttccttctccctacctctccaaagacgttttgcattttttggtgacttacagaaaattagatgagcactccttatctggagatagtgaaaatatgactgtagtttaggtgaaacttgggactcttggtggtaaagaagaagatgggaaacctaggtctaggaatagattaatattttgtcttgaatttggacatgaaggataaaagtttttctaggcaatcaagatcatgtctcctctccagttcttggtgttggtgttctctctcttatactgggactaaattagagcctaagtcactggggatggctagaaaaaaatgaaagggattccctttctaagtggagagcattctagactctggaaagttcaaagagcttactgcaattctttccagcttctcctgtgagtcccctgttttttcctttgtttctctcagtttataacctgtgaacagggagtagcctggggctctttacaggagatttagaaccagggaagctgtgtctgggcctggggtatataaactcaaacatgaacctgatgatgtatatagatgcagatcaaagacctggcttctcacccaccttctttcttttctgccagaaagctaactcatttgtatcatgaacattgtgctctagacacagaggagactgtgacattagggatttttaccaccactcctcttcctcaaactgtgtgatccttttgctttctgaccagttcagccaactcccagattgccaagagctaatcttcctttagaggaagacctcaccttggaaatgcggaaaagtaaagcagtacctttctgaccttaagtggcttgcttccattgcagcaaaaaggcttatgttttaacttcagggagatatctattataaattctgggatttaagaccctagagttgtctcaaatcacactttccttccatacctatttaaaaaaaaaaaagtcattctttcaaggtttaagaaagtggtgtcttggccgggcgccgtggctcatgcctgtaatcccagcactttgggaggtcgaggtgggtggatcacgaggtcaggagttcgagaccagcctgaccaacatggtgaaaccccatctctactaaaaatacaaaaattagctgggcatggtggcgcgagcctgtaatcccagctactcaggaggctgaggcaggagaatcacttgaacccgggaggtggaggttgcagtgagccaagatcgcaccactgcactccagcctgggtgacagagtgagactctgtctcaaagaaagaaagaaaaagaaaatgttatcttgcctgaggcaggtgggtagagtagataaatgctttttgtagaatggcagtgattctgaaaatgcaatgagaatgtgaggtgattaaaagtggaggacagaatgaggttagttgttggaaattgggccctaaagtgtgaagggcaattccatttactcttttggtaaaaggacatgacccttaaaccctaagataatctaatatcattaggtccaatttcttcattgaaggtaatatataggatatggtatacagatgagcttgactatttctgttctgtggactgaaaccatccattcacccatgggataaggggagacattaagagggtggatggaaacataaggatgaggagatagaaagtacaaaggaaaatacaaatttgttcctccattaacctgaggacaggtttttaagagtcatgttgtaagatatggatatgagctggataattctgggagctttttgtttatttttgccacctgcatacacctcagctgcatgatgattctgaggtttttcctaacagatctgatctagaaggatcaaatgtcagatcatttttgtaacaaaacatgatccctggtttgaactttaacagtttcctcattcacactgccagcgtttttaatcctctgttatttctctgtacctgaagacaatctggggattaataactttttagcctctcaatctctatgaataccttccttcctttcttttttaatcgaagtgaaaatcatataacataaaattaataattttaaagtgagcaattaaatggcatttagtgtattcacggtattgttcaaccatcaattttgtcttgttccaaaacatttttatcaccccaaaagaagaccccataaccattaagcagttactccccattttcccttccacccagcccttagcaactaccaatctgctttctgtctctgggtttacctattctggatatttcatagaaatggcatcatacaacatgtatacaacattttgtgtctggctttcttcacttagtataatgttttttgaagttcctctacattgtagcgtgtatcagtatttcatttctttttatagctgaataatatacatcttcatatgtatatttatatcccaatttgtttatccatttatccattgatggacctttgggttgtttctaccttttagctgttgcgaatagtgctgctatgaacattcacatataagtatttgtttgagtatctgtttttaaatattttgggcacatacctaagaatgaaatttctggttatatagtaatattatgttaactttttggggaactgccgtactgttttctatggtggtggcaccattttacattctcacctgcagtgtacgagggttcaaattactccatatcctcatcaacacttgtcattttctgttttttttttttataatagccatactagtgggtatgaagtaatatctcactgtggttctgatttgcattttcctaatgactattgagcatattttcttgtgtttattgtccatttgcatatattctttgggaaaatgcctattcacatgttatgcccaattttttagttgggttgtttggtggtttttttgtttgttattgagttgtgggaattctttatatattttgaatactaaccccttatcagatatatggtgtgcaaatattttcttccattcttggggtgtcatttgactctgttgttagtttagcatcctttgatgcacaaaagtttttaattttgctgtccaatttatctattttggtggtggtggtgttgcctgtgcttttggtgtcatatcctagaaattattgccaaacctatgtcatgaacctttccccatagacttttatagttttacttcttaagtttaggtctttatactttaaacattcaaactcgagtcattctatttcattaatttgcagaatgtttctgtctatatttctgtgtttattctctcctctgtgcttagaatttattttttccctatttccaagtattcaaagtattcccatctttcaaggtctattccaactgccacctgcttcatgaagaaagccactgaagagattctcgcccactgaagagattttcttcttctgatctcccattagtgctttagttgcacttttctggttggatttatatagtaccttatagtctacatctaatctccctgcaagacatttagatatatatttctcatatttgcttctatatatagtgtttcgcaaatgatttcatctgtttatcagtaaatatatattacatgaatggacattttaatttttctcatatggtcctttctgtttactcagctcttatggaaggcatggcagaagatgagacagggaaagaggacagcacagagtcacagccagatcgtgactgagtgtaggcttacttctacctcaaaacttaccactttaggaaatttttctgacttgcttgactacataactcttagtgcacgttttgtattacatttaatttttacttcttggcttattgcttatacatgtgataataggtctttcaaaataaatgttttatctctctatattaaactgtctaactctccaattggatggtcactttggagaattaaaacttctattgctttttcttcttttaaattgagttttaaaatacattaaagctatattaatattttctccttattaaaaaagtcaaacattacaggtaagtatacagttccatttgatcagcccagttcctatttaactgccttcttaaactattcagagttaatcactgttaccagttttcttttttttttgagacagagttttgctcttgttgcccaggctggagtgcaatggtgcgatctcggctcaccgcaacctccgcctcctgggttcaagcagttctcctgcctcagcctcccaagtagctgggattataggcacccaccaccacgtccagctaattttttgtatttttagtacagatggggtttcaccatgttggccaggctggtcttgaactcctgacctcaggtgatccgcccgcctcagcctcccaaagtgctgggattacaggcgtgagccaccacgcccagctgttaccagttttctatgggccctgccaaatcttttttgatgcatttacttatatatatatatgtgtgtgtatatatatatataatgtataggacttactatgtgtaaattatattcatataaaattacttcttcttggctgggtgcggtggctcaagcctgtaatcctggcattttgggaggccaaggtgggtggatcacctgaggtcaggagtttgagaccagcctgaccaacatggtgaaaccccatctctactaaaaaatacaaaaattagccgggcctggtggcgcctgcccgtagtcccagctactcgggaggctgaggcaggagaatcgcttgaacctaggaggtggagtgagctgagattatgctgctgtactccagcctgggcggcagagcaagactctgtctcaaaaaacaacaacaacaacaaattacttcttccctattttccacagctgcctatggtgatcaataaccagtaaatactgaataaatcttactgataacctgggtctgagagactggaatgagaaatgaaaggtcaagcatatgaaaatacttcacaagtgtccagcttgtaaaattccattccatgtctattctgcatataatctccaggtatcactggacaggccatggctccacggtcccggcgacgaaggcacaagaaacctccctcatcagtggctcccatcatcatggccccaaccacaattgtgacccctgtgcctctgaccccctcaaaacctggccctagcattgacacacttggcttcttctccttggatgataatgttcctggcctatcgcagctgatccttcaaaagctgaacatgaaaagctatgaagaatataagtgagtgaccagctctatggaaaagggatatattgtctctggtagaagtaaatttcagaaggtggagagggagtacagtttggtgaatatggagtatttgcaataagagattttctcatccttttgccagttactatattactataaaagaagaaacattcacttaagtgaaaaatgatggcagtgggagacataggagtaagtggaaatgtgtaggagacaagatggggggcatgagagattttggagatattcctttccccattgtcattccttctccatgctgtctctgcaggttggtggtagatgggggtacccccgtatcaggctttggatttcgatgtcctcaagaaatgttccagaggatggaagacacatttcgattctgtgctcactgtagagcactccctagtgggctttcagactccaaggttctccggcactgtaagaggtgacttgttgggggctaatagggagacattcagaaatgatcctgtattagccgggcatgatgactcatgcctgtaattccagcaccttgggaggccgaggcaggtggatcacatgaggccaacctggccaacacagcaaaaycctgtctctactaaaaatacaaaaattagcctggtgtggtggcacacacctgtagtctcagctactcgagaggctgaggtgggagaattgcttgaacccaggaggcagaggttgcagtgagccaagattgcacactgcactccagcctrgatgacagagcgagactctgtctcaaaaaaaaaaaaaaaaaaaaaaaagcaatgaccttctactacaacctcattccaagaggaaagatctgaaagttttcaaaataacctaagacttaggtcctcattttttgtcacccaggctacagagattagaacagtgttctaatcctgcttatttttggtgttattgggaagtgagacaagaaaccacaatacaatcctctctgtctctctcttgagtactcaaggagtaagactacatttgttctggggaggtggaggttgaaccatacctgttatgagaggacagctgcaaactcgtggtgttttttctaaaagtgatataaaaagtgagttgttccagatagagagtaaggtatcactctgtctggcagaataattatattcccaatccctcctgccttgtctgccaaatgtagtccccaaaattggtgcatcagctstcattcctctccctaccttccttacccattcaccatcctaggtgcaggaatatcagttcctttcctccgataaccccaatcatatttatagtataagaactatttctctctcattctctcaggtgcagaaatgtctattactgtggtccagagtgccagaagtcagactggcccgcacacaggagggtttgtcaagagcttcgtcttgtggctgtggaccgtctcatggaatggcttctggtcacaggtggagtggtggtgttgaggatctctgccataatggtcatagttgattgcatttaaaggaagatacaaaatcatattgttatgaaaaaatgaggaagtggggcaaaggatggggcacgcctgctcacaggttggcagagtgaacatggagggaatattgatcattagtgagggggaaattttgaagccaggaaagcattaggttacttcttatttcttctttcctacaggtgattttgttctaccctcaggaccttggccatggccacctgaagctgtacaggactgggactcctggttttctatgaaggggttacacctagatgctacattggatgctgtgctagttagtcatgctgtgaccaccttatgggccagtgtaggacggccaaggccagacccggatgtcctgcagggatctttgaagcggctgctgacagatgtcctgtcacggcccttgactctaggcctaggacttagggccttggggatagatgttaggaggactgggggaagcacagtgcatgtggttggtgcttcccatgtggagacattycttactcgcccaggggactatgatgagcttggttacatgtttcctgggcaccttggactccrtgtggtcatggtgggtgtagatgtagctactggcttttcacagagcacctcaacttcacccctggaacctggcacaattcagcttagtgcccacaggggcctctaccatgacttctgggaggagcaagtrgagaccgggcagacacaccatccagatttggtggcrgcattccatccaggtaagagtcattggttcaggggaatagagggtggctcccctgagaattttccatcctgaatcttctgtctttggaaccccattcatttggtctcattaaacacaatatgatgacaacttttctttttttttttttctttttttttttttgagacggagtctcgctctgtcgcccaggctggagtgcagtggygcgatctcggctcactgcaagctccacctcccgggttcacgccattctcctgcctcagcctcccgagtagctgggactacaggcgcctggctaattttttgtatttttagtagaggcggggtttcactgtgttagccacgatgatctcgatctcctgaccttatgatccgcccgcctctgcctcccaaagtgctgggattacaggcgtgagccaccgcgcccagcctgatgacaacttttcttgataatttgccatatgtactacacttgggttcagaatttttcattgaagagtggatgatgatgatgatgataatgactggggataagcaaggtgaggggtggggtgctcacagtcaaagaaatatcttgctcttagggtctgctttagtctttccctattcccattttcatttttgttccacaggttttcattcctccccagacttgatggaggcttggctgcccaccctgctgctacttcgtgactataagattcctacattgattactgtttacaggttttgacctcatcctattkgtgatacttccctgactttacatctctctttatatagatgagctcatttttgcccccctcttgctcatctaccttctggtgaggatgttcttttcygcatatggcttttttatccccttggaacagtcctttgctagttaatggaatatttaatgagacatttgggagggaaagatagcccttgcctagtccagccttaggcaatttgggggatgggtgattacagaaatgtcaggctcttgggcagtttttcctttatctctgtcacaatcagtagagtaatttttcttctctctcttctacagccatcaggagttggtatcctctttgcagattctggtggaactggatacacacatcactgcctttgggkctaatcctttcatgtcccycaaacctgaacaggtctattccagtcccaacaagcagccagtatactgcagtgcatactatatcatgtttcttggaagcycctgtcagctggataataggcaattagaagagaaagtggayggcgggatttaaatagatcataactggacatctggaaaacggggagtttgtgatgaaattaccctgctaatgccaggttcttgcaaactttgaaaaacattatattctaaacctcatttactgtttgggtaaaaattctaagctgaatgagagtttctgtataacataactggtttctttcttyttttgagatggagtcttgctctgttgcccaggctggagtgcagcggcatgatctcgactcactgcagcctccgcctcctgggttcaagtggttctcctgcctcagcctccctagtagctgggattacaggtgcacaccaccacacctggctaatttttgtatttttagcagacagggtttcaccatgttggccaggctcgtatcaaacccttgaccccaggtgatctgcctgcctcagcctcccaaagttctgggattacaggcatgagccaccatgcccagccaatgtaactggtttctaagagtttagccacagtagcttctagagataggaaattagatttagtgggtgggaagaggccctgatgctggtctttccagagcttatagttgctaacacttttytttgtaaagaagtttaccttttgactggaaccagatggcactgagaaaaagaatgagaaccaccttattcttctgaaaaagactttcttctcatccagtaatttgggctaaaaaatggaaagatgttgatgacttgaagtgatgcaagaatggacaagtcagggaagtcattgggaacatggatgaggttgtaagcattggtacagtgtcctgtttcctgacttttttgagagaaatgtctacttttcctgttttctcttggggacttttgaccctagagtagccctggtgttatattttagatatcccaagctatatcagactttacctgaatatactggagttacttattatcccccattctataccccaataaactcagtttggggcttcttaagtcacttgttttatttcctattcactggcaagtattactcatctgcacataacacctcaagactggaagtttctctcttgccaacagagtaattagcatcagttctctgggtctgccactctgtcacacatttgcctcatgtcatccttttcttttttatttctttttcttttttctttttggagacagagtcttgctctgttgccaaggctggagtgcagtggcattatcatagctctttgcagcctcagactcctgggctcaagtgatccttccatctcatcctctcaagtagttgggacttacaggtacataccaccacgcccagctaacttttttttttttttttttctagagacagggcctccttgtgttgcccaggctggtctcaaactcctgggctcaagcaatcctcccacctcagcctgccagagtgttaggattacaggcatgagacactgtgcccagccaatgtcatccttttctcatcatactctcaggattaggacatttcctgggtattcattcctacaatcttgccatgactgtctctcacacacatattacagcccatcacccaacacatacatacacattctattgcccactctaatagggataattttagaatttcatatattcattgaaaacagtacctgtcatactacaggtactgtattttggctttggggagattgaaaggtgaataagacatggtgtttattcttaggaagggaaataatatttatgtatttggagatacctttattgcaaggtataatatggagtaagaaacacgagagaggcttctggtgctaaggaaatagagtgaaaagagctctcttccctcttgcggccatcactgaagcaggagcggccaaaatgaagtttaatccctttgtgacttctgactgaagcaagaattgcaaaaggcatttcaatgcaccttcccacattcacaggaaaattatgtcttcccctcttgccaaagagctgagacagaagtacaacgtgcgatgcatgcccatccaaaaggatgatgaagttcaggttgtatgaggacactataaagatcagcaaattggcaaagtagtccaggtttacaggaagaaatatgttatctacaatgaatgggtgcagtgggaaaaagctaatggcacaactgtccacataggcattcaccctagcaaggtggtcatcactaggctaaaactggacaaagaccgcaaaaagatccttgaacggaaagccaaatctcgccaagtaggaaaggaaaagggcaaatacaaggaagaaacaattgtgaagatgcaggaataaagtaatcttatatacaagctttgattaaaacttgaaacaaagaaaaaaaatagagtggaaagagatcattttgctaaacgatagtgaaaatattctgagtgagaattttttgaaacagagcacaaggcactcaagacggaaggaacaacaggaccagaagtttggaggcagaaaagcatatgggatatttgaaggtacctttagggattagtataaattaagtctggaaggtagattgagataagatgataggagtattgtggatttttgtagatctgagtatgaatcctggaacagccatcaaattttatattgcaagggaagctaaacttctctaagccttagtttcttcatctgtaaaatggagataataccaagtatcccaaattaatattgaagttaaacgaaaatgtttgcaaagttggaggactcgcacatcccaatttcttttttttgttgtttgagacagagtctcgggctcaagtgatcctcccacctcagcctccctagtagctgggaccacaagtgcaagccaccatgcccagccaatttttgtattttttgtagagacagggttttgccatgttgcccaggctggtcttgaactcctgagctcaagagatccaccctcctcagcctcccaaagtgctgagattatgagccactgtgcccggcccccagttccaaaacctataatcaattgtatacttagcagttcaatatccctaatctgaaaacccaaaatgctcctgtgagcgtatcctttgagtgctatgtcggcactccaaaagtttcaggttttggaccattttggatctcggtactcaaaaagctttggattttggagcattttgaatttcaaatttttggattagggatgctcaacctgtacaaaatagtagtagtcaagacaatgtgatactggcatagaatagacataaggtcagtgcagtagaattgagaattgtcttagtctgcttgggctgctgtaacaaaatactgtaaactgtgtggcttgtaaacatcaaatttattttccacatttctggaagctggaaagtccaagatcaaggcactagcagatttcgtgtctgagaagggcatgttcttactgtggaaggggcgactgagctcactctttcctcttttacaaggacactaatcccactcatgagggctctgccctcatgacctaataatttcccaaagatcccacctcctaaagccggaggttaggatttcagcacgtgaatttgtgtatgtgtggtgtatgtatgtgtatgtgtatgtattggggtggaggaggctcacaaaacattcagactgtaacaagaatagcagggcatggtggttcatgcctgtaatcccagcactttgggaggccaaggcaagcagatcgtttgagcccaggagcttgagaccagtgtgggaaacatcccaaaaccccgtctctaaaaaaaatacaaaaaaaattagctgggcatggtgacacatacctgtagtcctagctacttgaggggctgaggtgagaggatcgcttgagcgcaggaggttgaggctgcagtgagccaagattgtgccactgcacttcagcctgggtgaaaagtgagaatctgtctcaaaaaaaaaaaaagaaaaaaaaaaccttaacatttatggtcaattgatttttcacaagggtacataaacaattaattgggaaaagaacagacttttcaacaaatagtgctgggacaactggatatccagatgcagaagaataaagctatacccccacctcacacaatatacatagattaactcaaaatggttcaaatacccaaaactaaaactcttcaaagaaaaaaaaggggaaaatctttgtgaacttatctggcaatgttttcttaggtatgacaccaaaaacacaagcaaccaaaataaaaataaataaattagactatcaaaatttaaaattttaggccaggtgtggtggctcacacctgtaatcccaacattttaggaggcaaagacaggaggactgcttaagcccagaagttcaagatgagcctaagcaacatagacctatctctacaaaaaaaaaaaaattagtgggcatggtggcgcatgcctgtagtcacactacctgggaggctgaggtggaaagatcgcttgagcccaggaggctgcagtgagccatgatcgcactccagcctgggtgacagagcgagatcctgtctcaaaaaaaaaaaaaaagaatgagagaaaatattaataaattatatatctgataagggacctacaacttaaaaggacagataacccaattaaaaatgggcaaaggatctgaacagacatttctccaaaaaagatgtataaagggccaataagtacatgaaaagatgctcaacatcatcaatcattaaggtatacaaattaaaattataatgagataccacttcatacccactacgatggctatgatgaaaaaaagaggtagtaacaaatgttgatgaggatgtgaagaaattgtaaccttcatacactgctggtgggaatgtaaaatgatgcagccaatttggaaaacagtctggcagttcctcaaacagttaaacattgagggccaggtaatgatgactcacgcctgtaatcccagcactttgggaggctgagctaggagtactgcttaaagcaaggagtttaagaccagcctgggcaacgaatcaagaccctgtctctttaaaaaaaaaaaaaagttaaaaattgacttaccatttgacccagaagttttgctcataggtttgtacccatgagaaatgaaatcatatgtatataaatattcatagcagcattattcatgacagccaaaagatgaaaacaaccaaaatatccatcagcttatgaatggataagcaaaatgtggtaaatccttacaaggaaatagtatttgaccataaaagtaatgaaatactgattcatgttacaatatgaaagccagttacaaaagactacatattgtacaagtgcatttatatgaaatgttcagaataggcaagtctatggagacaaagtagattagtggctacatgtggaggggaaggatgggggtattgggggcgacgggtaaaggatatgggatataaccattctaaaattgattgtggtggtagatgcacaactctgaatgtactaaaaatcattgaattgtacacattatatgggtgaattatatttcaataaagctattaccaaatttttctaatcttagagaatgtaaaaaataaggatatttaaatccttaacacagtacctagcaaatagtatgtccttagtagctattatttgataaatatcattttgaattttgctcagtaacacagattgaactagcagtagtgtgtaagatggtttggtaatggaaaatccagttaggacactattgtcatggttcagacgagataatgtaggtgtcagctaagattatatcagtaggtatggagagcaagaggtaatttttaactacaagtaaagtaaatagtgacattttgcaggtagaacatgaaagtaaaatctaggatttgtttgctgattgtgatggatgaagggtgatgtatctgtcagccagaatataattagaaactacacagtaacaggtggcgcaaaaacatccaatttagtagaatggtggtgatagtacacaaaagtccaaatgcctagcttattgtcaaatgctgaggattctaagatggcttctgcccttataggagactgacataagcaaggacaatataatggagttatgttttctaaagtcagcatatgaaatgaaaaaaaattttcaaaactacctttgaaaatcctttagggtagcacatgggttctctcagtaggtctatcagagccagtttttcccagtgctggaaataaatctgtatttggctgatcaccagacgaagtagttggcttgggttttgggggccctattgtagtcaatcagacaatcaattatttatcaaacactcactactaggctctaaagatatccctgttctcaaggagcttacattctagatggggacagaaacagtaaacacacagaatttcagatgctttttttttttttttttttttttttttttttttttttgagacggagtctcgctctgtcgcccaggctggagtgcagtggcgggatctcggctcattgcaagctccgcctcccgggttcacgccattctcctgcctcagcctcccaagtagctgggactacaggcgcccgccactacgcccggctaattttttgtatttttagtagagacggggtttcaccgtttttagccgggatggtctcgatctcctgacctcgtgatccgcccgcctcggcctcccaaagtgctgggattacaggcgtgagccaccgcgcccggccagaatttcagatgcttttaagtggtataaggaaaattaaataatgagcatagctgctagtggtggttgtgctggtggcagctactaatgttcaggaaataccttgaggagatgacattttttgtttgtttttttgagatagggtcaggctctgtcacccaggctggagtgcagtagtgagatcttggcttactacagcctctgcctcccaggttcaagtgattctcccctgtgagcctcctaagtagatggattacaagtgcacactac

SEQ ID NO: 6767 - DNA, 37305 bp, Homo sapiens
  misc_feature (1)...(37305): n = A,T,C or G, or insertion/deletion polymorphism (see Tables 1-2)
catggcaacaccccgtctctaccagaaatataaaacttagccgggtgtggtagtgggcgcctgtagtcccagctactcaggagacttaggcacaagaatcacttgagccaggaggcggttacagtgagctgggatcgcaccactgcactccaccctgggtgacagagcgagaccctgtctcaaaaaaaaaaaaaaaaaaaagctaggccaggcgcggtggctcatgcctgtaatcccaacactttgagaggctgatgcgggcagatcacaaggtcaggagatcaagaccatcctggctaacacggtgaaaccccgtctctactaaaaatacaaaaaattagccgggcgtggtggcaggcgcctatagtcccagctactcgggaggctgaggcaggagaatggcgtgaacccgggaggcggagcttgcagtgagccgagatcacgccactgcactccagcctgggcgacggagtgagactccgtctcaaaaaaaaaagttctggagttggatagtggtgatggtgactcatgtatgtgaacatgttgaaaacaccgagttgtaactttgaagggtaaattttatggtatgtgaattatatctcaaagttatagagcagttactgaggctgggtgtggtggctcacgcctgtaatcccagcacttagggaggttgaggcaggaggattaccgagctcaggagtttgagaccagtctgggtgacgtagtgagaccccatctctacaaaaaatacccctcccaaaattatccaggtgtagcgtgcactccggtggtcccagctactcaggaggctgaggtgggaggatcgtttgagccctggagattgaggctgccgtgagccgtgatcgccccaccgcactccatcctgggcgacagtgagaccctgtctcaaaaaaattaaataaaaatggtcactgagatggtaaacacatggaattccctttgaagccagtggacacagtgtgtgagtcaaggctgctgttcactgaggaggcctgaactccctcccgaggggccccggctgtgcgtggccatcttgccagcatcagctcatcctgctgtgccctcgtgcctctgggggctgctcccggggggctctggggtatccaccctgtcccatgtggaatgtttctggttcccactgacactgtttggggagtggtggccgcggggctgtttgcttctcctggaagggccccggtgggcacctggagctttatgacgaggaggcttttaagttttcttgtagacacatttaaaaactgagaaacaagtgaatttattttaataatatattttatttaactccagtatgcccaaaatatttccatttccacatgcagtcgatataaaaagctgtcacagagatattgacccttctctaatcacgtgtcttgcactttcagctgtggctgctgtgtcagacaatatgaggtggggaggggacaggccttggaggcctcctttgggatcaacagcttctgggggctctgaagccagtgttgcccgcccactcgctctgggtctcaggccggcctccagccccctgtccttgccgcatcctgggggtggcggctgcagggccctcaaggttggcgctctcagaagagggcagtaaggccggctctgtgggggtgggggagcctgggagccccccatcggggtgccagggagacctggggggcacacagcccactctcttgccgcctcccgccctcctggccacgcctgctggcggcacaaggcccacctggagggcccaccggtcctcagggaaacaccacagaaaaaccgcagaggaagcgtgacctggcgcccggacaagaatgcagggtggcccggcttccagtccgtcttgggtgactcactgcggtgtgcagaaaacaccattgtgcaccgcggccacaggaagcccttccgnnnnnnnnnnnnnnnnnnnnnnnnnnnnnnnnnnnnnnnnnnnnnnnnnnnnnnnnnnnnnnnnnnnnnnnnnnnnnnnnnnnnnnnnnnnnnnnnnnnnnnnnnnnnnnnnnnnnnnnnnnnnnnnnnnnnnnnnnnnnnnnnnnnnnnnnnnnnnnnnnnnnnnnnnnnnnnnnnnnnnnnnnnnnnnnnnnnnnnnnnnnnnnnnnnnnnnnnnnnnnnnnnnnnnnnnnnnnnnnnnnnnnnnnnnnnnnnnnnnnnnnnnnnnnnnnnnnnnnnnnnnnnnnnnnnnnnnnnnnnnnnnnnnnnnnnnnnnnnnnnnnnnnnnnnnnnnnnnnnnnnnnnnnnnnnnnnnnnnnnnnnnnnnnnnnnnnnnnnnnnnnnnnnnnnnnnnnnnnnnnnnnnnnnnnnnnnnnntgcctcagagcccatctccggagcaagcccccatgcccagggctcgggggcagctgtgccttcgctggtttccttctctgggaagggggcatcctgggctcagctgggtttggggtgaagatgagccttcctgggcgtgcgtgcccctcccacgcctgcgctccattcggcatcatctactccatctcacggccaggcctgggactccccacccggggggccggcctcggggcctcagccggaatctgctacaggttctgcggtggtccaggggccctagaggtgccagcctatgcccacctggacacctgctcagcgcacagggcagccacagccaatgaccgaaatctgcactgaggctgggggctggggctccaggcacagtcacctgcagtcccctgagacgcctggacctcactcaggccctggggggtctgccaggctctgtgggaaagcactgaggccgggggctggggctccaggcacagtcacctgcagagccttggacctcactcaggccctgggggtctgccaggctctgtgggaaaggacacagccctcgccctgccccccgccctcagcagcgtcgcctccacagtgagtcaggcacgtcccccgtgggtcacctcctccatgccaggccgcccccaggggggcttcctcgttgtgcagttctgccccgtgtgggtagggacccagctgtgtcgtctccctgggtgtggatcgtggggccagggaacaagagcctctggggttctcagaacccaacgttctgtggtcacaggactcatggcaacaatttggcttgagttagcacctttcagaagaaatgaagacacttaaaagggttggttgttaattttttttttttttttttttgagacagagtttcgctctgtcgcccaggctggaatgcggtggtgcaatctcagctcactgcaacctccacctcctgggttcaagtgattctcctgcctcaccctcccaggtagctgagattacaggcacccaccaccgcgcctggctaatttttgtatttttagtagagacgggatttcaccatgttggccaggctggttttgaactcctggcctcaagtgatctgccctcctcaggctcccacagtgctaggattgcaggcatgagccactgtgcccagctgttggttgttaattatttttgttttttgagacggagtttagctcctgttgcccagctggagtgtagtggcacggtctcggctcactgcaaccttcatctcccaggttcacaccattctcctgcctcaacgtcccgagtagctgggattacaggcacctgccaccatgcccagctaattttttgtatttttagtagagacagggtttcaccatgttggccaggctggtctcgaactactgaccttgtgatccgtccgcctcagcctcctaaagtgctgggattacgggcgtgagccaccgcgcccagccagcagttgttaattttaagtggaagctgcaaaactggtgagtggtgtcgccccatcagggagctggggagccccgcttgtcctggtgtgggcttgggacctggcaccacgttccgagaaagatgctgagagatccagacaggctttttcatcctaaaatgaggccagttacagagagtgtgcagcgagggaatgtgaactgaatccttgccagccgtttccattctcagtcacatcagcccatgtctccacttggccatttttaggtccagggctttgtagacacagctccctccctacacgccgcatgccaccatgcctggatagatacctgtttttttcatagaaacagagtctcgctatgttacccaggctggtctcaaactcctggactcaagcaatccgcctgctttggcctcccaaagtggtgggatcaaaggtgtgagccaccacgccgggccagttttctgttaacttaaaacacaatatctaaaactgggtaatttataaagaaaaggaatttatttcttacagctctggaggctaagtctaagggtgaggggagcatccgaggaggcgttcatgctggcgggattctgaatgaggaggtattcatgctggtgggactccgaagggtcctgaggcggctcggggcagccatggtgagggcccagcatgcgggctcaggcctcaggcctctcctcctcctcttataaagccaccagttccactcccgtgataacccaggaatccatgaatggattaatccctccagtggggcaggatcctcaccccccgggcacgtcccaaggccccaccttgaaacgccgcagcatggtgatggaattccagcgtgtttcagagggacacactttaaattatagcagccgccctcccgcagaagggacaggccgactgcccccttcccaggctgatcagcaaagtgagtgccatcggggccttgtacaagttcatcctgagctcagggataaaaacagccctgcagacttgtggagaggggctgacccagcctgatggtgagagacaagctgcgcccgggtcctgggcctgtgcgcccgctggcctggcttccctgtacagggtgggtctgtccattccgattggctcgaggctccaccttttttaaagaggatcttggaactcacagcccactcaagggacgcagataaaaggcccccagtctcagatttggggttaccattggtctgaggggccggttcagctgtgctggacgtccctggagggccttgctgagcagctggggggaggtgtgggggccgtaggggctgctgtctcccccagagccctcttttttttttttttttttttttttgaggcagagtctcactctatcgcccaggctggagtgtagtggtgcgatctcggctcactgcaagctccacctcccgggttcacgccattcacctgcctcagcctccggagtagctgggactacaggcgcccgccaccacgcccggcaaatttttatatttttagtagagacggggtttcaccgtgttaaccaggatggtctcgatctcctgacctcgtgatcctcccgcctcagcttcccaaagtgctgggattacaggcgtgagcgaccatgcccggcccccccaccccaaagccctcttaaaagccccttgggagctttggggcacgtgcagggccggccaaatgttggaggagacacatccaggcgcccagaggaagagtcactgttgggttttagtaaaacacccacgcagcgcagtcgaacgtgaggaggaggggctgggcttcagagctttctggagacacagcaaggaggttgggccagggagacccttggaggcctgaggctgggagaccacaggaggcatgagggtgggagatccccagaggcatgaggctggggagacccccggaggcgtgaggctggaaaacccctggaggcttgaggctccgcatttgtgtgctgcggggcctggggtgtccatggtgcccaaggggaaagccccctccggcctccccccagaccctttgctgtgcccctcccgcctcccgcctcccgcgtgtgtccttgggtccagccggcgcatccaagacctcgaatgcctgtggacccgtgggctccagtgacggaagcactgggcacttctcccactccagctgggccgtcttcagaaccaggccaggagccgctgcgttggggtttatgcttggatggtggacggccgtgggtgtgtctggggggccgcactctggggtctggagctgcgtctccatccttccctgtcagggaccctctgaagggcctgcgggccaccagtcaccctcccttagccaagggatcccgggagatgggggcggggacgctgggttctgggttgtggggctggcagggcagagcccgagagcggccagacctgccctttgcacggcacagaggcccccaggaaagggcctgcggtgagccgggggcagatggccccttgggggccaggacctcaggtgggtgggcttcgcgggggagcagtcacctctgcggtatttagggcaggcggacagaggtggaggggccgccccgtgttcgccgcggccgccgggctgggctctgcctgcagcgctggcctggtgggaaacggagacccagcctgggcgtgcgggtaggggaggcgcctgggaccgacgcggctgagacggaggaggcgctgccgggttccaccagcagaggggcccagagaccggcccggacgcgcggcggtcggcgtggggtgcccgggactggctgctccgcaggccgcccccgcccgcccgctccggtgcstctgtgaacgggcgggtttgctggcgagcgttctggcctccaccactccgggtgcagcagatgcggggccttcccrgtcacaggaccctgggacgctgggaggcagtgttggctccgcacctctctcggagcctgacggcctggctggggctgccccgtcgggtccccgcagcgcgcaaggccgtccccagcctgctgaggggggacgggctgcactcctggaagggaggggtgggggctgaggagcggcctggggtgggggtcgggacacagacaccccagaggagggctggggagagggtctaccgcccactgaggctgtggccgggggagtactgagagcccagggaagtttccagaagccgctgggagtgcccgtgggaatggaggtggtggtgggggacctgctgcctttattcatttgctcatcagacaccatcagcgccactaatgccgctgccgtctgggggtcgaggggtgcgttggtgcaggaagccaagtccaccctccagacggccacggggcacgccaggggcaggagtgttggccaagagcagccgtcgcctctgccgtttgggacaagacaaacagaggtggagcggcctcctgtcagggcctccctgtgcgatgggggtgtcacgaggctcaccccgccctggctgcactcagcccccagctctcagctccagataaaacttgctgccagccaccctggttctgtgcaggggcctcatttttctttcttttctttttctttttcttttctttttcttttttttttcctttttccttgccttttattttctttcttttcctttccttttcttttcttttctttcttttctttttyttttttggaaacagggtcttgctctgtcacccaggctagaatgcagtggcccaatcttgggtcaccgcagccttgacctcctgggctcaagcggtcctcccacctcagcctcctgagtagctgggactacaggtgcatgttaccacgcccagctgattttttttttcataggatggggtctcactatgttgcccaggctggtctcaaactcctgagctcaagtgatcctcccgcctcggcctcccacaaggctgggattacaggcgtgagccaccgtgcccagccagtttcacgttttattcactcttcagagcacagaggcctctgcctggcattggggcacgggcaaggtgtctgtgggcagcgggtcccaccaagggttccagggcagcagatggtaggcagggcggggagaccatgtgcatggtacccacccctgtgccggccggcaggagaagccaggctcatgctgagtcaggctaactctaacatttatcaggaacttgatctacttcaatgtgatgtaagaaaatcaaatgtgctttcagcagaagatccagggaggaaaccaacaatagagagaaatggtggcttctgctgccttacagagtgggagctgtgcctgagccttctgcctctcagcccagagcctggcatttcttgaaccatgagacgtaaagtttattgttgagagcctgagaaactgtggatgctggggacgggtgagtggctggggacgggtgagtggcctgcgacggccgccctgggctccgtccgcggctctgcaaatccttgggccacggacaccagcacgaatgagtccaggacctgtgtggggggcccaccctgcccccsttggtcctgtggtccaggggtccccagggagcagttggggaagcagcgrgggttggggctctggcccctgctctggccctgggtgcccaccgccttcccccgggggtgctggcccagccctctgtgggtcagagcccactgtgccggaccccagcgcagttaggaggtccaagggtgggatgtgcggatgtgcggggctcccaagtagggtctttggacacccgctggcagaggccctgggaatttgggaatggccactggctcacctgtgggaaagcactgtgtcccctcccagcccctggctcacctgtgagacagcacgtgtcccctcccagcacccggctcgcctgggggatagcactgtgtcccctcgagcacctgggagggctgtggcaacagctctgaggggataggtaggggctgaggcagatgaggtggcactgggagcaaggaggagacaggcgtggccaggaggggactgtggcttttagtgattttttttttttttaagacagagcttcactcttgttgcccaggctggagtgcaatggtgcgaccttggctcactgcaacctctgcctcccgggttcaagcatttctcctgcctcagcctcccaagtagctgagattagaggcatgtgccaccacgcccagctaattttatatttttagtagaaatggggtttctccatgttggtcaggctggtctcgaactcccgacctcaggtgatcctccggccttggcctcccaaagtgctgggattataggcatgagccaccgcgcctggccggcttttagtgattttttttgcatgatttttcagaatttgcaaatgtagttttccaaatattgtattacatgcataattgcctttataggcagctgaggcaataaaaagcaaataaaagtggagagtggtagagtgaggagactgggacgagacctgctttgatcctggctgagctcagttttctcatctgggagatgggcacgcctctttcatgaaggcggagggaatagtgtgcagaggcctygtgggctccctgacccttccccaagagctggcgtggggagcctctgcctctgttggggaaggacccgcgatctgctgtgggctgagttgtttccccccaaattcccatgttgaagccctaggcgccatgtcactgtatttggagatggggtcttggcagaggtaaaatgaggtcgttggggtgggccctaatccagtaggactggtgtcaccacaagaaggggagatcaggacacagacgcacatggggggacccgtgaggacccagggaggagacccagggagtggggcccaccctccccacccagtctcagagctgcagcctcgggacagtgaggacacacgtccctgtcactcgcgccctgtgtgtggtgctttgtacggccctggaggacactccacatccttcggggtctatgcagagatggcgtgggggtgtgactgccccgcctcgggacccatccctatcccacaggtctgtcttccccttcatttcctggtgaagagcccaggctggggcatccacggttctgggcatggtggagagggccttctgagaagggcagcgaccactttctggagcccttggaagctggcggtgggctctgcgtggctgggtctgccctgctgggaggagccctaagaccctggatctcgggcctgctggtccatctcccccaaggccaattaaggtgacagcaaaagaattaaaaaggcaaaaccccttaggggcaaagagaaggagagaggcgaaaactggggggctcgggaatggaggcccaggtttcctgggtacgggcgtctggagggctgaaacggacctggggcggccttcatggggtgctgccagaccctgcggcccccgaccctcggagaccctgggccagggtgtgctggctgctgctgctgctgggctgggggtggggagggctacagaggaacggggtctgcagctccctgcctgtgcccccaaactcagtggctggcaggtgcggctgggagggctttttcctggacagaccagccgggaggagacgcgttcgggtctgcatcttctggggcccctcaggtcactcacagtggggccccactcctggggtgcycccaacccatttccaagcagatgactagtgcctcactttcagatatgcatagcagtccccacactgccatggaggggagaggggtcagcgccggggatcctgcaggaaatgagccaagccgagccacagggtctcccgtggcgggtgatatgctttggctgtgtcctcacccacatctcaacttgaattgtatctcccagaattcccacctgttgtgggagggacccagggggcagtaattgaatcctggggccggtctttyccatgctgttctcatggtagtgaatatgactcacgagatctgatggctttatcagggtttccacttttggttcctcattttctcttgctrccaccatgtaagaagtgcctttcgccttccaccgtgattctgaggcctccccagccatgtggaaatgtgagtccaattaaacttgtttttgttctgagtctcaggtatgtgtttatcagcagcgtgaaaacgggctaacgcagtaaattggtaccagtggagtggggtattgctgaaaagatacccaaaaatgtggaagcgacttggaactgggtaacaggcagaggttggaacagtttggagggctcagaagacaagaagatgtgggaaggtttggaacctcctagagacttgttgaatagctttgacaaaaatgctgatagtgttatgaacaataatgtccaggctgagatggtctcaaatggagatggggaacttgttgagaactgaagcaaaggtgactcttgttatcttttagcaaagagactggcagcattttgtgcctgtcctagagatttatggaactttgaccttgagagagagatgatttagggtatctggtggaagaaatctctaagcagcaaagcattcaaaagctgacttggatgctgttaaaagcattctgggaccaggcacaatggctcacacctgtaatccccacactttgggaggctgagacgggcggatcacgaggtcaggagttcaagaccggcctgaccaatatggtgaaaccacatctctactaaaaatacaaaaattagccgggcgtggtggcacrcacctgtaatcccagctactcaggaggctgaggcaagagaatcacttgaaccagaaaggcagaggttgcagtgagccgagatcacaccactgcactccagtctggtgacggagcaagactccatctcaaaaacaaaactaaaaaagaattatgtttaaaaagggaaacagcataaaaattcagaaaatgtgcaacctgacgcagtagaaaagaaaaaccaattttttcaggagaaattcaagccggctgcagaaatttacataagtagcaaggaggctaatgttcatccccaagaccatggggaaaatgtctccaggtcatgtcagagaccttcatggcagcccctcccatcataggcctggaggcccgggaggaaaaagtggttttgtgggctgggcccagggtccctgtgctgtgtgcagtctagggacttggtgccccatgtcccagacactccagccgtggctgaaagaggccaacatagagctcgggctgtggcttcagarggtggaagccccaagccttggcagcttccacgtggtgttgagcttgtgggtccacagaagtcaggaaatgaggtttgggaacctctgcctagatttcagaagatgtttggaaatgcctaaatgtccaggcaaaagtttgctgtggggcggggccctcatggagaacctctgctagggcagtgcagaagggaaatgggtgggggccgggcacggtggctcacacctgtaatcccagcactttgggaggccgaggcaggcagatcacaaggtcaggagatcaagaccatcctggctaacacggtgaaaccccgtctctactaaaaatacaaaaatatttagtcgggtgtggtggcgggcatctgttgtcccagctacttgggaggctgaggcaggagaatggtgtgaacccgggaggtggagcttgcagtgagctgagatcgcgccactgcactccagcctgggcaacagagtgagacaccatctcaaaaaaaaaaaaaaaaaaaggaaatgggtgggagcccccacacagagtccctactgggacactgcctagtgggactgtgagaagcaggccactgtcatccagatgccagaatggtagatccaccgacagcctgcaccatgtgcctggaaaagcagcagacactcaacaccacctgtgaaagcagctgggagggaggctgtaccatgcagagtcacaggggtggagctgcccaagaccatgggaacccacctcttgcatcagcatgacctggatgtgagacctggagtcaaaggagatcattttggagctttaaaatttgactgcccttctggatttcagacttgcgtgggccctgtaatccctttgttttgtccaatttctcccatttggaacttttttttttttttgagatggagtctcgctctgttgcccaggctggagtgcaatggcgcgatctcggctcattgcaacctccacctcccaggttcgagtgattctcctgcctcagcctcccaagtagctgggactataggtgggtgccaccacgcccggctaattttgtatttgtagtagagacagggtttctccatgttggtcaggctggtctcaaactcccgacctcaggtgatccgccctcctcggcctccccaagtgctgggattataggaatgagccacyrtgcccggcccagaatggctgtatgtactgaatacctgtacccccattgtatctaggaagtaactaacttgcttttgattttacaggctcataggcggaagagacttgccttgtctcagatcagactttggactgtggacttttgggttaatgctgaaatcagttgagactttgagggactgttgggaaggcatgattggttttgaaatgtgaggacgtgagatttggaggggccgggacggaatgatgtggtttggctgtgtccccacccaaatctcaacccgaattgtatctcccagaattcccacgttatgggagggacccagggggagtaattacatcatgggggccagtttttcccatgctattcttctgatagtgagtaagtctcatgagatctgacgggtttatcagaggtttcctcttttgcttcttcctcattttctttttttttttttttttttgagatggagttctgctctgtcacccaggctggagtgcaatggtgcagtctcagctcactgcaacccctgttcccaggttcaagtgattcgcctttctccgcctcctgagtacctgggaggcaccaccaccacgcctggctgctttttgtatttttagtaaagacagggtttcgccatgttggcaggctggtcatgaactcctgacctcaggtgaactgcccgcctcagcctcccaaagtgctggcattacaggagtgagccactgtacccggctctcattttctctkgccaccaccatgtaagaagygcctttcgcctcccaccatgattctgaagcctccccagccaygtggaaccataagtccaattaaacctctttttgttcccagtttcaggtatgtctttatcagcagcgtgaaaatgaactaatatgggggttaggaagagaagccaggaataagagaggagacccttgtaaaaagcttcagaaaaccagaactcgtggatagtattaaatttgtgatagcagaaatgaacctttcagtgagagggttgcaaaataaagttcaggaaatctcccaaaaaggcagagaaggaaagatgagaagacaaagtaattctcaggaagtgtaagttctaaacagcaggagttcctgaggacagaactgagggcgtggagggcaggacaccatcgggaagccacatgcagaagggtggccacggagcccccaggggaccacaccatgtccrtcctgctgggatccggccacggccccggggtctccccagaagatgctggcactcgagtcagggggcatcagatttctcagcaacccctgaggctagaagacagtagaggggcgttaccatgaccgtcaggagaatgacccctgccccacagccacgcacagccaggcttccagtggaggtgcagtgtgcgtgtgtcatggggacgtggatgcgcctgtgccacagggacagtctgtgtatgtcacrgggatgtcggtgtgcacgtgttacgaggatgttggacgcgtgtcacggggacatggttgcctgtgtgtcttggggatgtgtcttggggacgcgggtgcacatgtgtcacggagacgcggttgcctgtgtgtcttggggacgcgggtgcacgtgtgtcacggggacgcgggtgcctgtgtgtcttggggatgcgggtgcacgtgtgtcacggggacgcgggtgcctgtgtgtcacggggacgcgggtgcctgtgtgtctcggggacgcgggtgcctgtgtgtctcggggacgcgggtgcacgtgtgtcacggggacgtgggtgcctgtgtgtcttggggacgcggtcgcctgtgtgtcttggggacgcgggtgcctgtgtgtcttggggacgcgggtgccagtgtgtcttggggacgcgggtgcctgtgtgtcttggggacgcggttgcctgtgtgtcttggggacgcggttgcctgtgtgtcttggggacatgggtgcacatgtgtcatggggacgttctcagacaagcaaagggctactcagtgctcctcccttgcggttctgcctgaggtgctcctggaaaaggtgctcccttagaactaggaggtgaacttcggggagcacaggggacaagagggaagggggtccagggtgagcagggctgcagtgcagccatccagacggaggcaggcagaggctggggaatgggtgtctccacaaagcgtgtgaaccccagagccaggcgtgcagtgctgcagacggggccgttcaccaggggaacagagggcgcccggctgtggaccgtggagccacagttccttctgtctttccccctcgttctttcaatctggtccttctttgatctgttttcagattcactgactcatctgccatccacctgctgtgaagcacagccactgagtcaaacacatttcagtgatgacactttttattgccgagtttccatttagctcttttatgtagtttcatataatcttcatttctctccttttactcattaaaaccatatttttttaactttattcatggttttttggggttttcttgagacggtctcgctctgtcatgcaggttggaaggcagtggtgcgatctcggctcactgcagccttgatctctgggcttccagcgactcttctgcctccgcttgctgagtagctggaaccaaaggcgtgagccaccacacccggctactttttaatttttttgtacagtttgaccatgttgcctaggatggtctcaaactcctgggctcaagtgatcctcccgcctcagcctcccacactgcactcggcctccttgaactgtttgaacatgttttctgttcattctgtgaacgcagttgaaatcgttgtgttaaagtctttgctaacaccaataactttgaggccttcctcgaagttgctttctgttctctgttttttgtgtttttccacttgtttatgggtcatatttccttgtttctttttaggtcttgtgatttttattacgtgctgagtttcgtgaattatccattgtggaaactctggatttaggtatcatcctctgaagagcattgtttttcgctccggtgggctgttcagcttctggctgagtcccttgaacttggggttgtgtcttgatgttttgtcaggggctcttcggagagcctagggcctttctcaagcctcctaagctgggtgggactcaaccttctccagctttcacgggcttggtctggatctgtcctccrgctttcgtgggcttggtctggatctggcgagaggctctggagcaggccttcctctcagcatggtcttcggctgtggccgtctggtcctggttgtgtgttgatggggtccttcctcttggctggcctggactgcagtgtgtcaggcgctgtgtggcctctggtgtctccactgtattctcagccctggggccgcgggtcctgggaggctcgggggtcctcctgcccacacactcactgccccagcagcccctcctgcaggtgtgtgtcccccagtggccccctcggcatggtgggacactgtgcccagcccaggctccagcgtggggagcagctgtcctggggctgccttgggcactgactgctgtcgggaaacgtggcctcacactgcctgttgcccagaaactggtttcctaagatatatcatccagttttacgtcgtttgcagtgggagagccacagtccctccccgacggtggagcaggagtctggagcagcctgcgtgagaaaggaaaaggcatcctaacctccatgtgacgcggctgggaacggcctctgtccgtcctgagtccacagacgatgtccacgtaacttttttcaggaggttgtgttgttgtgtgtttaggggtgcgtgttggccgacaggtgagacagattcttaccctgcctgggcggagctrtcagtaatgtgtaaaactgaaggcctctaagtgactgtgccgcgtgtggctgagaaacacacacaggtccgtctccccgggaatggccaccgtgagggctgcctgggggagggcggcacagctctctcctgcacgcctgtgttaggattcggagttcacatgctgagctttgtgtaactgctgtgtgtgattcaaactaaagctatgcactcagagaaagcctttttatgcagccttgcgtaagcagactgaaggagaagggtgaccctcgtaagtgtagataagggttttgcatcaaaaacactcccaggggccaggcgyggtggctcacgcctgtagtcccagcactttgggaggctgaggcgggtggatcacctgaggtcaggagttcgataccagcctgaccaacatggggaaaccccatctccactaaaaatacaaaaattagccaggcgtgatggcgcatgcctgtcatcccagctactcgggaggctgaggcaggagaatcgcttgaacccggaaggcggaggttgcagtgagctgagatggccccactgcactccagcctgggcattgcagagagactctgtctccaaaaaaaaaaaaaagaaagaaagaaagaaaagaaaaaaaaacactctgagggagactgaggtctgcctgggatgagagctgtcagcggccgcctggagtcttacggagctgcgtactgggtcagccgtgagggcgtcactccgaggtccctggtcctgcaggcgcccttgccctctggaggagagcacctctctcccatgtggctccctcagggcaggacacacagcctgagggggacatggcaaggggggtcacgctgtcctcaagaacaggcccctctgcactcccgcgagggtctgtctactgtgcccccccccagggcccctcccaccccctgccctccctgctgaaagctgggacggtttggcagggaactggaatgcagggtccaaacttggcagccgtcaccccagctgggagaggagtgtggagctgcccgctatgctcagcgactgggggtcccacttgggcccccccaggcaccagctccctccaccacctccaggggctgtgggcgtgggctctgcatggctgcctgttgcagtgggctctgcattcacctgattgtctgtttctgcagatcctcgttcctagctgcctgccagcgtcctcggcccggccctgaggatggacccaggagatcccgctggtgaccctgccgctggcgagcgccaccgcatgggtgagtctgagcctgatggtgccgagtctccctggggctgtggggggaggtgcgtgggggtgcatggggggtggtggcgcccactgtgtactcagtgacgagggccaggctgctggcccctagctgcgggcctctctacagtgtccacggcttgggaccttgtgagtccggaggccccactgtggccttgttgtcctcgggggtcaggacaggccgcctccttgggccccagcgtgggtggcctggcgccgggcctgtgacaggatccgggggaggtggcggggacagtgcagctgctcagggctggccgcagaggtgggagctctggtcccctctgtccctcggggagccaggcggagggcccggaacacccttgggggcttagcgccgccactgggggctcagggaacccacagcctcttgggtctcgggcggttccagggtggcctccagggtccctagttttttaaactgaggcatttttcatcccttcgagttaagaagaacatctgccctcccagcagctttttcaggttaaaaaagagaaatgagaggcgccttccctgtgggcaaagccggggaggccgcatccccgctcggctgccctgccagattcagtgctgaggataaacagcccgaggggaggtgcagcctctctccctcctgttcctacagatcgagaccctgcaagttgaagactgggccagggttagggaagcggaggctggaaggccgggattagggaagcggaggctgggaggccrgggttagggaagcggaggctgggaggccagggttagggaagcggaggctgggaggccggggttagggaagcggaggctgggaggccgggsttagggaagcggaggctgggaggccggggttagggaagcggaggctgggaggccgggsttagggaagcggaggctgggaggccgggsttagggaagcggaggctgggaggccggggttagggaagcggaggctgggaggccggggttagggaagcggaggctgggaggccggggttagggaagcggaggctgggaggccggggttagggaagcggaggctgggaggccggggttagggaagcggaggctgggaggccggggttagggaaatggaggctgggaggctggggttagggaagcggcggctgggaaggagtggagctgcctagtgccagaggggtcagcccgagcctcagctgctctctgtgccggggacgggctggggcgggaagcctcctggcaggggctcggccccagtgggagctgtccggggccatggctttgtgggcagagggtgagaagggggtgccggggccccttcacatccttcaccctgcagtccttgtaaacagcagtgagagctgtaaggccctggcccagccgcctcgccctgggctgcaggccctcagtttgttgtgggtttactgccttttcactcaccgccccctggcctttgcccagttccaccctacacatgccctgcctggcagcccctccatggggcagggccatggccctcccctctgtgaaagccctgctcccacatggcagcagctgaggctctctgcctcagtttccctatcccacgcagttgcctcctcgggccttggacccctccaggggcttcctctctgccttcctcttctgtgtcccagtgggtgctgagggctgtgggggcacctccgggcatgtcgccttccctgatgtagccaggtcagcgtgtgctcggggaggggccacctctgagctgggcggggcttggtgtggatgtggccccctcagcaggcacaaccctggctgtcctgtggggccctgaccacacacctgcccctctggggatgggcccagaccccctcacccttccgttcatccaccgcctcctctgaggccatctgcgggccccgggcctgcacctgtgtgggatgaggccctgttacctcccctggagaccrccgtcagggccggggagcgcatgggaccctgggttcgcctcagcacagagctgactctccctgcacaggcacccacaggcttctacagcctcttctccacctaagcagagtgggatgttttcaaagtgcaacaccccagctagcagggcccctggaacagcctcggcgccccctggaacactaatggccctccctggaacagacacggcacccccaccgagaacagcctcggtgccccctggaacagcctcagcaccccckggaacactaatggccctccctggaacagacacggcacccccaccgagaacagcctcggtgccccctggaacagcctcagcaccccctggaacactaatggccctccctggaacagatacggccccccgccagaacagacatggtgcccgctggaacactaatggtcctccctggaacagcctcggtgccccctggaacactaatggccctccctggaacagacacggcgcccccccacagaatagcctcgatgccccctggaacagcctcggtgccccctggaacagcctcggtgccccctggaacagcctggtgctcctggaacagacacagcccccccagaacagacacagcaccccctggaacagcctggcgcttcctggaatggccacatccccccatcctttctgtgctgctttaggcatctgcccttacrtggttcgtgtccagctctgtcaacaaggccagctccacaagaggccccagctcagccctccccagtgggctcccctactcaggctctgggtcagcttcttcccaggaggtgtcctggcccctgtgctggccccgcctcgctgcctggacacctgtccgtgccaccctggtcactgagcaggacatccgcgtctgtggcccctgggaccctgcccccgacagccaggcctgggtttgtccttttaggtagagtgcctggtccaggtcattggaggagagtccacatggccacctctggcgtgttctagagaggccctcccgcgctgggtcaggaggcakcatcgggacaggagaagggggctgagctcctgttcctctctccctcccccgaggccaagaaacattcccatccgaatgtccactgcgctcacagattcctttcctcctaaaacttcagccttggccaggctcacggccaggattatggtggctcacgcctgtaatcccagtactgtgggaggccgaggcaggaggatcacgaggtcagaagatcgagaccatcctggccaacatggtgaaacycygtctctactaaaaatacaaaaattagctggacatggtggcgggcgcctgtattcccagctactggggaggctgaggcaggagaatggcttggaggcagtagaactgcttgaaccctggaggcggaggttacagttatccgaggttgtgtcattgcactccagcctggggaacagagcgagactccatctcaaaaaaaataaaaaacttcagcttttgcatgagcaggcgcagttgaggtcagaaagtccacgttgcccacgtccacctggttcggggtttccaggcggcgcttgagccttccttgggaaattcagagtcccacagacggcattaaactgcagctgggcaccagggccrgcggtcggcgaggcggggcggggcggggcagggaggccggccctctggcagaggcagcagctccaggaatcaccagggccggcgggcggtggggtggggcgggkwggccggccctctggcagatgcagcagctccaggaagcctgccggcctgggttccctttccctccacatccgccgctcctccccatcttgctgggctccggacaatgggagcctccaaggctgaggctgccctggcttcccggaggagacccatgccctacagcttgggcctgctgaggtgcctggggctggggacgtggccagcctcacatccagcgtccacgctccagacgggttcctcggcacccgcccagtgtggacacggcggtgaacagggcagggcccgcaggagaggccacttttcctacgaagctccgtgatgagcgcatgccgctctcgtaatgcaacgtgaacgtgcgggttcctggagacgcctccctctcaggcctcactggtgggctgtggctgtgggtggacgtggggacacctgaggaagggcggcggccgaggccctgctgggaggggggtaaggagaagctgccgaggctgccctgcccctctccatgccgagcaggccacccccgccccaccatgggtcccccagaggtgtgggcaccagatctgcctccaggaccctggggacgggcttgtccctgtcccacgacgaggtcacaggcactttgtggcagcctctgagccaccctcactgtgtcctcgccccctgccctcagcgtccactggccttgacctggccaggaggctcccgggcctttctctcctcggctccactgaaggaggctgagctggcctggcccggcgcctgcccaggcccagctggcagtgggggtggtgctttctctgcctccaaggctgcggagccaaacgtcgggctgtgacatgagggtgacatgagggagaccggagggaagtcacagctggcctcataaaaccgtgaaaacgcccttccacacctgccagcagagagggctcatcttcctcactgtgtgaccgggccacgctgcctaacctgttttctcatctgaatgatgattctaacgccaataccgggcctcatttctgtgtgaatattgaaggagttagtttatgtaaaaccacccagaacatactgttatctttttagtttttatttatttgtgtaatttttatttatttactttttttttttttttgcaacagaatcttgctctgtcgcccaggctggagtgcagtggcacaatctcggctcaccacaacctccgcctcccgggttcacgccattctcctgcctcagcctcccgagtagctgggactacaggtgcccgccgccactcccggctaattttttgtatttttttagtagagatggggtttcaccatgttagccaggatggtctcgatctcctgacctcatgatccgcccacctcagcctcccaaagtgctgggattacaggtgtgagccaccgcgcccggccaattttttttttttttttttttttttttttgacagagtctcgctctgtcacccaggccggagtgcaatgtcgcaaccttggctcactgcaacctccacctcccaggttcaagtgattctcctgcctcagcytcctgagtagctgggattacaggcacccaccaccatgcttgggtaatttttgtatttttagtagagacggggtttcgccatgttggccmggctggtctcgaactcctgacctcaggtgatctgcccgcctcggcctcccaaagtgctgggattacaggcatgagccactgtgccgggtctgttactttttaaaaataggcatttcatcttccaatatttctgttgtaggtaggatcttttcttcagcagattttctgacctgcggttgcagaatgaaatttggggatctctctgtccctctctgcatgcatccacctggctcccagcgtcccagctccttgctggtctcactgtccctctctgtccctctcgctccgagcgtcccagcacctcgacgtactcactgtctctgagtggcgtccgcctcatgccccctgagctggtaccgccctttccctctctgcctccttgtggggtccacagcatcgaacggtgggctctccccctcatcccgctttcccagcagaggcagcttgggcttaggctgggtcaggttctgtctccaaggccctcggcttcatggatgaggcaagtgagtaggactgagggtgaggggacccatgaccgatgagagacggtgctgtgctggggttgtgggccgctgtgttgatagagcaagggctccgtgccagatgctggacctccgggagccccttcacctcactccccagacacgggcggtcctctgcggcgagccgaggtggagggcacacgctgtccgccgggcttggggtctcgttgccgcctctgtccttatcacgtcccccgccctgcctgcagctgagcacaggcagatgtgggtggaatctgagaccagagacggttgggctggagggggtggccccatctcakctgcccccggacgccagaaggccaccaggagacagactcrtggcagagggacggaggccccagtgcgtggtgggtgggcgtggcctctcaggacacgcctgcgggaggtgccatggggtctctgaggggagctgaggccgtgggctggccctttctgctgtccgtgggcggtcagaggactgacccaggcggggtgctgtgctgatagcaggtgccyggacccgtggacatgcaggtcaccacagcgcgtggggtctggtctgggcggccgggctcttctacactcactgccgcggggtctgatgctgctggcaggtgtgggacggccttggagacgggctgtgagctttgtgacccaggccccaagaggagagccagctgccggggagacccactcgggggctttgtgaagaccacgtcacagacttcctgcctggaggccgggtgtcccctgccagcatccgctgcctggtgtcctctgcctggcgcccgctgctggggtcggcctcagttcctggggcttctgtgcccccaaccctgtggataaaaagccccctgtgtttctcatccccgctttatggtagagtgtcgggaataacagagccttcggcgccacccactccgcagcccacagtttcccgcgtgcgtctgtgtctcaaggtgaaggcagccccattagccgggtgtcgtttggaggaagtggcgtccctgtgttctgcccatcctgcgtccctgcaaccatccgtcctcccgtcggccggcgcgggggtgtcagctggggagccgtcctggggacagatggtggagccgtcctggccgcctctgcctggacaccctcaggccraccccacagagttcctgagccctcccaggcaygttttggggagggtggctgggggggaagccagtgtgggcaccaggctctggtgctgggcagggaccatgattcagccccccagagagaagcagcccagctcttggatgtgaatccacattcgggggactgtgggacttttattcttgagcttgagttttttctaggtgtcctcctaatacacagctgccccgctctgcccccacccacacggttccaaggggcagggtccagggtcagggcccagcctcctggccagggccatctgtctcagcgtcctagacctgcctgtctgcaggtcccaggcatcggtgcagcactgatgaacttggcgaattcagggaacttgggcctgggtgtggaggtgggggccagaggccacccacggagctccggccaaacatccacgctggggaccaaaggcccccagaagctactgcacgaggaggcgacctcagggagggctggctggggcttctggggccggagagcgggtctgggaggtccctcggtgtcagctccaagccccacccgcccttctcggaccccgtgcccctgcgtggtatccctgagttggggtgcrtggggtgctgtgtgctgagtggggtgtgtcccccagggctctcccaggcaccctgtcctctcactgctgagccctggggctcacagagctcgcttgtcttcttcgttcagacagaagccgcccctggacatcctgtttttcttctgttgtatgaacaggaagccagcaattgtgtgrgatgagtgtcagcatggccgtgtctgagcccggcacggcagacacttgtcccgccacacctgccatgggtccctccagctctggcccgagagactcagggctccccagggctccccagttgcgtgggctgtgagcaccatgtgtgcacggctggccctggaatggctggggcgggcaccgtggagtgtccatcgtgcaccggccatggcctggaaggagacccaggcggtcactgccctggggctcagygttgaggccacagtgaagcgacaggggcagaagggcaggggccgggggccaggcagggagcgggggccgagggccaggcagggaacagaggcgctgagggaggcagacaaggagtaggggccgggggccaggcaggaagcaagggccgggggccaagcacggagcaggggtgctgagggaggcaggcagggagcaggggtgctgagggggccaggcagggagcaggggtgctgagggaggcaggcagggagcaggggtgctgagggaggcaggcagggagcaggggtgctgagggaggcaggcagggagcaggggtgctgagggggccaggcagggagcaggggtgctgagggggccaggcagggagcaggggtgctgagggaggcaggcagggagcaggtgtgctgagggggccaggcagggagcaggggtgctgagggaggcaggcagggagcaggggtgctgagggggcttccgggcaggctgctgggtgctcgagaagcagcctcaggcccaaggggcagggtccaggtacacggaggttggaggctgggaggatgtggtgggccctggctttgactctcaaggctgaggggccacggtggagtccataaagtggcctggcctgccccatatttctgtaggatgctagggctgtgccgtgttgcgcggctgggtgttgtctgagggcacagcgtcaaggcagggagtcccctgggaatctggagtggcccaggtcggtgggagggggcagaccctgcccacctggagggcagaaccagcaggacctgagcagggcaaagaccagcaacactgactggggagtaggagggccggcatcaccaacttcccacctggaaaggtggatctcgatttggagaacttaaaaagaataataaggacaccctgcttattgatggatggattgattgacaggttctcactctgtcccccaggctggagggcagtggcacaatcagggctcactgcagcctcaacctcccaggctccagccatgctcccaccccagcctcccaagtggctgggacctcaggagcgccaccatgcccagctaattttatttattttggtagagatggggtcttgctgtcttgcccaggctggtctcaaactccagggctcaagcgacccacccacctcagcctcccaaagtgctgggattacaagtgtaagccaccttgcccagcttcaccctgcttttaaaaatatgtgaaatatacataacatgaaatttaccattttaaccactttcctgtgtacactcagtggcattaagggcactcatgtggctgcacagctgccaccaccgtccacctgcagaaccttctcatctcacgcatctgaaactctgctttaaaagaaaatctgggctgggcgcggtnnnnnnnnnnnnnnnnnnnnnnnnnnnnnnnnnnnnnnnnnnnnnnnnnnnnnnnnnnnnnnnnnnnnnnnnnnnnnnnnnnnnnnnnnnnnnnnnnnnnnnnnnnnnnnnnnnnnnnnnnnnnnnnnnnnnnnnnnnnnnnnnnnnnnnnnnnnnnnnnnnnnnnnnnnnnnnnnnnnnnnnnnnnnnnnnnnnnnnnnnnnnnnnnnnnnnnnnnnnnnnnnnnnnnnnnnnnnnnnnnnnnnnnnnnnnnnnnnnnnnnnnnnnnnnnnnnnnnnnnnnnncagcactgcactccagcctgggtgacagtgagactccgtctctaaataaaatattaacttaaataacaaaataaaagtctcttttgtttattgtgaagtgcaacccatgtgtaggaaggaacgcagagcacatgatgcggctcggcacatgatcgtgaacacaccacagcacgccccgcccagcccaccctggccccatcgccagccatgcccagcatgcagcacccagaacgcggggccagtcacactgcctgccatggccacgtggtggggtacgtcctccccacctgggcatcgtcccggggctgatgcacttgctccgtcctcctacagtggacatttgagtattctcagcctctgtatgcagcacactgtgcacgatggtgggacggttctgagcgcagacgggaacactggcctgtgccacccaggcccaggtggctgcagagacgccatggtggagcctgggcgccccacggtgttttatggttttttggtttttgtctgagacggagtctcgctctgttgcccaggctggagtgcagtggcccgatctcggctcactgcgacctccgcctcccgggttcatgctgttctcctgcctcagcctcccgagtagctgggactacaggcacccgccaccatgcccagctagcttttgtagttttagtagagatagtgtctcaccacgttggccaggctggtctcgaactcctgacctcaaatgatccacctgcctcggcctcccaaagtgctgagatgacagccggcygggttttgttttgcatgagctgcttttgttacatttctcccagggaatctgacattgctgatgctgttgtaagtgatttttgaaatggccatttctgtttattgctgattttctcattttggcttgtgctgagcattgatgccgaacccattggttaattctaacggcgtagttttgatccttcgtggctttctgtgtaatcaatcacattgtcggccggtcctgatgtttctgttttccttctgcattggatgccacctgcttgggacggctccaggccgggctgtggcrtccttacgtgctgccctgagcaccacgtctcacgctcgcccatggcttttacccagttcagggcgctccctgcccgtcccaggygagttatttcttaaattktgagctgaactgaattttagaacacttgctctgtgtctaccgaaagggccacgtggttctctcctccgttccggtcctgggctgaatcataaccttggactctcctgttaagtcagcctggctctctggggtgacccccgtcacacacgcttctctggcgtgtgtggcagaatccagctgctgaggtctgatctgatctcatgtgagtcctcagcctccctcgcagcaacacggggccttccctgttcccgtcctgccctgcaggggggcccagcagcttccacagccccccaggtccagggggagttcactgcggaatccacccaggctcctgtcctcaggcctcccctgtggagtccctgctggcacctgcccctccctggcctccgaccctgaccctaccacatgaccaggcctgagtgggtctccactcccctgcaccaccggcctccaagccaagccacgcagcccctgggttctgtctggaaacctccctcgggtctcgctctggtggccctgtccgtgtggggcagcgtctttggttggcactgttgctgcagtgaggtcgggggcctcccaggcggggctggagggagggggcggcgcgggagggccggggaccgaaacctaaagagggcaggggcttggggtcctcgtggtgccaggactgcggtgcagggtttgggtgagaagatgctgatgaggttgccgagggcgccaggcggagcaggtagaggctcaggcccacgagggctgctctgcacctgcagctgaaagatgaggcccagctcccagggctgagcgtggttgaagtgctgctgggcggactcagctggatgggcggccacggrccacagggaaggaacagggtgggtgctgccgcagctggcaggtgtgttgtgtgtgtgccagacagaggtgggggagggttcccggcccccckggtccagaggagccccaggcattgcgggtcagtgggagggacttcccggcgggctgtgcgatagcccctgcacctgcctctccctcccacggctgttatcttatctccacaggccrggaccccctcctgctcctgcaggccctgcagrccctgtggtccacgcgggagcggaagcaggtgagtggacgtggcagccaccacgtgccaagtcacagccagcagaactgactgttgggcagagactggcctaacaggaggcctccctggtcaggaagctgcacagccccccacggccacagggtcctgcacagctgctgccccagaccgcctccagggtggcctgtgtggggcagggggcggtcctcctcaagtccccagggtggtaaaggcactgcctggccccagcagcccctctgaggtcacctctgggaggcgcaggggccactcacctgcagggacacagctgtcgccagcactgccaggcctgaggccccgtcctgccaccgccagagcacccaggcccgggtggccactggggcaggtgtccaggacagggaggccttaggaaggggtgggacttgagcagggcaggaggctgggcgggagaggccaggggagaggctacagagggagggccggccccctgtgggggcagacgcggattccggctccttagtggcaatggcctgtgcacaggaagctgccaagtcctgagtgccgcgtcctctggcccgaggtcgctcctgcaggtccgggggacgccctccaaccccagcccagctcctctgagtgccacatccactggcctgaggtcacccctgcaggcccgggggatgccctctgaccccagccctggcgctgcctgctcctgtgtctgcctctctcctgcacccacctctgccagctttcgtttgtccatcagctcggtggcttcttgggcctccagcttgtgaatctctgtccttgcttttgagatttccctctgccgttccatttccaggctctcttgtcggaccttcgtctgtgacgctcagtcttcctcgctctttggcacctgcgtgtgtggtgtgagcctccccgggtcccgccctctgccccccgccccccacgtgtctgagttgtgggattccactgtcctttcctccctatgtcctgacattcgtcctggcgtctccttggagcagcgcttgtttatacacagacagggctgagatctgctccgggctccgctgacagccatgaggccgtcaggcatttcatcttcatggggtgggcctgtgtctgtgccctcacctcctccgcgcgccctcacctcctccacgcgccctcacctcctccgcatgctcccacctcctccccgcgccctcacctcctccccgcgccctcacctccaccgccgccctgacctccaccgccgccctgacctccaccgcgcgccctcacctcctccgcgcgccctcacctcctccccgcgccctcacctcctccccgcgtcctcacctcctccccgcgtcctcacctcctctgcgtgctcccacctcctccctgcgccctcacctcctcctcgtgctctcacctcctcctcgcgcctccatcacattcccggattccagcaagctggcgaatgccacatgcccagtggccctgggtgggccaggagccttgaagatggggtccttgggggtcctgggtgctgaggagaagcccaaccctagagccggctgcacatggaggtcttggggacccccatatggtggcacagacgccgggtgcccccagaggagggagatgaagaccaggattttggagaactccttggggcggtctgcagtataaagggggcaatgggactgttggccgtctgggagggcttaggtgttcctctaacgtgagagaggagccagcacaccgggcgggtgagagcagcctgggagacgggcaggaggaggaggcagggctggggcggggtgagggcctggagtaggcgcactcccagagtggggctcccctggttcattgggcccttcccagccccactgcccagcagcctgtggtggggtgttcctgcctttttttttttttttttttttttgagaaggagtcttgttctgtcacccaggctggagtgcagtggtgcaatctcggctcactgcaagctccgcctcccgggttcaagggattctcctgcctcagcctccggagtagctgggattacaggcgcgcgccaccacgcccgactaattttttttttgtatttttagtagagacggagtttcaccatgttggccaggctgttctcgaactcctgacctcaggtaatccgcccgcctcggcctcccaaagtgctgggattacaggtgtgagccaccgcacccaggcttttcgtgtgtgtnnnnnnnnnnnnnnnnnnnnnnnnnnnnnnnnnnnnnnnnnnnnnnnnnnnnnnnnnnnnnnnnnnnnnnnnnnnnnnnnnnnnnnnnnnnnnnnnnnnnnnnnnnnnnnnnnnnnnnnnnnnnnnnnnnnnnnnnnnnnnnnnnnnnnnnnnnnnnnnnnnnnnnnnnnnnnnnnnnnnnnnnnnnnnnnnnnnnnnnnnnnnnnnnnnnnnnnnnnnnnnnnnnnnnnnnnnnnnnnnnnnnnnnnnnnnnnnnnnnnnnnnnnnnnnnnnnnnnnnnnnnnnnnnnnnnnnnnnnnnnnnnnnnnnnnnnnnnnnnnnnnnnnnnnnnnnnnnnnnnnnnnnnnnnnnnnnnnnnnnnnnnnnnnnnnnnnnnnnnnnnnnnnnnnnnnnnnnnnnnnnnnnnnnnnnnnnnnnnnnnnnnnnnnnnnnnnnnnnnnnnnnnnnnnnnnnnnnnnnnnnnnnnnnnnnnnnnnnnnnnnnnnnnnnnnnnnnnnnnnnnnnnnnnnnnnnnnnnnnnnnnnnnnnnnnnnnnnnnnnnnnnnnnnnnnnnnnnnnnnnnnnnnnnnnnnnnnnnnnnnnnnnnnnnnnnnnnnnnnnnnnnnnnnnnnnnnnnnnnnnnnnnnnnnnnnnnnnnnnnnnnnnnnnnnnnnnnnnnnnnnnnnnnnnnnnnnnnnnnnnnnnnnnnnnnnnnnnnnnnnnnnnnnnnnnnnnnnnnnnnnnnnnnnnnnnnnnnnnnnnnnnnnnnnnnnnnnnnnnnnnnnnnnnnnnnnnnnnnnnnnnnnnnnnnnnnnnnnnnnnnnnnnnnnnnnnnnnnnnnnnnnnnnnnnnnnnnnnnnnnnnnnnnnnnnnnnnnnnnnnnnnnnnnnnnnnnnnnnnnnnnnnnnnnnnnnnnnnnnnnnnnnnnnnnnnnnnnnnnnnnnnnnnnnnnnnnnnnnnnnnnnnnnnnnnnnnnnnnnnnnnnnnnnnnnnnnnnnnnnnnnnnnnnnnnnnnnnnnnnnnnnnnnnnnnnnnnnnnnnnnnnnnnnnnnnnnnnnnnnnnnnnnnnnnnnnnnnnnnnnnnnnnnnnnnnnnnnnnnnnnnnnnnnnnnnnnnnnnnnnnnnnnnnnnnnnnnnnnnnnnnnnnnnnnnnnnnnnnnnnnnnnnnnnnnnnnnnnnnnnnnnnnnnnnnnnnnnnnnnnnnnnnnnnnnnnnnnnngccaggcactgaagtctcccggaacaacgggctgggaccctgaggctggcaggggtgcagtgggcactgggtccatgtgtggcttgcgctggccgacgtgggcacacaaggggcacagctgccactgggggcctggaggggaggacccagctggggtctggagggccaggattttgcagaaggtttacgggactgaagcaggagtgagggaaggcgggctgtggttagaacgggtgctgcagaactccgggggtgacagaaaccagcctgggcgagagcgcaccccaaatcagagccacggagcgtcggcttcatcgaatgctttattggggtaagatgcacgacatataaaaccagccgtttcacaatgagtgactcaatggcctggagcgcccagtcgtgcttcgtgaatctttctacatcttcacaacctgtgcacctcttctggtttcagaatggttcatcgcttcagaagcaaaccccgtacccctcacacagacgccccattcccctcggccccaggcawcggtcaccgtcacccgcaaaccccgtacccctcacacagacgccccattcccctcggccccaggcaacggtcaccgtcacccacaaaccccgtacccctcacacagacgccccattcccctcggccccaggcaacggtcaccgtcacccgcaaaccccgtacccctcacacagacgcccccattcccctcggccccaggcawcggtcaccgtcacccacaaaccccgtacccctcacacagacgccccattcccctcggccccaggccccagtcaccgtcacccacaaaccctgtacccctcacacagacgccccattcccctcggccccaggccccagtcgccgtcacccgcaaactccgtgcccatcacacagacgcccctattcccctcggccccaggccccagtcgccgtcacccacaaaccccgtacccctcacacagacgccccattcccctcggccccaggcaatggtcaccgtcacccacaaaccccgtacccctcacacagatgccccattcccctcggccccaggcaacggtcaccgtcacccacaaaccccgtacccctcacacagacgcccccattcccctcggccccaggcaatggtcaccgtcacccacgaaccccgtacccctcacacagacgcccccattcccctcggccccaggcaatggtcaccgtcacccacgaaccccgtacccctcacacagacgccccattcccctcggccccaggcaatggtcaccgtcacccacaaaccccgtacccctcacacagacgcccccattcccctcggccccaggcaacggtcaccgtcacccacaaaccctgtacccctcacacagatgccccattcccctcggccacaggcaatggtcaccgtcacccacaaaccccgtacccctcacacagacgccccattcccctcggccccaggcaacggtcaccgtcacccacgaaccttgtacccctcacacagatgccccattcccctcggccccaggcaatggtcaccgtcacccacaaaccccgtacccctcacacagatgccccattcccctcggccccaggcaacggtcaccgtcacccacaaaccctgtacccctcacacagacgccccattccccttgtcacacaggccctagccactgctcacccgctttctgcctctggatttgccacttctggacagttcacacacatgcggtcacataacatggggtcttttgtgacttgcttcttcatttagcacgatatcaaggcttgtctatgtggatgtctgtgtcagcttcctccttttccgtggctgagtaatacgtggccaggccacatgctgtttcttcatagacagctgagggtcatctgcgccatctccacctctggccgttgtaaataagtacttctctgaaaattcatctacaaacatctgcgtgagcccctgtttttaaatctttggggaggacgggtgtggtggctcacggctgtaatcccagcactttaggaggctgaggtgataggatcacctgaggtcaggacttcaagaccagcctggccaacaatggcgaaaccccatctaaaccaaaaaatacaacaattagccgagcgtggtggcatgcacctgtagtccctgctatttgcgaggctgaggcaggagaatcacttaaaccccagaggcggaggttgcagtgagccaagatcatgccactgcactccagcctggacgacagagtgagactccatctcaaataataaataaataaaaataaataaacaaataaatctttgggaaactgcctggaatagaattgctgggtcatgtggtaatcatgtttatctttttgaggaactgtcaaactactacttttattaaaaatttcagccaagtgcagtggctcatgcctgtaatcccagcactttgggaggccaaggtaggcgaatcacgaggtcaggagtttgagaccagtctggccaacatagcgaaaccctatctctactaaaaatataaaaacttggccaggcgtggtggcctgcacctgtaatcccagctacctgggaggctgaggcaggagaatcacttaaaccgaggaggcagagattgcagtgacccaagatcgcaccactgcactccagcctgggcgacagagcaagactctgtcccaggaaaaaaaaaaaaaaaaaaaattcaacgannnnnnnnnnnnnnnnnnnnnnnnnnnnnnnnnnnnnnnnnnnnnnnnnnnnnnnnnnnnnnnnnnnnnnnnnnnnnnnnnnnnnnnnnnnnnnnnnnnnnnnnnnnnnnnnnnnnnnnnnnnnnnnnnnnnnnnnnnnnnnnnnnnnnnnnnnnnnnnnnnnnnnnnnnnnnnnnnnnnnnnnnnnnnnnnnnnnnnnnnnnnnnnnnnnnnnnnnnnnnnnnnnnnnnnnnnnnnnnnnnnnnnnnnnnnnnnnnnnnnnnnnnnnnnnnnnnnnnnnnnnnnnnnnnnnnnnnnnnnnnnnnnnnnnnnnnnnnnnnnnnnnnnnnnnnnnnnnnnnnnnnnnnnnnnnnnnnnnnnnnnnnnnnnnnnnnnnnnnnnnnnnnnnnnnnacaacctccgcctcccgggttcaaaggattctcctgcctcagcctcccaagtagctgggactacaggctccactatgctggctaattttttgtatttttggtagagacggagttccgctatgttgcacagacttgtcttgaactcctgagctcaagccatcggcctgcctcgtcttctcaaagtgctgggattccgggcgtggccactgcgcctggctgatgcgttgttcctgcatttgcccaccgactctctgtgtttggctgtaaccacgttgcacgctcagtcagtcgcttgctgctcacagagtccaggtcagaggaatgaggtctggtagaaagaaagtgactttttattccgtagctggc

SEQ ID NO: 6768 - DNA, 193691 bp, Homo sapiens
  misc_feature (1)...(193691): n = A,T,C or G, or insertion/deletion polymorphism (see Tables 1-2)
caagtaatccctcttctccctcttttctgcccttaacatgcacatttattttccttttattattggattccctgaatggaaacatctgtccactattactgcagaaggctgggctgtcccatggtgactgtctggtgtccaggcttgagtaccctattttctgttttgttggttgtcctgtacagtgttgattaatttctgtgtctggggaagtctaggagtaggggatggggctgggtgatgctgacaacaccaagaaaagctcaggagatgtgtcaatgtgtttgcagagtctaaagagataccttccttccttctcttttgatttgacaatgccgccttaccaaaacttttcctgttcctcctgcagatttgtgggttttattttttatagagacagggtcccactgtgttgcccaggctggtctcaaactcctgggcttaattgatcctcctgcctcagcctcccaaagtgctaggattataggtgtaagccaccacactcagccacatttggggttttaaatttaattttatatttattttaattaattattttgagatagagtcttactctgttgcccaggctgtagtgcagtggcatgatcatggctcactgtagcctcaacgtcctgggctcaggtgatctttccacctcagcctcctgagtagctgggaccaccagcacttgctaccacacctagctaatttttttgtatgttttctgtagagatgggttttagccatgttcccagcctgttttagcttattaaaaaaaattttttttttttgagacggagttttgctcttgttgcccaggctggagtgcagtggcgtgatctcagcaattctctgcctcagcttctcgattagctgggattacaggtgcccgccaccacaccaggaaaatttttgtattttttatagagacagggtttcaccatcttggccaggctggtcttgaactcctgacctcatgatccacctgcctcagcctcccaaagtgctgggattacaggcgtgagccaccgcacctggcctaaaatttttttttttagagacagggtctcactacgttgcttaggctggtcttaaagttccaggctcaagtgattctctcaccacagcctcctgagtagctgggattacacgcatcagcccctgtgcctggctacatctgtggttctttttttttttttttttttttgagatggggcctccctatgttgcaatggcacgatctcagctcactgcaacatctgcctcccaagttcaagcgattctctcacctctgcctccccagtagctgggactacaggcttgcgccactatgcccagctaatttttgtattttttttttttttgagacagagtctcgcactgttgcctaggcagtggcgtgatctcggttcactgcaacctctgcctcccaggttcaagcgattttcccacctcagcctgccgagtagctgggattacaggcgcctgccaccatgcctggctaatttttttttgttttttgaggcggagtcttgctgtgttgcccaggctggagtgcagtggcgcaatcttggctcactgcaagctccgcctcccgggttcacgccattctcctgcctcagcctcccgagtagcactttgggaggccgaggtgggcagatcacctgaggtcaggagtttgagactaacctggcgaacatggcaaaaccccatctctactaaaaataaaaaaattagctgggtgcagtggctcgcgtctgtaatcccagcactttgggaggccaaagcaggcggatcacttaagctcaggagttcaagaccagcctgggcaacatggtgaaaccttgtctctactaaaaatgcaaaaatgagccaggcgtggtggtgtgtgcctgtagtcccagctacttgggaggatgaggcaggagaatcgcttgaacctgggaggcagaggttgcagtgagtcaagatcacaccccagcactctagcctggacaacatagcacgactcagtgtccaaaaaaaaaaaaaaaaaagaaatgtttgttttggccagatgcagtggctcacagctgtaatcccagcactttgggaggccaatgcaggaggaggatcacttgagcccaggagttagagaccagcctaggtaacatagcaagtctgtgtctctccaaaaaaatttaaaaatcagctgggtgtggctaggaacggtggctcaaccctgtaatcccagcactttgggaggccaagaaggacagatcatgaggtcaggagtttgagaccagtctggccaacatagtgaaaccccctctctactaaaaacacaaaaagttagccgggtgtggtggtgtgcgcctgtaatcccaactactccggaggctgaagcaggagaatcccgtgaacctgggaggtggaggttgcagtgagccgagatcgcaccattgcactccagcccgggagacagtgcgagacaccatctcaaaaaaaaaaaaaaaaaaaaaaatcagctgggtgtggtggtgaccccctgtcgtcccagctaccgggaggctgagaggctgaggtgggaagattgcttgagctgtcaaggctgcagcgagctgagatcctgccactgcactcctggctaggggatggtgcaagaccctgtctcaaagagttaaaaaaaaaaagaaagaaaaatttattttgatttttcattagagtataggctctgaagtttcatttgtgcatatgagttacgtatccttcatatataaatataagtgtatctatatttgccgtgtctaccagtcagactacaaaaggcatacatatggtggaatgatgatttgctatttcagtgaatgcatatattcctcactgtgaactagttattatttggggctgttagttgctgcaatgagacatcacacctctgaaaccatggggtgtcttaggagacttgttagagggcttgttataccatttggacttgtggctggtgattttggggagggtccaaggacaggggtgtgttttggattggtgctgtactaacaggggcaactcaaagattattattatttttttttttgagatggagtctcgctttttcacccaagctggagtgcagtggcgcgatctcggctcactgcaggctccgccccgcggggttcacgccattctcctgcctcagcctcccgagtagctgggactacaggcgcccgccacctcgcccggctaattttttgtatttttagtagagacggggtttcaccgtgttagccaggatgtctcgatttcctgacctcgtgatccgcccgcctcggcctcccaaagtgctgggattacaggcatgagccacgtgccggcctggtgtcgaactcttgactcaggtgatccacggctcggcctccaaagtggtaggattacagggtgagcaccgcgccctgcccaagagttgtcatttctgtagaaagcagctaagcaatttcttttgcctcccctaaatgtattaggtgcagcattataaaaaaaaaataaaaagcggggcgtgcttgtgcctgtaatcctaacacattgggagcgcaaggcgggttggatcannnnnnnnnnnnnnnnnnnnctccgccccgcggggttcacgccattctcctgcctcagcctcccgagtagctgggactacaggcgcccgccacctcgcccggctaattttttgtatttttagtagagacggggtttcaccgtgttagccaggatggtctcgatttcctgacctcgtgatccgcccgcctcggcctcccaaagtgctgggattacaggcatgagccaccgcgcccggccactcaaagattatttcaacaattttaggtggggcgcggtggctcatgcctgtaatcccagcactctgggaggccgaggcaggcgatcacttgaggtcaggagtttgagaccagcctggccaacctggtgaaaccccatctctactaaggtggcaggtgcctgtaatcccagctattcgagaggctgaggcaggagaattgcttgaacctgggaggcagaggttgcagtgagccgaaattgtgctacttcactccagcctgggcgacagagcaagactccttctcaaaaaaaaaaaaaaaaattttttttaaatccagaaagcaggaggaatagagaggagctaaagctgtcattggagaaaaagcagtaattactcatgctagctgaagaagggatgtttattcttctgtgtgtgtggttgcgcagtgccagtttttatttatgcaggcaagatcactgatcggaattattttctcctttcctcagtcacagaaagaactcgtctgatatcaattttctgtgaacctgtttatgttcatcaagtaatccaggccagctaccgtgggtctcagggctttttttttttttttttttttttttttgggacagagtctcgctcttgttgcccaggctggagtgcaatggcgagatctcggctcacagcaacctctgcctcccgggtgcaagctattctcctgcctcagcctcccgaataactgggatcacaggcatgtgccaccacacccagctaattttgaatttttagtagagttggagtttcaccatgtaggccagactgatcttaaactcctgatctcaggtgatccacccgccttggcctcccaatgtgttaggattacaggcgtaagccaccacgcccgggctttttattttttttcttaataatgctgcacctaatcacatttaggtggcaggcaaaagaatattgcttagctgctttgctacagaaatgacaactcttgggcaggggcgcggtggctcacgcctgtaatcctaccactttgggaggccgaggccagtggatcacctgaggtcaagagttcgacaccaggccgggcacggtggctcatgcctgtaatcccagcactttgggaggccgagacgggcggatcacgaggtcaggagatcaagaccaacctggctaacacggtgaaaccccgtctctactaaaaatacaaaaaattagccgggcgtggtggcgggsgcctgtagtcccagctactcgggaggctgaggcaagacaatggcgtgaccctgggaggcggagcttgcagtgagctgagatcgcgccactgcactccaccctgggtgacagagcgagactccgtctcaaaaaaaaaaaaaaaaagagttcgacaccagcctggccaaaatggtgaaaccccatctctactaaaaacaaaaaaaattaaccgggcgtggtggcggacgactgtaatcccagctactcgggagcctgaggtaggagaatcacttgaactcgggaggcggaggttgcagtgagccaagatcgcgccactgcactccagcctgggcaacaagagcgaaacttcgtctccaaaaaaaaaaaaaaaaaaaaggacaacttttgatccctgaggctgctaattccaactgtgtgcatgtgcttaacaaatacctccgcacccaggcctgggaagttggctgatttgtgtacagcaaatacggcaggcctgatgtagcagaactctgacgaaaacgaactggacgcgtatttctcctgcagcgaaggtcacgctgctgacagcctctgctttgcactttgtccctgggaaggaggcctgtggccagtcctacctcctggaaagccggggtgcgtcagaggacctgatgcggagcggggaccccatcctctccgtgtctccccaagagccggcggcagaggctgcctgcgctccttaagctaggtcagttctctggcccgcagttctcgttctcctaacatcctccgcagaaaacgaccttcattttttcctcttgcgccagtcttgaagcggggcgtcctttgggctcacgttgcggcgcccagcggcctcaagcgtcagctgcctccagggcctcaggagcagtggctagggcctgccctccagcgcccggggtcctcggcccagccctgctccgagcgcgtcacaatggcgtcgcggccccgcccccggacgcccagccgcggtcccagcgaccttcgctttcgtggggaagccggactgcgccgtgtcttcctgaagaaggctggggtaagagtccggccagcggacaagagggcagctggtagcagggtgggatgcccgtggcatagggccgagcccccgctaggcacgcgggagcagcarggcttccggaagcgcagggagcgctggactggcgggcgcccgggattcgcgcaggccccgcccctcggcggccccgcccagggagcgctgcggcagtttccatggtgagatggtcaacaagcctgtaagttcctcagctacgactaccaggtacctcgggttcctccctcctccgagagaccgccgaggtgcgggctgtgagagggggagcgtggagcctccgaggccgaggtgaggggcggccggcgggcaggggccgggtctgaggtcgagggccgcacacccaggatcgagcggggactgggcccgctgggggtggggaccgtggggctgggatttgggatcagggcgagtcgtggcagagagaacccggaggatctttgaccccagtgcgggagcggccagcccaccctagagaagcgagacaagggcaaccagaaggaaccgagtctgaggaagcgcttcctctgggcagggatattgggagagtcctggacgagtgaccctggacctaggaggcatgagaggtctacacacacttgcaaggataccttcatgattgttgagttgtggtgagaaaagaggctctttttagtttattttttaaggcagtacattcacatccttaagagtcagaaacttgcacaaggccttattactcaaaactcccttttcccagttccttctgaggaaatagttgcaaatctttgaacttttttcctccggaaattttctttttttctcttacatcggcagctcttcactgtgttcttccttcattagctttactaagtttgtattctttggttggaaatatttatttatttatttatttataaatagaaacaggggtatcactatgttgctcaggctggtcttgaactcctgggctcaagtgattctcctgctttagctttccaaagtgcggggattacaggctgaaccaccgcctgccaccgaaatatttcttcattgagttcctttgcctcctagtgttacttttctgctgtgtgtgtaatagccatttgttttttctttctcctttctggtcatatccttaaatacattttgcactaattccttttgaaacctcatcatggagagaacttgaatttagcagattaggggtgagtgcaggyttttgtcttaggttccatatatatatatattttgaggtggagtctccctctgtcgcccaggctggagtgcagtggcgtgattttggctcactgaaacctccacctcctggcttcaagcaattctcctgcctcagcctcccaagtgacgagggttacaggcacgtgccaccacacccggytaatttttgtatttttagtagagacagggttttgccttgttggccaggctggtctcgaattattgacctcaggtgatccacctgcctcagccccccaaagtgctgggattacaggcgtgagccactgcacccagcccccatatattaagaaatatacccttgtgtattgttggtaagaatgtaaaatggtacagcagctatggaaaacagtatggcagttccctcaaaaaattaacaaatagaattgccatatgatccagcagtaccacttctgggtctgaatccaagagaaatgaaagcggggactcagttacttgtacagtcatgttcatagcagcattatttgcaatagtcaaaagggagaggtaaccccagtgtccattgatagatggataaacaaaatgtgtcatatacaatagaatatcattcagccttaggaagaaaatcttggctggatgcagcggctcatgctggtaatcccagcactttgggaggccaaggtgggaggattgcttgagtccaggagttccagaccagcctgagcaacatagcgagatcctgtttccacaaaaaataaaataaaataaagaatacaaaaattagctgggcaggccgggcgcggtgtctcacgcctgtagtcccagcactttgggaggtcgaggtgggtggatcagagggtcaggagtttgagaccagcctggccaatatggtgaaaccttgtctctactaaaagtacaaaaawattagccgggcatggtggcacatgcctgtaatcccagctacttgagaggctgaggcagaagaattgcttgaatccgggaggccgaggttgcagtgagccgagatcacgccactgcactccagcctgggtgacagaacgagattccgtctcaaaaaaaaatcagctgggcattgtggcatgtgcctgtagtcctagctactctggaagctgaagtcggaggattacatgtgcctaggaggttgaggcttcagtgagccatgattgcactgctgtactccaccctgagtgacagagcaagactccatctcttcaaaaaataaaaataagatggccgggtgcggtggctaacgcctgtaatcccagcacttggggaggccgaggagggcagatcacctaaggtcaggagttcaagaccagcctggccaacatggtgaaaccctgtctctactaaaaatacaaaaattagctgggcatggtggtgggcgcctgtaatcccagctactcaggaagctgaggcagggagaattgcttgaacctgggaggtggaggttgcagtgagccgagatggcaccactacactctagcctgggtgacagagtgagactccatctcaaaaataaataaataagtgaaaataaaaaagaaaatgtcatatgctgcaacatggatgaatgttgacgatattatgttaagtgaagtaaaccagtaatggacaaatattgtatgatccccacttatatgagaatctgaagtagtcaaattcatgtaaacagaaaagtagaatggtggttgctagaggctgcggtaaggaggaatgggaagttgtttaatgggtacagagtttcagatttgcaagatgaaaatgttctagagatctgtttcacaacaatgtgaatctacttaagactgaactgtacactttaaaaaggttaattggtaagttttgttttatatatatatatgttttttttttttttttgaggcgaagtttcactcatgttgcccaggctggagtgcagtggagagatctcagctaactgcagcctctgcctgcccggctcaagcaattctcctgcctcagcctcccgagtagctaggattacaggtgcccgccaccatgcctggctaattttttatatttttagtagagacgggcttttggcatgttggccaggctgatctcaaactcctggcctcaggtaatacgcccgcctcggcctcccaaagtgctgggattacaggtgtgaaccactgtgccctgcctatatttttaatcaaaggagtttaaggacgggcacagtggctcacacctataatcccagcactttgggagtccgaagtggtaggatcacctgagatcagcagtttgagaccagcctgttcaacatggtaaaaccctatctgtaccaaaaaatacaaaaattagcccggcatggtaatgcttacctgtagtcccagctacttgggaggctgatgtgggagaatctcttgaatctgggaggcagaggcagcagtgagctgagattgcgccactgcactccagcctgggcaacagagtgagactctgtctcaaaaaaaaaaaagaaaaaaagaaacagaagactaccctcatatttgtggtcctttgtgtagttccgcctcatggctccctcctttgccctagggtaaccactgtcttcaactttatgcttgtcacttaacttgcttttctttataatttgactaaaattgtttgtatcccaaaaaaagacatattgagtagttttgcataaccttggactttttttttgttgtttgtttttgagagagtcactgtgttgcctaggctggagtgcagttgtgtgatcatagttcactgtagcctcgatcttcttggctccagaaatcctcccaccttagcctcccaagtagctaggaccacaggtaaatgctaccacacctggttaaatttttttttttttttttttttttttttttttttttttttgggggagacagggtctccctgtattgcccaagctggtcttgaactcgtgggcttaagcaatccttccacctcagcctctcaaagtgcaggtattacaggcatgagccaggctgctttcaaactcctaacctcaagtgatccacttggcttggcctcccaaagtgctgggagtatagacatgagccactgtaccagaccgctttgcctttttttttgagacggagtctcactccttcgcccaggctggagtgcagtggcacgatctcggctcactgcaacttccgcctcccgggttccagcaattctcctgtctcagcctcccgactagctgggactacagacacctgccaccgggcccggctaattttttgtatttttagtagagacggggtttcaccttgttggtcaggttggtctcgaactcctgacctcaggtgatccacccacctcggcctcctaaagttctgggattacaggcatgagccaccgcgcctggccaatttttgtagagacagggttttgccatgttgccccagctagtcagggtctcactctgtcacccaggcgggagttgcagtggtgcgatctcggctcactgcaacctctgcctcctgggttcaagtgattctcctgcctcagcctcctgagtaccttggattataggtgcatgccactgtgcttggctgatttttgtatttctagttgagacggggtttcaccatgttggccrggcatgtcttgaactcctgacctcaagtgatccacccgcgttggcctcccaaagttctgggattacaggcgtgagccaccatgcccagccttcccctgtctttacatataaattttagaataaggttgtttataaaatatcttgctgtggttggccatgtaggcttatgcctgtaatctgagtgctttgggaggtagaggcgggaaaatcaaagtcaggagttcaagaccagtctggccaatgtagctaaccctgtctgtacgaaaaaaaattttaaatttagctggatgtgatggcacatgcctgtactgtagtcctagctacttgggacactgcggtgtaaggtttgcttgagctcagacgtttgaggttatagtgagctatagtaacaccactaacactgtaccctagcctggtctacagagggagaccctgtctctaaaacaacaacaacaacaacaacaacaacaacaamaaaaaaacaaagaaaaaaactcttgctgtgaatttgataggaaaaatgttcaatttatayattgtttyggaattttggagagcactgacgtctttattctattgagtcttttaatccattaacatagtacgtctcttcatttgcttagattttcctgaatttatttatttatttatttatttatttttttgagacggagtttcactctgtcacccaggctggagtgcagtggcacgatctcggctcactgcaacctccaccctccgggttgaaatgattctccttcctcagcctcctgagtagctgggactacaggcgcctgccactgcgcctggctaattttttgtatttttagtagagatggggtttcaccatcttggccaggctggtcttgaactcctgacctcgtgatccacccgccttagcctcccaaaatgctgggattacaggcgtgagacaccgcgcccagccctggaattattttataagcattttgtagtattcagggtacaagttgtgttcagcgtacaagtctgatatgtgtttgttagatttatagctaagtgtgcttgcttcgacagcacatatactaaaattggaatgatacagagattagcaatttaaagtattttttaaatttatagcttagtaattttttcaattattacaaatggtattttatttttaatttaatttaggtgtccatgttttattgctaatatatagaaatacagttgattttttagttgagcttatgttctatgacctttctaaacttactcgttctagctttttttttttttttttttgagacagagttttgctcttgtcgctcaggctggagtgcaatggcatgatctctgctcactgcaacctctgcctcctggattcaagcaattctcctgcctcagcctcccgagtagctgggattacaggcacccgccaccacgcctggctaatttttataatttttaggagagacgaggtttcaccatgttagccaggctggtctcgaactcctgacctcaggtgatccacccaccttggccttccaaagtgctgggatgacaggcctgagctatcctgctgggcctagtttttgtttttgtttttttttttttgagatggagtcttgctctgtcacccaggctggagtgcaatggagcaatcacggctcactgaaacctccccctaccgggttcaagagattctcctgcctcagcctcccaagtagctgggattacaggcacatgccaccgcacccagctaatttttgtatttttagtagagatgaggtgtcaccatgttggccaggctggtctcgaactcctgacctcaggtaatccacctgcctcagcctcccaaagtgctgggattacaggagtgagccaccatgcccggcccgttttttttgttttaatcaattttttttgtagagatggrggtctcactatgtcacctagggtggtctcaaactcctagcctcaagcaattccccccaactcagcctcccaaagtgttgggagtacagacacgaaccactgcacctagtggaggagttgtctttttgtatattgcttgaattttttttttttttttgtagacacagtctctctctgtcacccaggctggagtgcaatggcgtgatcttggctcactgcaacctctgcctcccgggttcaagcgattcctctgcctcagcctcctgagtaactgggactgcaggtgtgcaccaccacacctggctaattttttgtatttttagtagagatggggttttcaccatgttagccaggatggtctccatctcctgacctcgtgatccgcctgcctcggcctcccaaagtgctgagattacaggcgtgagccaccgcgcccggctcctaaaagttttctaacaaagctccttctctccttgtcctttggctagaaagcgacagattttcttaggcttttaaaatctgtacccattgatgttttcagattgctggcttctgtaacatctagtctgggatatatgaggcaaaaagaatacccagtgaacccagcactgtgtcgttctttgagttccaagatcccgtgctggtctgctattttctacctttcagtccatatcatgtttatttatatataatttcagggtattgagctttacttaatgggaggagtatgaagcagtaccctgaactggaagtgttgctttcatttttgaaagacatttttgttgccgggcgtggtggctttcctttgtttaggtttcattgagcttcttggaattataggtttacaggttgttcgttttttgtttgtttgtttgtttttgagattaggtttcactctgtcacccaggctggagtggcatgatctcagctcactgcaacctctgcctccgggctcaggtcagcctctcatctcagcatcccaagtggctgggaccacaggcgcacaccactccaggctaatttttttatgtttttggtagagatggggtttcaccatgttgcccaagctggtcttgaactccagagctgaagtgatcctcctgcctcggcctcccaggcagtgctgggattacaggtgtgagccactgcagctggccttagatttatgggtttttattgtaagggtagaaagatttaggccatcatctctttgaatattttttatgccaacaaccccccatcctccttccagttatgtatatcttaggctgctttaaatcatgacacagctcagtgatgttcttttcattgttttggatttttttttcagaaatgaacttagttgcctttaagttcagtaatcttttcttctgtaatgtctaatctgctgttcatttcattcagtgtatttttcatctcaaacgtggttttcattttcagaatttttttttttttctttagagacgagatcttactaggttgtgcaggctggtcttgaattcctgggctcaagcaattttctcacctcagccttccaaagtgctgggattataggtgtgaatcaccacaactggcccactttcagaattttgactggatgtttttatatctttcctatactgtaattctcattgtaggtcatgttttcttgcctgtttgcatgcctggtatcttattggatgttaggcattgtgaattttactttttggatgcaggatatttttgtattcctgtgaatcttcttgagctttattctgggatatagttaagttacctgaaaacagtttgttctctttggtttttgtcttttcaggattattaggcaggtccagggcattgttcattctggggcaaattattccccactgctaaggctagatcttcctgagtactttacccaatgggccatgaattatgacattttctttttttttttttgatcctcaaaaattttattttattttgttttaatttttttttagtatttattgatcattcttgggtgtttctccgaggggggatttggcagggtcataggacaatagaggagagaagktcagcagataaacatgtgaacaaaggtctctggttttcctaggcagaggaccctgcggccttccgcagtgtttgtgtccctgggtacttgagattagggagtggtgatgactcttaatgagcatgctgccttcaagcatctgtttaacaaagcacatcttgcaccgcccttaatccatttaaccctgagttgacacagcacatgtttcagagagcatggggttgggagtaaggttatagattaacagcatcccaaggcagaagaatttttcttagtacagaacaaaatggagtctcctatgtctacttctttctacacagacacagtaacaatctgatctctctttctttgccccacgtttcccccttttctattcgacaaaaccgccgtcgtcatcatggcccgttctcaatgagctgttgggtacacctcccagacggggtggtggccgggcagaggggctcctcacttcccagacgtggcggccrggcagaggcgccacccacctcccagacggggtggctgctgggcgggggcgccccccacctcccagacggggtggccgggcggagactctcctcacttcccagacggtgcggctgccaggcggagaggctcctcacttctcagacggggcggccgggcagaggcactcctcagttcccagacagggtcgccgccgggcagaggcgctcctcacctcccagatggggtggtggccgggcagaggcrctcctcacctcccagacggggtggcggccgggtagagatgctcctcacctcccagacggggcggccgggcagaggcgctcctcacatcccagacagggcggccgggcaggggcgctccccacatcctagacgatgggcgcccgggcagagacgctcctctcttcctagacgggatgacggccgggaagaggcgctcctcacttcccagactgggctgccgggcagaggggctcctcacatcccagatgatgggcggccaggcagagacgctcctcacttsctagaccgggtggcggctgggaagaggctgcaatctcagcactttgggaggccaaggcaggcggctgggaggtggtggttgtagtgagcggagatcacgccactgcactccagcctgggcaacattgagcactgagtgagcgagactctgtctgcaatcccggcacctcaggaggccgaggcaggcagatgactcgaggtcaggagctggagaccagcctggccaacacggcgaaaccccgtctccaccaaaaaaaaaaccagtcaggcgtggcagcgtgcccctacaatcccaggcactcggcaggctgaggcaggagaatcaggcagggaggttgcagtgagccgaaatcgaggcagtacagtccagcagagggagacggtggaaagcgggagacggagatgagggagagggggagaccgtggaaagcgggagacggagacgacggagaggggagagggagaacaacattttttttttgagacagagtctcgctctgttgcccaggctggagtgcagtggcacgatcttagctcactgtaacctccacctcacggattcaagtgattctcctgccttagcctcctgagagctgggattacaggcatgtgccaccatgcccagctaatttctgtatttttagtaaagacggggtttcactatgttggccaggctggtcttgaactcctgacctcaagtgatctgcctgcctcgggctcccaaagtgctgggattacaggcgtgagccaccacgcacagcctgaattatgacatttctaatctgcctggtgtaggaacaggcactattccatgccctgtgtgagcactgggcactattccctctgatctttttagatggttcttttgacagatgtgggtaatgcccttatactcatgtactgatcaatacactgctgagctctcaagtgggaygctgcaggtctctggggttttctctccatgcagctctttcttctctggtgctgtgttctgtgaattctagctgcctgtgtctccccagactatcaaatctatcttttcaactcaaggaatctgccaggctctgccttagttatttttccttgtagcacattctacaaactactcaagtcagttagctggggcacttgtaggactcatctcatttgtttcctatctcttagggattactctctgttttctgatgttcagggtcttggaaaccatttttttttttttttttttttttgagacggagtctcactctgtygcccaggctggagtgcagtggtgcgatctcggcttactgcaagttccacctcccgggttcacgctattctcctgcctcagcctccggagtagctgggactataggtgcctgccatcatgcccggctaattttttgtattttttgtagagacggggtttcaccgtgttggccaggatggtctcgatctcctgacctcgtgatccacctgcctcagcctcccaaagtgctgggattacaggcgtgagccaccatgcctggccaattggaaaccatttttgtccttacrttttgtcaaaaaatgttttttttttccaatrtaacctggtccctgttactcaattcrtcttgcgctgaagtggagaattgaagatggggcatcaagcattcatttcatctcttattgaattctaataataaaagtacagttgacccttaaacaaaatgggtttgacctgtgtgggtcyatgtatatgtggatttttttcttttttaaggagatggggtcggctgggtgcggtggctcctgcctgtaatcccagcacattgggaggccgaggcaagtggatcacttgaggccaggagtttgagactgacctggccaagatggcgaaaccctgtctctaccaaaaatataaaaaattagctgggcgcggtggcacacacctgtagtcccagctatcggggaggctgagacaggagaatcgcttgaaccttggagatggaggttgcagtgagccaagatcttgccactgtactccagcctaggtgacagaggaagactcygtttcaaaaaaataaatatataaaaataaaaaaaatgagctgggcattgtggcagatgcccatagtcccagctactggagaggatgaagcaggaggatcacttgagcaggagatagaggctgtggtgagctctgattgcatcactgcactccaggctgggtgacagagtaagaacctgtctccgaaaaaaaaaaaaaaaaaaaaaggctgggtgcagtggctcaggcctgtaatcccagcactttgggagggtgagccaggcagattgcctgagctcaggagtttgagaccagcctgggggacatggtgaaaccctgtctctactgaaatacaaaaaattagcagggcatggcggcgtgggcctgtaatcccagctactttggaggctgaggcaggagaatcgcttgaacctgggaggcgaaggttgcagtgagccaagattgtgccactgcactccagcctcagcgacagagcgagactctgtctccaaaaaaaaaaatcaactgtatatctaatggtactgaaaagagagaaaccacaagacactggtatataytgacatacacaagtcacagagaatagaaatggactggatgttgaagcacagtgatgcatatattattattcaagtcaactcactatttaaagctaatttcataggaaaattctacttaattcagtctaacattatgtaagtaaccaaggaagagttaacagctgtgttacagaagtgaactataagcttgtgaattcagtatttaaaaaaaaattccttttcagtattttgtaatgcttcaacatgcattttgagcttatttctgtttatattgttgtaatgttcctcagcagttaacatgtattgaagcattttttttttttttttaatgagactgagtctcactctgtcgcccagtctggagtgcagtggcactatttcagctcactgtaacctccgcctcctgtgttcaagtgattttcctgcctcagcctcccaagtagctcraattacaggcacccaccaccactcctggctaatttttgtattattagtagagacggggtttccccatgttggccaggctggtctcgaactcctgacctcaggtgatccacctgccttggcccccaaagtgctgtgattacaggtgtgagccaccatgccaggcctgaatgtttacttttacttttaatgtaagttttaatttaaatactgatacttgattcagttattggaaaacttttttgttttgagacggagttttgctctttttgcccgggctggagtgcaatggcacgttcttggctcactgcaacctccgcctctcgggttcaagtgattctcctgcatcagcctcccgagtacctgggattattggcatgtgcyaccacacccggctaggctaattttgtatttttagtagatacagggtttctccatgttggtcagtttggtctcgaactcccaacctcaggtgatccatccgacttggcctcccaaaatgctgggattacaggtgtgagccaccaagcccggcctcttttttgctttgtttttttttgagacggagtctcactctgttgcccaggctggagtgcaatggtgagatatcggctcaccacaacctctgcatcctgggttcaagtgattctgctgcctcagcctcctgagtatctgggattacaggaatgtgctaccacacctggctaattttttgtattttgagtagagacggggtttcaccatgttggccaggagttcgactcctgacctcaggtgatctgcccgcctcggcctcccaaagtgctgggattataggcgtgagccaccatgcccagccggaaagcttttaagtgcccagaataatttgggtgtgtgaatgcctttttatccatagtaaatttaataaaatctaattatagatcaagtatttctgatgtaaatttagcatctaaatttaagtggctgtgaagtataaaataacagtagataccaatgacttagaagaaaaaaaagccttgacatctctatttcctcrtctctaaaggtgataacacttgcactatggtgatcctactagtaatacatttggagccacgttgtaaacttcagagtttgcaccattattattatttttttattattattattttttgagatggagtttcgctcttgttgcccaggctggagtgcaatggcgcgatcttggctcactgcaacctccatctcccaggttcaaggattctcctgccccagcctccctaatagctgggattacaggcatgtgccaccacgcccagctaattttgtatttttagtagagacggggtttttccatgttggtcagactgcttgtgaactcccgacctcaggtgataygcttgcctcggccttccaaagtgctgggattacaggcgtgaaccaccatggatggcctattattattattattagagatggagttttgctcttgttgcccagtctggagtgcaatggtgcgatctcagctcactgcaaactccacctcctggatccaagcgattctcctgcctcagcctcctgagtagctgggattacaggtgtgcgccaccaggcctggctaattttgtatttttagtagagacggggtttcaccatgttggtcaggctggtctcgaagtcctgatctcaggtgatccacccgccttggcctcccaaagtgctgggattatagacctgagccactgtgcctggccaaagtttgcaccattattattattattatttttcttttgagatggagttttgctcttgttgcccaggctggagtgcaatggcgtgatctcggctcactgcagcctccacctcccgggttcaagcagttctcctgcctcagcctcctgagtagctgggattacaggcatgggccaccacgcctggctaattttgtatttttagtagagacggggtttctccatgttggtcaggctagtctcgaactcccgacttcaggtgatcctcctacctcagcctcgcaaagtgctgggattacaggcgtgagccaccgcacctggccagtttgcaccattattatgggagcacttgcaaagcctgccagttgatggtagggtggaaaagaagaggacaactagaagagagttcctacaccgcaaagtaaactttgctggctctgcgaggagcaggaaacctgcatgatgagaacaaggactgggtggcactgcaggaaatgctcaattcgagtttcacttcctgtgttatcactttttctttgctgcaatttcatctttgttggtcaattctcttttaattttccatttttttacattctatgtaaatgtagtttttatgaactagagagtctgactccatrttttatctttgactactgtcagctctcaagccccacctcttccctccccttctgtcccacacctggatggctgattcaaaagcccaggtgcttcctcttttggctctaaaggcaagttcaagccatgcaggccccagcatgtgcattggagccttcatttccsccccactccttaaccttaataacacccaaagccagtctctcttccctgctctcaagccatttttttttcttctttttctggagacagggtcttgtgtcacccaggctggcgtgcagggccctgatcacagctgccagtagctggaaccacgggggtgtgccaccacgcctggctaattttttaattwttttttgtagagatgaggagtgccactgtgttgcccaggctggtctcaaaactcctgagctcaagtgatcctctcttggcttggcctcccaaaatgctggggttacaggcatgagccattgcacccagccttaagctatttttgaacccatttgggattcatccctgttctccccagaaagcctcatgtgagtcataagcctttacatattctctctgtgcatgtggggctgtcaccagttttgaaaaaccaggttttgggtggggaatctatctcgtatctttgggtaatatcacagataaatacagcagacattaacattttattcagtaaccactgacagtaggggaaagagctgagctccattctgatttgtgcagtgatgatcgggctttttttctttttttggtggttggatattttatacctttttttccccaaatactctccactgaatgtagtcgactggtgattttaaagggggaatgagggagtatggaggggtatgagttggggctcagtagagttggggatgtgaaaaattacaagggaccagtgtaaatgtgatgaggccagcggtgtctgcctgctggcaatggtcaaagttagattccatcctcccacagagactgggagacagaggccttatctttcccaatcactacatttcaaagcaatggctccttgagaaagcaatgttccttgagaaagacacttcttagctgtaggagatacacacttgcatacacatacacaacatgtgtatcacataaacatctcaaagggacagaggacagattcataattgtaagtcctttttagtaaatgctcttaagagagggcggtcaggagcctatggtcagatattggcaagaatagtaagttatcctggcagcactgagatttctcaggcaggcattttaatggtggggacaggggtcatcctgggaacacaggctatgctactagaagccatgccaatttgtctctcagtgcagagtttcagatggagttatggggggagagttctgcagttctcagtaaccacaacagtatatatcactggaagatgaagcccacacaactacagatgttactgtttctgagtgagccgaataacaaacttacagtgagcagtcaccaacagacagaagtgatgtgattggttactgatcatgacatgcatttgttattaatgtgatgatgtgtagactgaagagctagcagcctgcactttatgcgaaaactcagttaatatactgtgtacctgaaatttgagttgtgtcgttgggggactggtgttattaaatcatggtgactgaaattcgtgcatatcagaactgtaccaagcaagggctgcctgatgagtataatgctctcatgttttatgggaatttatataaatttaaaataatatgaataaatatttgaaagttgtatgttatgcacaaggtttgaaataatgcaattcttttaatattttaaaaaattgttaggactcagattttcttttatcttttcttttttttaaggtacggagtctcgctctgtcgcccaggctgaagtgtagagtgcagtggcatgatctcagctcattgcaacttccacctcctgggttgaagcaattcttctgcctcagcctccggagtagctgggaatacaggtgcaggctgccacgcccggctcatttttgtgttttagtagagatagggtttcaccatgttgcccaggctggtctcaactcctgagctcaggcaatcctcccgccttagcctcccaaagtggtaggattacaggcgtgagccactgcacctggccctcgactcacagattttcaaaatacttttgaacagtaagctgaggacagtgtttattatgactatactggtctcctttcactagctcacaaaatttaactacatcacttgtcagtctcctaaaaatgcagtgtatgtgctttgaaacttgtgaatgatctgctgatttgtgctattttatattcaatgttgttgaaagaatagtttttaaaccaagtaatgcaaaaatttagtgtaacatgaatgcttgtgctgtaaaacatactggaaaatcaatagctctggaataaactttggatttttaattaaaattgattttgatgtacttatgctgttaaattggtagagactagtctgaaaagctgagaaaagataaagcagaattaaaacaaaatctatcttattcgtagagccatgtcaagaatgcattctctctacacctattccaatgggcacattagtacttgattatgcagggagtgaatcatgccaagtcttcacgtacacattgctcctatcactgctgtgcagtgagccgtgactgcgccactacactccagcctgggcaacagagccagaccttgtctcaaaaaaaaaaaaaaaaaaaaagtcctttaagggatacgaggctgtgtgtgatagtcgttttcttttagtttgcacttttttttttttttttggagacagtctcgctctgttgccccgtccggagtgcagtgggtccatctcggctcactgcaagctccgcctcccgggttcaaggccttctcctgcctcagcctcccgagtagctggaactataggcgcccgccaccacgcccggccaattttttttgtattttttagtagagacggggtttcaccgtgttagccaggatggtctcgatctcctgacctcctgatccgcccgcctcggcctcccaaagtgctgggtttacaggcgtgagccacggcgcacggcctagtttgcacttttattcacccccaaattctgtgtattgcaagtaagtctcaaattttgagaagcgagcaccatcccattggcatcgtgactaccaaccaccacatcactcagctgctttgctttccgggagaatccctgcgccgtgggttcgctcgcctttccatgcctgccgtgcaggcgtcctttgcggtcttttgtccacgtccgggtcaacgcctgacgcgccccttcccggctggacgacgcagctcagggcggggcgaggcgaggttgtgtcgcggaacctgacgggaaacggcccctctaggtccgtggcgcggcgcgcttgtggcagcgacgggcactgccgcgcatgcgcggcccatttccgagagtggcagggctgggcgcggtggggtcgcctctggggtcaaagagcacgccgagcccgccggagggcggggccgcggccttggccctttggcgcgtaggagacagcgcgccaggctggcagccggccttagcggcgtttgctgctcttgtgcggacgccactgcgcgccctagtggggactacggggacgcttcgcgctccaggaaggaggcgggcaccgcccgctctagcacagtccgggagctggacctcggggytcaccgctctgcttgcccactaaaagcccattcggcggaagtccagcgttgcatggttacagtactgagccccagacatcgttgccaagtataatgcaggctctgttttatcctggggcacttgtagtcagggttcgtgggcccgcacttcataatggagggctgcgggcctcgtctgaaccgtccagccagtgtgtcctcagtcgtcttggttgggtttttgaagaaccaacccgagattctggggcacagggagttacaagacttggggccctgatgtaagccccaaataaaatgattttggcccctagggccagatccgagtttctaaaaacagagcagcacttgtaaggtagaggaagcgtggcccacctgaatggggacttctcaccagagtttcacagcagcggaagacgaggctgaggaagagcacggcccatatttgcacggagaggcaatatgtaatgcctgtgctccacaagccaccccagctgactcaacaggagttttgctccagctgtcagagaggtgagctgggcctaaggctagggttaggcttgcccaggaaatgtctctccattttcagggttgagagaacctggttgggagggaaagaaatattactatctctaagaaaattatttttctttttcttttgagatggagtgtcgctctgtcgcccaggctggcgtgcagtggtgggatctcggctcactgtagcctctgcctcccgggttcaagcgattctcctgcctcagcctccagagtagctgagattacaggtgcgcgacaccatgcccggttaatttttgtatttttagtgaagatagattttcaccatgttggccaggctggtcttgaactcctgacctcaggtgatccgcgcgcctctgcctcccaaagtgttgggattacaggcgtgagccactgctcctggccaagaaaattatgtcttaaacaccccaacggcctttgaatttttctgaattatttactcattccagataccgagagcttcccatactatgccaattaccgcaggtggccttgagagatgtgggtgcttccaccatgcttactcagaaagtagttcaggaaacagtttcctggattaccaatttctgcctgacatgaaagatgaaaaccactgaactccagaggggtgaatgtccaggtcatcccattcattagctactccagaggctgaggcaggagaatcccttgagcccggaaggcggaggttgtagtgagccgagatagagccactgcactccagcctgggtgacagcgtgagactccatctccagaaaacaaaacaaaacaacaaaacaaaaaccctagcgcggtggctaacgcctgtaatcccgtcactttgggaggccgaggggggaggatcacaaggtcaggagttcgagaccagcctggccaacatagtgaaaccccgtctctactaaaaataaaaagatagctgggcatggtggcgcatgcctgtaatcccagctactccagaggctgaggcaggagaatcgcctaaaccctggaggtggaggttgcagtgagccgagattgcatcactgcactccagcctgggcgacaaagcaagactctgtcttggggaaaaaaaaaaaaaaaaaagaaaaagaaaagaattcctcatgagatcgcttgaacgcgcgagttggaggttgcagtgagccgagatcacaccactgcactccagcctgggcaacagagggagactccgcctcaattaaaaaaaaaaaaaaattcctcatgagacattaagagttacagctctttgccgggcagggtggctcatgcctgtaatcccagcactttgggaggccgaggcgggcggatcacgaggtcaggagatcgagaccatcttggctaacatggtgaaaccccgtctctactaaaaatacaaaaaattagctgggtgtggtggcgggcgcctgtagtcccagctactcgggaggctgaggcaggcgactggcctgaacccgggaggcggagcttgcagtgagctgagatcaggccactgcactccagcctgggtaacagagcgagactccgtctcaataaaaaaacaacaacaacaaaaacaaaacaaaacaaaaaaaaaagagttacagctcttttagaatttgtctggcaggctttccagtttttgccagtgtgaacccaaaatatctgagataggcctcagttaatttagaaagtttattttgccaaagttgaggacacgcgcccatgacagcctcaggaggtgctgatgacatgcgccaatgtgggcagagcacactttggtttcgtacattttagggagacatgagacatcaatatatgtaagatgaacattggttcagtccggaaaggcaggacaactggaatcaaaggtgggacaacttgaagggcaggtggcttccggggtcttaggtacagaagagacaaatagttgcattcttttgagttgctaattagcctcttcaaaggaggcaatcagctttgcatttatcttagtgagcagaggggtaactttaaatagagtgagatgcaggtttgcccttagcagttcccagcttgacttttctctttagcttagtgattttggtgccccaagatttattttcctttcaccctggaaagccccttaaaaacaaaaaacaaaaaacaaaaaacagttcttggcattgaagtctaaaaaacattgtttttccggtcttcctgtagatgacttagtagagagtcttcagtctttcagtgagtaccagaaatcagtgcagtctgctgcttgtaattgagtacttcgtgtgggtsgagtactcagtcagtacatttctagggatggaggcaccttggtcccatagacctctttctgatggtcctgcttgatccaggcatagaagctgggatagctgcatgaaagaatggattatgtcaccttcagatacactccttaaatgtatgtgtagattgtacaacagcaaggttaaagctgtattttctggcaagtatctccacatttccctttcttattttgaacaacatgacttgctggatctgcctggtaggggtatccaaatgtcatggatactttagtgcttgccttaattgagcattctgtccagttgatgctcatgtttaatctccctaaaatgtcttctcagttggtttctgatctagtccttcctctgtaattatttcttttctgtcttgtccgtgaagtcttcttcctcttcctgcctctcattattgctgttcccaaggtatccagtctttttctttctttctttctttctttttttaggtgtagtctcactttgtctcccaggctagagtgcagtggcatggtcttggctcacttcatcctccgcctcccaggttcaagtgatcctcctgcctcagcctcccaagtagccgggactacaggtgtatgctaccacacctggctagtttttgtacttttagtagagacagggttttgccatgttggccaggctggtctcgaactcctgacctcaggtgatccacccaccttggactccccaaatgctgggattacaggcgtgagccactgcacctggcccttggtttgctgagactttttatcatccagtgggtattgaacttttaaaaaaaaatttttaagtcaggtctcactctgtcacgcagtctggagtgcagtgttgcgatcacagctcactgcaggtaactctgacttcagtctcccaggtagctggaactgcaggtgcacagcacaatgcctggctaatttgtttattttttgtacagacagggttttgccgtgttgctcaggctgtgagtttattattattattattattattattattattattattattattattattttctgagatggagtctcgctctgtcgtccaggctggagtgcagtggctcaatctcagctcactgcaagctctgtctcctgggttcacgccattctcctgcctcagcctcccgagtagctgggactacaggcgcctgccaccacgcccagctaattttttgtatttttagttagagacagggtttcaccgtgtcagccaggatggtctcgatctcctgacctcatgatctgcccgccttggcctcccaaagtactgggattataggcatgagccaccgtgcccggccgttgaattattattatttttttagctaatagaccagaagaatgaatttaattattattgagatgattatattgttttattctttttcagtggattgattgatattaacctatggattgagttaattttattaatgttttgattttcaaatgttaaatcagcctattttccaggaacaaagtcatattgttgctttatccttttaaaatatattccatgacaaattgttagatatttttgtgtctttgttcctgaaagagtctgttgttttctttctttcttttttttttttttttttttgagaccaagttgtcgcccaggctggagtgcagtggcatgatctcagttcatggcaacctctgcctcccgggttcaagcgattctcatacctcagcctcctgagtagctgagattacaggtgtctgccaccatgcccagctaattttttgtatttttagtagatatggggtttcaccatcttgaccaggctggtcttgaactcctgacctcagatgccacccgcctcagcctcccaaagtgttgagactacaggtatgagccaccatgcctggctgttattttcctttcttaaaagtctttttttttttttgagaaagagtctcactctaatgcctagtctggagtgtagtggccctatctcagcttactgcaacctttgcctcccgagttcaagcgattcttgtgcctctgcctcccaagtatctgggattacaggcaggcaccaccaggactggctaatttttgtatttttagagagacagggtttcaccatattggcctggctggtcttgaactcctggcctcaagtgatctaacaccaccttggtctcccaaagtgctgggataacaggcgtgagctatcacacccggcctcttctaatatcttaattttttttttttttgagacagagtttcgctctcatcgcccaggctggagtgcaatggcgtgatctcggctcactgcaacctccacctccccagttcaagcgattcccctgccttagcctcctgagtagctaggattataggcgttagccaccacacccggctaatttttgtatttatagtagagatggggtttcatcatgtttgtcaggctggtctcaaacttctgacctcaggtgatctgcctgccttggcctcccaaagtgttgggattacaggcgtgagccaacatgcccggcccagtcttttgttttttttttgagacaaggtcttgctctgtcacccaggctggagcgcagtggtgtgatgatcataactcacctctcccttgaactcctgggctcaagcaatcttctgatctcagcctcctgagtagctgggactacaggcatgtaccataatgcctggttacttttttgtattttttttagagatggtgttttgctatgttgcccaggctggtcttgaactcctgggctcaagtgatcctcctgtcttggcctcccaaaacatcgggattacaggtatgagccactgcccccggcctttgttaggtttatatcaattttatgcctgtttcagaaaacatgtttagtgttttctctttattctccatgagtgcttgtgtaagattggtgctatttattccttaattgcttgtaaaattacagcagtgaatttttctagggtctggcttttctttatgaataattttaaaattatagatttaatttctttatattagggaaattatcctttagaacttgatacaagtcctagttgtttgtttctaccttgtcatttgtcatccccaggtgggtggcaggtgtgtttgttccagggcaaagctatgtctcacacacactagttcacataaccccattcagaccaaaaattgttcacagtttactttgctttttgtctctttatctccaaggttggtctgtagtgaactcaaagccttaattctatcccagtccttttagttaaggtcagcagtgacctctagtggtgaaatcttcagtcttcctcttaacatgactttcttttttaaaaattatctagtgaattactctttctgtttgtttgtttttgagatggagtcttgctctgttgcccaggctggagtgcagtggcacgaccccagattactgcaacctctgcctcccgaagtgctgggattgtagggttgaactactatgcctgaaccctcttacgtggctttctagccacgtaatcattgattacaggcacacctcgttttattgtcccttgctttaatgtactttgcagatattgtgcttttttttcttttttcttttttctttttttaacaattaaaagtttgtggaaacccggcattgagcaaatctgtagacaacattttttttttttttttttgagacagagtctccctctgtcaccaggctggagtgcagtggcgtgatctcagctcactgcaaccttggcctcctgggttcaagcgactcttctgcctcagcctcctgagtagctgggactacaggtgtgcaccaccatacccagctaatttttgtatttttagtagaggtggggtttcaccatgttggccaggatggtcacgatctcttgacctcgtgatccacctgcctcagcttcttgaagtgctgggattacaggcatgagccactgcatccggccttttttttttctttctttttttttttataaatagagataggggtctcatgttgtcacccaggctggagtgcagtggcatgatcttagctcattgtaaccttgaactcttcgactcaggggatcctcctgcctcagccccctgagtagctgggaccacagccatgcctggctatgcctggctaattaaaaaattttttttggccaggtgcggtggctcatgtctgtaatcccagcacttggggatgccaaggcgggtggatcaactgaggtcgggagtttgagaccagcctgaccaacatggagaaaccctgtctctactaaaaatacaaaattagctgggtgaggtggtacatgcctgtaatcccagctgctcgggaggctgtggcaggagaattgcttgaacccaggaggcagaggttgcggtgagccgagttcacgccattgcaatccagcctgggcaacaagagcaaaactccatctcaaaaaaaaaaattttctttttgggccaggcggatggctcatgcctgtaatcccagcactttgggaagccgaggcaggtggatcacctgaggtcattagtttgagaccagcctggccaacatggcgaaaccctgtctctactaaaaatataaaaattagccaggcgtggtggtgcacacttgtagtcccagctactcgggaggctgaggcaggaaaattgcttgaacccgggaggctaaggttgcagtgagccgagatcatgccactgcattgcagtctgggtttcagagtgaaacactgtctcgaaaaaaaaaaaaaattttttttttttggtggaaayktggtctcactatgttgcccaggttggtcttgaactcctggcatcaagtgatcttcccatcccaccttggtcccccagagctctgggactgtaggcacgagccacctcacctagcctcacaactgtttttctttctttctttctttttttttttttttagcatgtgctcatgttgtgtctctgggtcacattttggtaattcttgccctatttcagacttttttttattatctattatggcaatctgtgatctgtgatttctgttattattattgtaattgttttgaccgtatataagatggttaaaattaacaaatgttgcctgtgttctgactgcttcactgactggctgttcccctttctctctccctttcctctggcctccctattccttgagacacaacaatattgaaattagggtaggtaactaccctgcagtggcctctcagtgttccagtgagaggaagagtcatacatctctcactttaaatcagaagctagaaatacttaagcttaatgaggaaggcatatatcaaaagccaagacaggcctaaattaggcctcttgtgccgaacagcccaaatgtaaatgcaaaggaaaactttttttttcttttttttttttttkttttgagacaacgtctcactgtgtcacccaggctggagtgcagtggcatgatcttggctcactgaaacctctgcctcctggttcaagtgattcttctgtctcagcctcctgggtagctgggattacaggtgtgtgccaccatgcycggctaattgtttgtatttttattttatttattattattatttttttttattgatcattcttgggtgtttctcgcagagggggatttggcagggtcataggacaatagtggagggaaggtcagcagataaacaagtgaacaaaggtctctggttttcctaggcagaggaccctgcggccttccgcagtgtttgtgtccctgggtacttgagattagggagtggtgatgactcttgatgagcatgctgccttcaagcatctgtttaacaaagcacatcttgcaccgcccttaatccatttaaccctgagttgacacagcacatgtttcagagagcacagggttgggggtaaggtcatagatcaacaggatcccaaggcagaattcttcttagtacagaacaaaatgaaaagtctgccatgtctacttctttctacacagacacagcaaccatccaatttctcaatcttttccccacctttcccccttttctattccacaaaaccgccatcgtcatcatggcccgttcttaatgagctgttgggtacacctcccagacggggtggtggccgggcagaggggctcctcacttcccagtaggggcggccgggcagaggcgcccctcacctcccggatggggcggctggctgggcgggggctgacccccccacctccctcccggacggggcggctggccgggcggggggctgaccccccccacctccctcccggggcggctggccgggcggggggctgacccccccacctccctcccggatggggcggctggccgggcggggggctgacccgcccacctccctcccggaaggggcggctggccgggcggggggctgacccccccacctccctcctggacggggcggctggctgggtggggggctgatcccctcacctccctcccggacggggcggctggcctggcgggggctgatccccacctccctcccggaccgggtggctgccgggcggagacgctcctcacttcccagacggggtggctgccgggcggaggggctcctcacttctcagacggggcggctgccgggcggaggggctcctcacttctcagatggggcagctgccgggcagagggtctcctcgcttctcagacggggcggccgggcagagacgctcctcacctcccagacggggtcgtggccgggcagaggcgctcctcacatccctgacggggcggcggggcagaggtgctccccacaactcagatgatgggcggccgggcagagacgctcctcacttcctagatgggatggcagccgggaagaggcgctcctcacttcctagatgggatggcgggcgggcagagacgctcctcactttccagactgggcagccaggcagaggggctcctcacatcccagacgatgggcggccaggcagagacgctcctcacttcccagatggggtggccgccgagcagaggctgcaatctcggcactttgggaggccaaggcaggcggctgggatgtggaggttgtagcgagccgagatcacgccactgcactccagcctgggcaccattgagcactgagtgaacgagactctgtctgcaatcccggcacctcgggaggccgaggctgggggatcactcgcagttaggagctggagaccagcccggccaacccagcgaaaccccgtctccaccaaaaaaatacgaaaaccagtcaggcgtggcggtgcgcgcctgcaatcacaggcactcggcaggctgaagcaggagaatcaggcagggaggttgcagtgagccgagatggcagcagtacagtccagcttcggctcggcatcagagggagaccgtggaaagagagggagagggagagggagctggagcttgtttgtatttttagtagagacagggtttcaccatgttggccaggctggtctccaactcctgatctcaggtgatctacccgtctcagcctcccaaagtactaggattacaggcatgagccactgtgcctggctggcatatttgtttatagcatggtttactgaatttttgttttcttttctttttttctttctttcttttttttttttttgagatggagtcttgctttgtcacccaggctggagtacagtggtgtgatctcagctcactgcaacctccgcctcctgggttcaattgattctcctgcctcagcctcctgagtagctgggattacaggtgcgcaccaccacacccagctaatttttgtattattagtagagacggggtttcaccatgtttgtcaggctggtctccaactcctgaccttgtgatccacccgcctcggcatcccatagtgctgggattacaggcgtgagccaccatgcccagctggtttactgattattttaaacaaattattgagtcctaatgttcagaaaaaatatttctttcaaaatgttactgctcattgacaagctagtcacataagagctatgaggtatgaaattaatgttgttttcatgcttactagcatgcatccattctacagcccatggatcaaggagtaattttttttttgagacagtttagctcttgttgtccaggctggattgcaatggcgtgatcttggctcactgcaacctccacctcctaggtttggcgattctcctgccgcagcctcctcagtagctgagattacaggtgcctgctgccacacccagctaattgttttgtattttttttttagtagagatggggtttcatcatgttgaccaggctggtcttgaactcttgtcctcaagtgatctgcctgcctcagcctcccatagtgctaggattataagcatgagccgccgcacccggccaaggagtaattttgactttcaagttttattttttatttttctttttttgagacggagtcttgctgtgtcgcccaggctggagtgcagtggcacaatcttggctcactgcaacctctgcctcgcgggttcaagtgattcttctgcctcagcctcccgactagctgggactacaggtgcacgccaccacgcctggctaatttttgtatttttagtagagacagggtttcaccatattggccaggctggtctcaaactcctgacctcgtgatctgcctgcctcggccttccaaagtgctgttattgcaggtgtgagccactgcgcccgaccttcaacttttattgtttaagaaataaatttgtagccaggcgttgtgactcatgcctgtaatcccagcactttgggaggccgaggctggtggatcacctcaggtcaggagtttgataccagcctggcaaacatggtgaaaccttgtctctactaaaaatacaaaaattagctgggtgtggtggtgcatacctgtaatcccagctactcgggaggctggggcaagagaatcgcttgaacctgggaggcagaggttgcagtgagccgagattgtgccactgcactccagcgtgggcaacagaatgagactctatctcagaaaaaaaaaaaaaagaaaagaaaaatttgtaaggctatagctggcatggatagtgatccctctgatggatctgggcaaagtaaattgaaaaccttctggaatggattcactgctcaagatgccactaagaccatttacgattcatgggaataggtccaattaacaacattaataggaatttggaagaacttgaatccaacccttatggatgactttgaggggttcaagtcttcagtggaggaagtcactgcagatgtggaaatagcataactagaattagaagtggagcctgcagatgtgagtgaattgctgcaatcttatgttagaacttgaacagatgaggagttgcttcttatgcgtgagataagaaaattgtttcttgtgatgtaatctattcctggtgaagatgctgtgaacattgttaagatgacaacaaaggatttagacttacataaacttagttaataaggcagcagcagggttttagaggattgaatccaattttgaaagaagttctactataggtaaaattaaacagcatctcatgctacagagaaatctttcgtgaaaggaagagccggccgggtgcagtggctcattcctgtaaccccagcacttttggaggctgaggcaggtggatcacctgaggtcgggagtttgagaccagcctgaccaacatggagaaaccccgtctctactaaaaatacaaaattagccggccatggtggcacatgcctgtgatgccaactactcgggaggttgaggcaggataattgcttgaacctgggaggcagaggttgtggcgagctgcgatcgcgccattgcactccagcctgggcaccaagagtgaaactctgtctcaaaaaaaaaaaaaaaaaaaaaaaaaaggccgggtgcagtggctcacgcctgtaatcccagcaccactttgggaggccgaggcaggcggatcacgaggtcaggagatcgagaccatcttggctaacgcggtgaaaccccgtctctactaaaaatacaaaaaattagctgggtgtagtggtgggcgcctgtagtcccagctactcgggaggctgaggcaggagaatggtgtgaacccaggaggcagcgcttgcagtgagccaagattgtgccactgcattccagcctgggctacagagtgagactctatctcaaaaaaaaaaaaaaaaaaaaaaaaagaaaaagaaaggaagagtcaatcagtgtggcagacttaattgtccttttattttaagaaattgcacagccatcccagccttcagcaaaccaccactagcagtcatcaacattgaggcaagaccatctaccagcaaaaagattatgattcactataggctcagatgattgttagcatttcttttattttactttattttttgagacatagtctggctctttcacccaggctggagtgcagtggtgcgaccttggctcactgtgacctctgcctcccgggttcaagcgattctcctgcctcagcctcctgagcacctgggactacaggcgtgcaccacacccggctaatttttgtatttttatagagacgggctttcagcatgtcgaccaggctggtctcgaacccctgacctcaggtgatccaccagccttggcctcctaaagtgctgggattacaggcgtgagccaccgcgcctggccatcatttatttatttatttttttaaataaataagagacagggtcccttatgttgcccaggctgatcttgggctccttggttcaaatgatcctcccacttcaaccttccaaagtgctgggattacaggcatgaaccaatgtacttggcctgcatttttaggccatgaagtattttaaaattaggatatgtctgtacacggtggctcatgcactttgggaggccaaagtgggtggatcacttgaggccaagggtttgagaccagcccggccaacatggtgaaaccctgtctctaccaaaaaatagaaaaattaggtgggcgtggtggtgtactcctgtaatcctaggtactcaggagactgaggcatgagaatttcttgaacccaggaggcagaggttgcagtgagctgagatcacaccactgctctccaacctgggcaacagagcgagactctgtcttccaaaaaaaaaaaaattaggatatgtacattggtttactagacataatgctattgcacacttaatagactatagtatagtgaaaacataacttttacatgcatgggaaaccaacatactcgcatgactcaagtgacatttgctttattgcagtggtccggaactgaatgcacattatctttgaggtatgcctgtgtttttcccttctggttgactttcttcacttggcttacaggacaccacactcttttaactttcccttttaatttttttttggttgcgggaacagtgttttactctgttgcccaggctggagtgcagtggtgccatcacggctcactttagccttgagctccctgggcttcggtgatactcccaccttagcctcctgagtagctgggactacaggtgcatgccactatgcccagctaatttttctatttatttatttagagacagagtttcacttttgttgcccaggctggagtgcaatggcgtgatctcacctcaccgcaacctccacctcccaggttcaagcgattctcctgcctcagcctcccaagtacctgggattacaggcatgcgtcaccacacctggctaatttttttgtatttttagtagagatggggttctccatgttggtcaggctggtcttgaactcccgacctcaggtgatccacctgcctcggccttccaaagtgctgggattacaggcgtgagccagcacacccgggcaatttttctatttattgtagagatgggatttgccatgttgcccaggctggtgtggaagtcctgggctcaagcaattttcctaccttgacctcccaaagtgttgggattacaggtgagagccactgcactttgccttaactttttccttttttttttgaacagagtctcactgtcacacagcctagagtacagtggcacgatcatagctcactgcagcctcgacatcctgggctcaggtgttcaagtgatcctcccacctcagcctcttgagtagttgggactacaggcatgcaccaccacactaatttttgtatttttttgtagagacggggtttcaccatgttgccgaccttaacttttaactttccttctctcatcgtttgctggttcctccttttcttcctgtctctgaatgtttatgtgtagtccttggtcattgtgatgcaggatttttcttggcccctttgttggactcgtgacagggctgtcccatttactcggcccattgcgctcaaccccttgcaggatggagcacgtgagtgagtgcgggatctggctggctgctccgggcactggcaggagcaagctccgtgtccagaatggccagccagatcccacacttgctcgcacacttggatggcggtgccaaggcgagggtgcccactaccccmaaaccctagagggagtgttacggtgctctgttagttttgctgtctgcagacagctgtgtgtttgcagctcagttggccccttgtctcgttgcatggggtggctgccctcctctggtgaggacaaagggccagcgtgacagtctttctaggtacccgcactcagtggatcctgagcttttgtctggtgtccaagaagaatgtcacatgggcaaactgaaggatggtgaagtcagagaattttattgagcaatgaaaatggctctcagcagagaggggaactggaaaggggacgggaagggcaggttgccttccctgaggtcaggttgccccttccctgaagtcaagccatctctctgaagtcaaattgtctctctctgaagtcaaactgtctccccctctactgactgagtctggggtctttctttatagcactcagaatggacagtgtgtgctcattggtttgtgagtatgcaaaaaatgttaaagtgaagacaccactcaatggtgggcataacagtgtagaaaaccaattaggaaagggtagctatatataaaataggtgaagagtggggattagaggaaagcatgccaaagaggaagataagtcctcagtctggtccaaggatttaacttgtatcttggctttcaggctttaaactgtctttggcttggaggtttcactggggacctgcccctatttaccttggcatttggctgcctccatttgttatcacttgtactttgtctggctgaggcctctcccttggcaatgttttgtcagcagtactctctggggcctgatccctcctggtaatctctccagctcagatttccttcttacactttggatgcatatgttaactgtccactctgcatctctgcttgagtattttatagacccaagctcaacatgattaaaactggcctcttggattttctctcccaaacccacaacctctggagcattccttccccttcttgtttgatagcagacccctwggaattatttttgaactgtttttttcttgtcttacacatcttatttgtcagaaaaacctctggggcatacatccagaatatatccacagagtctgacctcttgcaatcctctctatgacatcttttgcctggattacagcaaccgttgcagagcagtcttgctgctgctcagaccttggcctctggcatagcatttagagtacctgtgtaggaagagtcaggttgctaagcgccaatcctctgcccaacatctacatttttcactgagtaaaagccaaagttccaccagtgggttatgtgatccattacatctgtgacttcacttccttctcagcctcttgatcactatgctccagctcgacttgccttcttgctggatgtaccaggcataacaccacctttgtctttgtaccaaatgtgcccttttcctggagtatgtttcctagggagccttccaacttattctgttataatttataaaggatttataatttataagcatttataattatgtcaaccatatttaataagttgatcattggctgggtgggtgcagtggctcatgcctgtaatccaagcactttgggaggctgaggcgggaggatcacttgagcctgggaggtagaggttgcagtgagccatgtttgtgccactgcactccagtctgtgtgacaaagcgagactctgtctcaaaaaaaaaaaaaaaaaggttgatcatcctttgtatatggtgactttaccatatattaggacacttttttttttttttgagatagagtttccctcttgtgcccccagactggagtgcagtggcatgatctcggctcactgcaacctctgcctcccgggttcaagcaattcttctgcctcagcctcccgagtagccatgcctgtctaatttttttgtattattagtagatatggggtttcaccatgttggccagggaactcctgacctcaggtgatctgcccatttcggcctcccaaagtgctgagactagaggtgtgagccaccgcgcctggcgtaggacactatttaactctgttttgggactttttcttttcactggggtatttttctttttattagaggagttcataataaacagtaayatctagcaagataagcccatttataatttttgtttttgacataccttttttcccttttttcttttttttgagatggagtcttgctttgttgcccaggctggagtgcagtggcgcgatctcagctcactgcaagctccgcctcccgggttcacgccattctcctgcctcagcctcctgagtagctgggattacaggcccccttttttttttccccagacccaaacatcaacttaccttcgccaccttttataaaagcaacttaagtacaacagccaggctgggcaaggtggcttatgcctgtaatcacaacactttgggaggcttgaggtgggaggatcacttgagcccaggagtttgagaccaacctgggtaacatagtgagaccccatttctccaaaaatttaaaaatctgcccgatgcagtgacttattcctgtaattgcagtattttgggaggctgaggcaagcagattgctagagcccaggagttagagactaacctgggcaacatggtgaaaccttgtctctgtgaaaaggcaaaaaaattaactggggatggtggtatgcatctgtagtcctagctactcaggaggctgaggtaagaagattgcttgagcccaggaggtcaaagctgcagtgagctgtgtttgtgccactgcattccagcctgggtgacagaacaagaccgtgtttcaaaaaaaaaaaaagcaggggctgggtgcggtgtggctcaagcctgtaatcctagcactttgggaggctgaggtgggccgaggtcaggagtttgagatgagcctgaccaacatgatgaaaccctgtctctactaaaaatacaaaaatgagccaggcgtggtggtgcgcccctgtaaccccagctactcaggaggctgaagcaggagaattgcttgaacctgggaggtggaggttgcggtgagctgagatcgtgccattgcactacagcctgggtgacatgcctggagccccatgtacttgggaggctgaggcaggagtattgcttgaacccaggaatttgaggctgtagtgtgcaatgatcatgcctgtgaatgtactccagcatgggcaaaacagcaagacctggcctctaaaaggaaaaatgatttattatttattttttgagacagagtctagctctgtcacccaggctggagtgaagtggcgtgatcttggctcactgcaacctccacctcccaggttcaagtgattctcctgtctcagcctccccagtagccggaattacaggtgcgcaccaccaagcttgactaatttttgtatttttaatagagacagggtttcaccacattggccaggctggtcttgaacttctgacctcaagtgatctgcctgccttggccacccaaagtgctgggattataggcatgagccaccacactcagcctaggttttttttttaatcaattttttaaaaaatatcaattctactaaaagactgccacctcacagattgaataccaggccaccacacagtatcttaagaggccaggctcctcccccctgtacaaggcgcaaacttcccctgcctccacctcattctcccagtgtgcaggtgggtccccagtctgttgcaggcatgtgcagacaagaccctgggcagattcccttatctgcagaaaagcatctgatgtaaacacttgtggggttggttggagattctccggggaccctcccttatctgcctcctgcgtctatcactagcaggacctcgtataatttttgtatgaattaagaaagtaggccgggcctagtggttcacatctgtaatcccagcactttgggaggccagggcaggaggatcgcttgagcctggagttcaagaccagcctgggcaacatggtgagaccttgtctctacaaataaacaattagctgggtgtggtggtgcgtgcctgttgtcccagctacttgggaggctgaggtggcagaatcgcttgtgccccagtggtcaaggttgcagtgagttgtgatcatgccacagcactctagcctgagtgatagygcaagaccccgtctgaaaaaaaaaaaaaattaatataccggcagagtcctcataccaggatttctcattttcctacaatgtataatatcaatagtaggcatcctatgtagcattttctcttcaactatcaacagtgaacatgacaaggtgttagatctcacacatgttgtatgctctccacttctgatcmctgtagaatgaaaacaaatgtactgttctagggatcagtgtccttcagtgatgtggctgtgggcttcacccaggaggagtggcagcatctggactctgctcagaggacccsgtacagagacatgatgctggagaactacagcctcctcctctcagtgggtaaggattatgtaatttgcagcttcaaataacatttatttcctttttagctgctgattacagatggtttctttgtatgaatatgagttaaaggcttgagactcaggagttgaagcttgattgatcccttctgggcactgtaaagratatctgtggtgttttctgtaatgaaatgctsaagtggacctatttttgtgcaggcacacctttgtcctcygcaggctatctggcccacgtcctgtgtcattttcattcacaggatattgcattaccaaaccagaggkggtttgcaagttggagcatggacaggtgctgtggatattagaggaagagtccccaagtcagagccacctaggtgagttaataaatatataggaagctataatcccagggagaaatttgatcctagggagatacttcacatattgacatctttgaaatttttcagagatatrtttttagagttaccagaactttggaagtgactaagaagagttggcctgcttgcctcagatgtatatgttattacacactagcagataacagctaaatggtctttgtttttttccaaaacttaatccttgcctctctcagtttagtcaaatgaatgtcatttgactcttccttctatatcaatttcagttatcttcttttcatcatatattatgtatttattcaatatgtattaatttggcagctacgatgttggcatttccatctgtgttagagatatagctctaacaccatggctgtgttatgttggtagaagagaatgagatgtagtgtgtgctttatgcaagggcctttttgaagtcagtagtttaataaacacagatttgaattgtgtgtcagtggaatattctggccagatggtataccctgtgctgtgaaccttaggccacagtgtcacgtgtgcaggacagcagtgagccaggctgcgtggaagtcaaggggtgatggggagcatgtgagagatgctgtcagagagactgctcgctgaggtgccgatatattcggaagttgtagccaaaacagaatttgctgctaaattggattatgggtataagaaaaagataataagcatgatctcaaaggttttatgctgaggcactggctgtgtgatgataccattaactggatgggagaaaatggggagaaacagttttgggaagaaataagagatagacacataaatttaaacaaatattctttgtataaaatagtaatgatgcccagttggatataaaacaataaaaataaaatactgaaaaatgacccaacatgtgaatcagttaccagttgatctgaattgtgttctaaaatcctttcttttttttttctttttctttctttatttctttttttttttgagacagtctctctcagtctcacaggctagagtgcagtggtgcaatcttggctcaatgcaacctctgcctcccagctcagagattctcatacctcagcctccctagtagttgggaccataggtgtgtatcaccacgcctgactaatttttgtatttttagtagagatggggttttgccatgttggccaagctggtctcaaactcctggcctcaagtgatctgccccccttggcctcccaaagtgctgggattacaggtgtgagccactgcgcctggcttctaaattcctttcattgttaagacgaaataatgttgcattaaatataaatggtaacatgtaatgagtaaatgctaaaagaaagtaatacttgtaacttctaaacttttaaaaagaagaaaatggaaaagaaaaaaattaaatgtgttggattagactgaaaaaaaaaaaaatgaggtcgggcttggtggctcaggcctgtaatcccagcactttgggaggccgaggcgggttggtcacctgaggtcaggagttcgagaccagcctgaccaatatggtgaaacgccgtctctactaaaagtacaaaaattagccgggtgtggtggcggatgcctgtaatcccagctattcaggaagctgaggcaggagaagcttgaactggggcagcagacgttggagtgagcagagatcgcactattgtacttcagcctgggtgacaagagcgagactccatctcgaaaagaaaaaaaaaaaatgaaaaagtggggaaaggcaggtaaaaattagaaaaactggaaactcttaagtgaaaaagagaaaaccaatccagatattttagaaatcataatacagttaaaggggctaaaccatcttattaaaagatggatattgtcaaattggattttcaaaaaccaagttatataggctcagtgcagtggctcactgctgtaatcccagcacttcgggagaccaacccaagaggattgcttgaggtcaagagtttgagaccagcccaggcagcacaatgaggacccatctgtacaaaaaataaaaaattaggccaggcgcggtggctcatgcctagaatcccagcactttggaaggccaaggcgtgtggatcacctgaggttgagagttcgagaccagcctgaccaacatggaaaaaccccttctctactaaaaatacaaaattagccgggcgtggtggcacatgcctgtaatcccgctactcgggaggctgaggcaggagaatcacttgaacccaggagggggaggttgtggtaagctgagattgcgccattgcactccagcttgggcaacgagagcgaaactctgtctcaaaaataaataaaaaaaaaattagccaggcatggtcatacaccagtagtctcagttttgggaggctgaagtgggaggatcgcttgagcccaggagtttgaagctgcagtgagctatgatcatgccactgcattccagtctggatgwcagagtaagagcctgtctgtaaaaacaaaacaaaaatcaagctatatggagtttgagaatcatatatgaaatgtgaacatgaaaccttagaatataaaaggaatataaatgatatatggtccaaataataaacaaaatagaatgttacctctcagtggacccaaatttagcttttgagtttatttttgatgcagttcttttttcttttttctttttttttttaatgagatggagtctcgctttgtcttccaggctggagtgcagtagccgatctcttttgatcctatctcaaaaaaattttttttctaacttagataaacaaagagaaaatttatatatatatatatttgtgtgtgtgtgtgaatatatgtatgtatgtatgtgtgtatatatatatacacacatatatacacatatatatgtgtgtatatatatawaaatttgtactgatgaggtcttgctgtgttgctcagactggtcttgaactcctgaccttaagcaattcttccacctctgcctcccagagtgctggtttagaggcttgatccactgtacctggcctacttttattttttaattgaatgaaactcattctgtttttgctgttatcatttgagtgaattggtcccatttataatctaagaagcatgatactattttagtgatctatttttcttaagtttgaaacattttggtatgttatttcttagcaattatttcaacattactcatcaattatgtccaactgtggtaaaataaactaaaatagaaaagaatgatggaattgcttgtaaggataatagaatagtaaagaacactgtcactattacatcatccttcaattttcttattgagctgcttgaagcattacttgtgacaaaaatataaaagaagcctggagaaaccttatttgtagtttctttcttttttttgttgtttttattttatttattcatttcattttgagatggagtctcactctgttgcccaggctggactggagtggtgtgatctcatctcactgcaacctccgcctctcgggttcaagtgactctactgcctcagccacccgagtagctgggactacaggcacccaccactgtgtcctggctattttttatttttttgtattgttactagagacggggtttgccgtgttggcaaggctggtttcaaactcctgacctcaggtgatcctcctgcctcggcctcccaaagtgctgggattacaggtgtgaaccactgcacctgactctctttctttctttctttctttctttctttctttctttctttctttctttctttctttctttctttctttctttcttttctttctttcttccttgcttccttccttccttccttctttcttttcttttcttttcttttctttcttttcttttttttgagatggagtcttgctctcttgcccaggctggagtgcagtggcacaatctaggctcactgcaagctccacctcccaggttcaagccattctcctgctgcagcctcctgagtagctgggattacaggtgcgcaccaccacacccagctcatttttgtattttgagtagagacagggtttcaccatgttggccaggctggtctcgagctcctgacctcgtgatccacccccatcagcctcccaaagtgctgggattacaagcgtgagccaccgcacctggccactttttattattatttttttattttttgaaatggagtcttactctgtcacccaggctggaatgcagtggcatgatctcggctcactgcaacctctgcctcacgggttcaagcgattctcctgcctcagcctcccgagtagctgggattacagatgcacaccaccacacctggctaatttttgtatttttagtagagatggggttttgccatgttggccaggctggtctggaacgcttgacttcaggtgatccaccttccttggccttccaaagtgctgggattacaggcgtgagccactgcgcccacctctctctctctctcttttttttttttaataattcaatgggcacagttgagagttcagagcttttattttcttccattaattgcaaagagtagaaaattgacaagaggaagactcttcacaattattaggcaaatcagaagatgaagcagaaccactgtagactctaataattacagtataattgatcrcataagtgaaatctcagactatgagttagatgatgatattctagatgaataaaggtatgcatatgatcctgttataaraacagcctgggccgggtgcagtgtctcatgcctgtaatctcagcactttgggagccgaggcaggtggatttcttgagcccaggaggtcaaggctgcagtgagctgtgatgctgccactgcattacagcctgggcaacaggagtttgacaccagcctgagtaacaaggcaaaaaactccatctctacaaaaaatacaaaaaattagccaggcatggtggtacatacttgtaatcccatttactcgagaagctgaggtgggagcatcacctgagcctgggaggttgaggctgcagtgagccatgatcacaccactgcacaatccakcctgggtgacagagccagacactgtgccaaaaaaaaaaagaaaaaaaaagcatgtgaatatgtctctttttcatgaaaaatatgttaacatttataatctgtgataacttattattatttctagactgctgcatagatgatgacctgatggagaagagacaggaaaatcaagaccagcatttgcagaaagttgattttgtcaacaataaaacactgactatggacagaaayggtgtattaggaaaaacattttctcttgacacaaaccccattctatcaagaaaaatacgtggcaactgtgactcatctggaatgaatttgaataatatttcagaattaattattagtaatagaagctcctttgtaaggaaccctgctgagtgtaatgtacgtgggaaatttctcctctgtatgaagcgtgagaatccttatgccagagggaaacctttggaatatgatggaaatgggaaagccgtctctcagaatgaggacttatttaggcatcagtatattcaaactcttaagcagtgttttgaatacaatcagtgtgggaaggcttttcatgaagaggcagyctgcagtacccataagagagtgtgctcatgggagaccctgtgaatataatgaacatgtgagagccttttccgatagaccaatatwcattgttcatcagagaactcacataaggaagagtcaccatgaattcaatgaatgtgagaggaggtctggtgagaggccacctgtaaataaacaccacagggttatggagatgaaatactatgagtgtaatgcgagtgagaatagttttggcaagaaatcactcctcattctacaaagttacagaggagagaaaacttgactgtagtagacatttggaagtattctgcaagaagccaaatttcactcaacatcaagaaacacatataggaaagaatgcctataaaattaatcagtatgctagtacattttgctgtaagccaaagcattctgtatatcagaaaacagatacagaagaaaaactctatgaatgtagtgaatgtgggaaaaccttcagccataaatcctcttttatcctacagcagaggatacacagaggagagaaaccctatgaatgcactgaatgtgggaaaacttttggatataggtcatgccttgcagtacatcaaagaacacacacgggacaaaacctatgaatgtaatgaatgtggaaaaaacttctgtgagaagtcaaatcttcatgtacatcagagaacacacacaggagagaaaccctatggatgtaatgaatgtcagaaagcctttggtgataggtcagctctaaaagtacatcagagratacatactggcgagaaaccctatgagtgtaaggaatgtgggaaaactttctcccagaagccaaacttcattaatcatcagtgaactcacacaggagagagaccctttgaatgcaatgaatgtcaaaaatccttctctgtgaagtcaaaacttagagaacatcagagaattcacacaggggagaaaccctatgaatgtaatgaatgtgagaaaatgttctaccacaagtcatccctcacagtacatcagagaacccacacaggagagaaaccctatgcatgtagtgaatgtgggaaaaccttctaccagaagtcatccctcacaacacatcagagaacacacacaagggagcaaccctatgaatataatgaaagcttttaccagaatcccaacttcactaaatgtcagagagacaacatagaggaaacccttgtcaacatcctgaaggctcagaaaccttcaccttcttggactcgttccatagcagaaacaacccaggttggggtgagaacacccaataaagatgagaaatcttttgcctagaagtgatatttcattgaacagcaaataattgatattttatcttcttttcttttcttttcttgttgttacttttttgagacagagtttcgctcttattgcccaggctggagtgcaatggcgtgatcttggctcaccgcaacctctgtctcctggattcaagcaattctcctgcctcagcttcccaagtagctgggattacaggcatgcgccaccatgcccrgctaattttgtatttttagtagagacggggtttcaccatgttggtcaggctgctcttgaactcccgacctcaggtgtccacccgccttggcctgccaaagtgttgggattacagccaccatgcccagcccttctttttttttgaatcagaatctcactctgttgcccaggctggagtgcaggtgcacaatctcagttcactgcaacctcctcctcccgggttcaagtgattcttgtgcctcagcctcccaagtagctgggactacaggcatgtgtcaccatgctcagctaatttttgtattttttgtaaagacagattttcactatgttggccagggtggtctggaactcctgacctcaagtgatctgcctgccttggcctcccaaattgctgggattacaggtgtgaaccaccatgcctgaccaataattgatattttattttatttttatttattatcctttttgagatggagtctcactctgttgccaaggctggagtgcagtggcatgatctcggctcactgcaacgtccgcctccctgcaacctccatctcctggcttcaagtgattcttctgcctcagcctcctgagtagctgggattacaggtgtgtgccaccaggcccagctaatttttgtatttttagtagagacagggtttcgccatgttggcgaggctggtcttgaactcctgacctcaggtgatccacctgctttggccccccaaagtgctgggattacaggcatgagccaccacacccggcctttattctcaccttagaatcacaagatggtagtgcaggtagagtatacagtatttaactatttctgcctcatttgaaagataaaatgtatggagcctgagagaatcaatgaattattacaggtcactcctttgttactgatcaagataagaatttggtccaggcgcggtggctcacacctgtaatcccagcactctgggaggccaaggcaggtggatcacctgaggtcaggagttcgagaccagcctggccaacatggggaaaccctgtctctactaaaatacaaaaaattagctgggcatgatggcgggcacctataatctcagctactcgagaggctgaggcaggagaactgcttgaacctgggaggtggaggttgcagtgagccgagatcatgccactgcatgccagcctgggcgacggagcaagactgtttcaaaaaaaaaaagtttcgtgatttctttattcctttgcatagctgaaacaagtcttatcaaaagattgtgaaactgtaatcaaattagaacaaatatttaaaaaaatcttgtactgaagcattcattctattttttagagtttctgtgaattgttcaacaatattcccagtattatattcataggaaaacagataaacagcacaacatgagtgtttcctaccacatcaattttaatgaagacactttctatattaggatcctgtcatttatgaattgtttgtattttaaatttttttgtgtcttagcgacataaattgttaatcattgggatacatgtgtttactttcacccagtgaaaaattgcatgtctaagctcaacacaatctggtcatagagatgtctccacattgttcaaatggtctcttctgtgtagcattttaggaagttggatccaggagcagcaaggcgggccagatttctcctaactttattcttacctcctctttcccagcattacctttactcttcacatttttccaagatcagtagaaaatgaacagatcccaggtgagttgtttagttgttattatcagctttatttataatgcaatgtatgaggcttttaaggctcattagaatggaaatatagaaatcaacaggaaaatagacaatagcagactgatagcatgatttaatacataggtaagtacaagttttatggtctttcatagttatcaaaattgagctgtaaatttgaatctttttgatagccattgcacaatgcagacatctgtcacatgatttacatttccataaagaaaaaccatattgattatgaatggggcatgaagacttcctggcaatgagtctaaaattgttctctttttgcactctgtatgggcgatgaagtgtacaaccttccaataacttagaaattcaacctctttcagtagttcttcagtgggaacaaaggactcaagagctatgagaaaactcagtgaatataggttttcagagaatcaaaatattgtagtctagtgtggtatgtagattagtagagtaaccactagccatatgtggatattgaaatataattaaaatatatttcataagtcacatagtaacattttaagtgcttagttgccacatgtggctagtggctaccaaattggacagcactgctctaggccattttctggtgttgctgcttgatacagggataaaatgtagagtatctggaggaagaaatcaagtgcatcttcagactatttcagtaaatcattttttttccccatttaggctgtatttatggggtagtrtagacagttcgcagttacactctctggcatttgtgcctgtaattctatttcacatttcagacctttcttttctgaacaaaccagaagaggtaaaggaactgagaaagtgtgattaatggtataaattgaaatggatatgttatgttccaacattaatataatagttgataaaccaagattcagagcaaaaccaaaatacacacattacaaaaaatatgaatggctgaatttcttatccaagacagactattatactggtttaaaaaaccaaaatgcagccatattgtttcttaaaaacatgcttttaagaaatctaaaagcctgggcagggtggctcacacctgtaatcccagcactttaggaggccgaggagggtgcggatcacctgaggttgggagttcgagaccagcctgaccaacatggaaaaacttcgtctccactaaaaatacaaaattagcctggcttggtggtgcatgcttgtaatcccagctactcgggaggctgaggcaggagaatcgcttgaacctgggaggcggaggttgcggtgagccgagattgcgccattgcactacagcctgggcaacaagagtgaaactccttctcaaaaaaaaaaaaagtctaaaagagatgaaggaaggaaagcaaagaaatgggcaaaatatttttggcaaaagcaattaaaaggcaaataagagcacctttatttatatcaaagtggaacttgtacccgtaatggtatgaaaatagatatcacacaatggtaaatagcaaaattaggcaagaggataaaagccatctttttatatagccaaatacaaaagcagctgctaccttggttatagaaaactattaagagaggcaagaaacctctttcagcttatgacagatcaaagagattaaaaataaggaaagatagccagctagcctgtattctacccaatggaatattttactcttcaaggaaaaattgcaaagattgaagagataatcatacctaaaattcagtggtatttattctgtgtcagatggttttctaaatatcttaaacttataaaatctaatctcaacaacaaacgtgtaacatagatatcattgttttcccaaaataaaactgaagtaaaaagattaagtgccatgcctattatgggatctaggtcaacaaatttttcatcactcatttttcatcattagatcatattctagtcactaagaattttttttttttttttttttgaagcagagtcttgctctatcacccaggctggagtgcagtggcacgatctcagctcactgcaacctccgccttccaggatcaagcgattctcctgcctcagcctcctgattagttgggattacagacgcgtgcgaccatgcctggctaattttttgtgtttttaaatgagatggggttccatcgtattagccaggatggtctcgatttcctgacctcgtgatctgcctgcctccgcctcccaaagtgctgggattacaggcgtgagccaccgtgcccggcccagaaacatttttttcttttttttttttgagatggagttttgctcttgttgcccaggctggagtgcaatggcgcaatctccgctcactgcagactccgcctcccgggttcaggaaattcgcctgcctcagccttcggagtagctgggattacaggcatgtgccaccacgcctggctaattttttgtatttttagtagagatgagggtttcactgtgttagccaggatggtgtccatcttccgacttcaggtgatcccccagcctgggcctcccaaagtactgggattacaggcgtgagtcactgtgcccggcccgaacatttttaatactaaaaagtagaaatttgttagaagtagaattttgaggccgggcgcagtggccctcacctgtattcccagcattttgggaggccgaggtgggtggatcacctgaggtcaggagttcgagaccagcctggccaacttggcaaaactccgcctctaccaaaatacaaaaaaaaaaaaaaaaaaaaaaaaaaattagccgggcatggtggcaggcgcctgtagtcccaactactcaggctgaggcaggagaattgcttaaacagggaggcggagtttggagtgagccaagatggctccactgcactccagcctgggtgatagagcaagaccctgtctcaaaaaaaaaaagaatttcaagatattacatccttaattgtgagctttaaaactaaatagataaattacttatgatatataatcataaaagaaatcatcccttaaataaaactttggacttaagataaatatcaaaatccaaattattaattatctggaataaattgtaaggagaatacatgacaactttagggcaacaagtaaatttattgcagaatagtgtaacttatttttaaaactaaactgaaaataattatgaattatatatttgctcaaagaaactggaaaaaaagcaaagcaggacaaggttaggataaaatcatgaatataattaaaacataataaggagcaaagctaagtgtaaaactaaaagcagtttgttgcaactggtcataaaagtgattaaatctaaagctggcattaataaggaagcaaggtaataaaacaaaaatataaacagctttgagaaagtacacctaataacaaaatcttgtaacacaacaaatgaaaatcacaaaaaatatagggagactacatcgaggattataccaacgaataaatacaggatgttctattagaatatcctctccatgaaagtagtaattttgttcacaacaatctttccaacactgtagcagcacatgctcaatatatattcactgaataaatgactgaccaagtagggtttatatcaaagaaagtatggctacttcaacaataagaaacttactggaggccaggagtggtggcttactcctgttatcccagcactttgggaggatgaggtgagaggatcgcttgaggccaggagtttgagaccagcctgggcaatatggcaaaatcctgtctctacaaaaaaaaaatatgaaaaaattagctgggtatggtggcctatgcgtgtagtcctggctactcggaagaatcacctgagcccaggaggtcaatggtgtggtgaacagtgatcacgccagcccaggcaacagagacagaccctggctcaaaaagaaaaaccaaaacaaaaacactccccaacttcttggagatactacatcaacatatttaacttgaatacagaattatatgaaagtcactaggctgggtgcagtggctcatgccaaggaaggaggwttgcttgaggccaggagttcaagaccaacctggccaacatagaaagactccatttctaaaaaagtgaaaaaaatttaaaaagtcactagctaacaggtaattagatacacatttatttatttatttatttttatttattttttgagatggagtctcgctctgtcgccctggctggagtgcaataatgtgatctckgctcactgcaacctccacctcctgggttcaagcaattctcatgtctcaggctcctgagtagctgagtttataggcgccggccaccaagcctggctaatttttgtatttttagtagagacggggttttaccatgttggccaagctgatctcgaactcctgaccccaggtaatcttcctgcctccgcctcccaaagtgttgggattacaggcgtgagccaccacacctggcctagatacaaatgttaaacatgttagccaataacaagttccaagtagaaatggaagaaaaatgggaatacttgtaatgtcaaaaatgataaattaggcaaaaatttagtttcactgagaaaggtacattggagcaaagtcctgaaggaagaatcataaaaaatactaaatccaatagaaggcttaaaaagagaaaaaagatcaaagaacagctggaacaagaagaaaaatagaaacaaataagttatagacttaaacagtcacatcagtattcacgttacatacaaatgccccaaatatccaaaggcagatgttgccaaattggattttaaaaaaagcaatgcccatttatatactatagacaagaaactcatattaatataaagacagaaatagcttaaaagtagaaggattgaggccggcgtggtggctcatgcctataatcccagcactttgagaggccgaaggcgggtggatcgcctgaggtcaggagtttgagatgatcctgggcaacatggtgaaaccccatctctactaaaaatacaaaaaggggtagccagtgtggtggcaggtgcctgtaatcccagctactcgggaggctgaggcaggagaattgcttggcctgctgagctggaggttgcagtgagctgagatcgtgccactgtactccagcctgggcaacagaccaagaccctgcctcaaacaaaacaaaacaaacaaaaagaaaataaataaaacaaacaaacagattttctcccatttcttcttgtgattttccccccatattcagttgttttgcttatcttagttcttactgttatagcctgagttttcctgaagtagctctactttttttttttttttttttttttttttttgagatggagttttgctcttgttgcacgggctggagtgcaatggcacaatcttggctcactgcaacctccaccttctgggttcaagctgttctcctgcctcagcctcccaagtagctgggattacaggtgcccgccaccacgcctggctaatttttttttttttttgagatggaatttcactcttgttgcccaggctggagtgcaatggcatgatctcggctcaccacaacctctgcctcccaggttcaagctattcccctgcctcagcctcctgagtagctgggattacaggcatgcacctctatgcttgactaattttgtatttttagtagagatggggtttctccatgttggtcaggctggtctcgaactcccaacctcaggtgatttccccgcctcagactcccaaagtgctgggattacaggcatgagccaccatgcctggcctttttytttcttttttttttttttgagacagagtctcactctgtctcctgggggcatgatctcggctcactgctacctctgcctcgcaggttcaagcgattctcctgcctcagcatcctgagtagctgggactacagacatgtgccactatgcctggctaatttttaatttttgtatttttagtagagacggggtttcaccatgttggttaggatggtctcgaactcctcaccttaggtgattcacccgcctcagcctcccaaagtactgggattacaggcctctacttcgttttttattcattttccataagtgaataactctatgtttagtgcaggttgctaattttattgttgtttcagagaattttattcttattctttgtgtcctgttctccaggtacctgtgtgggttccctcagacctggccccagtacttttgcctttccttgggagccatctgattcactgctggtttcagcagccaccaacatgccagtgactccgcagtcctcagcttcattacgggcttcccttctgagctccagaaccactcatccagctccctcctgaagatccctgcctgcccgttccacagacacttcgagcacaacatgtccgagacccctctagcccttaccttttgcccagcctctttctttgcacttcccagtctttgcaaatggcacctggatttacctggaggctcataaagraactctgggagataatttccccatctttcttttgcaccatgaatttgggaccaatatctcttaatgtcttattttgtaggatcaattcttctttccaggagttagctaacgtcttttgtaaagagccagatagcgaatattttatgctttgtggaccaagaaataaaatcaaggatatatgtaggacttattgagcaagagacagaagaaatttacacaatttttgttttgttttgttttattttgtttgtttgttttgatatgaggtctttggcctcactctgttgccaggctgaagtgcaatggtgtgatcacggctcactgcagcctagacctcctaggctcaagtgattcttccacgtcagcctcctgagtagctgggaccacacagccaccacgctgccacatcccgccatgagctgctaatttaaaaaatttctgtgaagatggggttttgccacattgcccaggctaccgccagtttttgttgatgaaattcaaaatataatcatgattgtgttatagtgttttgcaatacaggtctactaatgagaaaagtggaattcttttggggtggttaacattttgcttaattgaggttctttgttactattctatgtcatcaaaatctattgcaaatcatcatctgctaatgttgaattgtaatgagctttcacatatttcatctttgaaaatgtgtttcacataggtactaccagttactgatatcagtccacaaacatgattttattttattattttattttatttttttattttattttgagatggagtctcgctctatcgcccaggctggagtgtagtggcatgatctcggctcactgcaagctccacctcctgagttcacgccattctcctgcctcagcctcccaagtagctgggactacaagcgcccgccaccacgcccggctaatttttttgtattttttagtagagactgggtttcaccatgttagccagaatgatttcgatttcctgacctcgtgatccgccggcctcggcctcccaaagtcatgattttattttttaaaaataaatttaatgtgtatttttgaggcttacaacatgttatgggatatgtatagatagtaaagtgtttagtgaagcagattaatggatytgtcatctcacatagttgcttttgttgtgacaagagcagctacagtttacttaataaaaatctctaatagaattttactaattttagtccttatgttgtacattagaactctaaaggtgttcaggccaggcgtggtggctcatgcctgtaatcccagcacttttggaggccgaggcaggtggatcacctgaggtcagcagtttgagaccagcctgaccaacatggagaaaccccgtctctaccaaagatacaaaattagctgggtgtggtgtcgcatgcctgtaatcccagctactcaggtggctgaggcaggagaattccttgaacctgggaggcggaggttgcggtgagctgagattgccccattgcactccagccgaggcaacaagagcgaaactccttctcaaaaacaaacaaacaaacaacaacaacaacaaaactctaatggtgttcatcctacatatttaaaagtttgtatcctttgacctacatttccgcatttcctttaccacccctccaacacctgtggaaaccactgctttattctctgtctttgtatttgaactctttctaaaaatatggctaacaacctggcgtgatggctcacacctgtaatcccagcactttgggaagccgaagagggtggattgcctgagactaggagttcagatcagcctgggcgacatggcgaaaccctgtctctacaaacagtaaaaatatccaggtgtggtgatgcatgctcgtagtcccagctacttgggaggttgaagtgggaggatcacttgagcctgggaggtcgaggctgcagtgagccatgattgtgccactggacagcctgggagacagagcaagacccttcctcaaaaaaaaaaaaaaaaaaaaatatatatatatatatatatggcttccaaataagctgtgatgaaatattccagctaattagataagaaaactacccacactccgctgtgccttaaaaatctgacactcaaagcccatttctcttgttttgacgtgatatgcactggtaataaaaagctaaaataggccaggcgcgttggctcatgcctgtaatcccagtcctttgggaggctaaggcaggagaatggcttgaacctgggaggcagaggttgtagtcagccaagattgcgccactgcactccagcttaggcggcagaacaagactccatctctaaaaaaaaaaaaaaaaaactaaaataaaatgtcacaagatggcattaggcttggcacttgaaatgcagcgaagttataactgaatccatgtcttgtgatttgtagtgtgctgggcagcagtgagagtgccacatacagtctgtggtgactacttgtccctgctgttgtgtgaaagcagcttagacaatacacaaacacacaagcttgtgttcttataaaattttatttatggacactgaaatttgaattttgtataatttttacatatatgtgtcccaaaatattcttttgattttttcctaaccattggaaaatgtaaaaaatgtaacaaccattcctggttcctgtacagaatggggcaggccagatttggctgtgaattgcttgccaactcctgccggttcttacacctgaatgtgggtggtcatcctgccctctggtctttgccttgcatttcctcttaagctcttctccactcttcttaaaatcactgcccctaagatgcaaacctggacatctaactctagtgcttacttcacctctttattggctccctgttacccacagctgtgatcttgaagtggtgggttcgagatataccttagggagtgcttaagaaaatcagtacwcttgaggctgggcgtgaggctcacacctgtaagcccagcacttgaggtcaggagtttgagaccagcctggccaacatggtgaaaccctgtctctactaaaaatccaaaaaaaaaaaaaaaaaaaaaaaaagctgggcatggtagtgcgcgcctgtaatgtcatctactcaggaggctgaggcaggagaatcacttggacctgggaggcagaggttgcagtgagccgagatcacaccactgcactccagcctgggcagcagagtgagactccatctcaaaaaaaaaaaaaaaatcagcacgctggaagaaaatactagcctagctgtttacattatttacactcacaaaaaagaaactttatagtacatatgtttaacttatgataaaatatttagggaaaggaatttatcccaaattacttataatcatctagctcttgattttgcttctgcatctgtatcttaatatagctctatcctttcaccaacaaacagtactatttgtagttctattaacctgccctgtgttttcagtgtccccaggcttttttttttttttttgctttgtctttggcccataatacattgttattattattattagagacggagtcttgctctgtctcccagtttggagtacaatggcatgatctcggctcactgcaacctccgcctcccaggttcaagcgattctcccacctcagcctcctgagtagctgggattacaggtgtatgccgccacacccagctaatttttgtagttttagtagagatggggtttcaccatgttggccaggctggtcttcagttcctggcctcaggtgatctgcccgcctggggctctcaatgtgttgggattacaggtgtgagccaccgcacccagccccatgatacattattgatgtgtgaggactcaatgcgttaatttcttaaggtagcaaaacagaattgaacactttcccgggtgtggccattaccttttagattcttcttgcatttcttctgcaaaaccttattgcaggcatattttttaactatgtctttcaatgatataattaaccctttgagagcagtgttttaaagtattaatttttatatccccagaacataagacagttccagcacattggggaactttagattttttttccacaaatcaataaattaatacatggttaaggtacttttgtgatttgttctcccacaggatataatgccaaataaaggacagagtaggtatgctgtgtgacattttttctttgagtatcaatagtgaacatgacaagatattagatcccaaacattgcatagtgtttgttgtagtcactgtaaaatgaacacagatgtactttttcagggatcagtgtcgctcaaggacgtgactgtggacttcacccaggaggagtggtagcatctgggccctattgagaggaccctgtacatgaatgtaatgctggagaactacagcctcctcatctcagtgggtaaggattgcgttttatatacttcaaatagcattcatttcttttttagcagttgatatacgtgatcctttatagagatgaattattttttagggttgaaatttagggttcaaaggagaccctgggctgtaggtataaggtgaccttttttggtcactggaaacttttttcccctctcctagtgaaaagcttaagtggaactattgactacagctcctaaaactgcacctttttcttcagaaggcttgaagctataagcctggctgagtcctaagtcatttctcattcacagggtattgcattagcaagccaaaggtggtcttcaagttgcagcaaggagaggaggcatggatattagaggaagagtcctcaagccaaagccactttggtgagtagtgagtacctacccactgtaagcctagtgagattggtccctgtccattcaggtgtctgctctttgctattttaaaggaattttatatttcatttcatttatttatttattttttgggttacaaacaactgaaatttatttctcccagttttgggggctagaagtccaagaccagggtgctagcatgctagcatggtcaggttctggtgagggccctcttccaggttgcagactgccaatgtcacgttacatcctcacatagtggagagagagagctagagagctctttgggggtctttttttaagacttttattttaggttcagtggggtacatgtgaaggtttgtttacataggtaaactcatgtcatgggggagttttattttttagaggcaccactgtaaaagtggcctagaataatcggtctgttttccttaataaatataatacacttccaagtaatgacctcatagctgagtgttcttgggttttcacttgaattttttagacagagttattattctcagcatttacaaaaatctaattcttgcctatctcattttagatctttttcttatttattccctttctattgtcttattttaattgtgtatcatttattcattcaacaagtatgaagttttttattaatttacatgccagttaggtttacagctggggatagacctgtggaaaatataatgatcctactgtgaggaagtttatacttttgttttggaggagactaaaatgtggtgtgatattttagcaaatgtttttaaacccctttggggtcaaaatcagaacacaaattttaatgatgtgagggagaatgtgagccgtgtagtttctgaatattctaggcattggaggattttgagcaaagaagtgacaggatctgactcacctctctctggctttcatgaagagaacatgccagctgaggggtggcagattggggagcaggcagcagtaaatcctgcaatggcccacaacagtgatggcgcctgcactagctcagtagagttagggaggtcatgtgaagggttttatttctggatgtttgttgaaggtgttccccaaacaggatttgttagattggttttggagtacaagaaaaagtggtgtttgatacataagagatatataggctgggcgcggtggctcacgcctgtaatcctagcactttgggaggccgaggcgggaagatcatgaggtcaggagatcgagaccatcctggccaacacggtgaaaccccatctctactaaaaatacaaaaaattagctgggcgtggtgtcaggcgcctgtagtcccagctattccggaggctgaggcaggagaatggcgtgaacccgggaggcagagcttgcagcgagccgagattgcgccactgccctccagcctgggcgacagagcgagactccgtctcaaaaaaaaagaaaaaagatatatatatatatatatgtatatggagagagagagagagagacatctcttgtgtcacacagcatacctactctgtcctgtatttggtattttatatatatatatatatatatatattttttttttttttctttgtttttttttttttttttttttttttttgagatggagtctcactctgttgcccaggctggagtgcagtggcatgatctcggctcactgcaacttctgcctctcggattcagcatacctactctgtcttgtatttggtattttatatatatatatatatttttttcttttttctttttttttttgagatggagtctctgttgcccaggctggagtgcagtggcatgatctcggctcactgcaacttccgcctcccgggttcaagtgatcctcctgcctcagcctcccaagtagttgggattatagctgtgttgccaccatgccggctaatttttgtatttttagtagagacggggtttcgccacagtggccaggctggtcacgaactcctgactcaagtgatctgcccacctcggcctcccaaagtgctaggaatacatgcgtgagccaccgtgcccagtccatagagctataatttattgagttggcgaaaaatgggatgcaatagtgctgagaggaaattgataagaatgtaggtaaatctaggctgggcgcagtggctcacgcctgtaatcccagcactttgggaggcctaggcgggtggatcacgaggtcaggagattgagaccatcctggctaacatggagaaaccctgtctctactaaaaatacaaaaaattagccgggcgtagtggcgggcgcctgtagtcccagcaactcgggaggttgaggcaggagaatggcgtgaacctgggaggtggagcttgtagtgagccgagatcgcgccactgcactctagcctgggcaacacagcgagactccgtctcaaaaaaaaaaaaaaaagattgtaggtaaatctaaacaaacatttctttggtgagtaatacttgttgcgtgtaaaaaggacaaacacataatactgaaaaatagcacataggtcagttagcagttagacttctgttctaaaatgtttgtttttccgaagacacgttaagaaatatgcatggtaaaatttaatgaacaaatgctaaaataagcaaaacactatcactttcaaacctgcaaatgagagaaagtggaaaattaaaaccaaccattgtaaacaaattgaatcagayccaaaaagggtaataaagtattggagagtaaagagtggaaagtgtggaacacctaaaagctgcacccctgaccaaaaaaataaagaaacggccagatattttaataattacaggaagtgaaaattgactaaattctcctgataaaagacaaagataagttggattttgagggttttttttgttaytttattttatttgtttggagacagagtcctactctgatgcccaggctggagtgcagtggtgtgatcacagctcactcaagccttgaccttctaggctcaagcgatctgcccacctcagcctcccagaaattcgagactagcctgggcacacggcaaaaccccatttctataaaaaatacaaaaattagccaggcaaagtgccatgcatctgtagccccatctacttgtgaggctgaggtggaaggatctcgtgagcctgggcagtcaaggccgcagtgagcggaggttgcactgtcacactccaacttgggtgatggagtgagaccctgtctcaaaaaaaaaaagaaaaagaaaaaaattgtctgcagacagatgattaaaaatactctgagtatatagcaagttggcaaatgtaagatcaatgtatataatctgttgtctttctaagcaccagtcatctatttcattttattttattttatttttgagacagtctcactctgtcgcccatgctggagtgcaatggtgcggtctcggttcactgcaacctccgcctcccaggttcaagtgattctcctgcctcagcctcctgagtagctgggattacaggcatgcaccaccacacctggctaatttttgtatttttagtaaagatgggatttcaccaggctgatcttgaactcctgacctcaggtgatccgcctgcctcggcctcccaaagtgctgggattacaggcatgagccaccatgcctggcttcatctttatatttttttagaggcaaggtctcactatgttgcccaggctggtcttgaactcctgagctcaagtgatcctttcacctagcccttccaaagtgctaggattacaggcatgagccaccacgcctggccacaccagtcatctttagaaaacatgattcaggtttgagtgcaggagatcaaggctgtagtgagctatgatcataccactgcactccagtctgggtgacagagtgagaccctgtctcaaaaaaacaaacaaaaaacaaccccccacccctggctccaattcaaagaatttaaaccatttgcaataacaaggcctttatttttaatttttttgagacaggatcttgctcagtcaccgaggctggagtgcagtggtgcaatctcagctcaccgcaacctctgcctcccgggctcagctgattctcccacctcagcctcctgagtagctgggaccacaggcgcacaccaccatgcccagctaattttttttttttttgtatttttgtggagatggggtttcttcttgttgccaggctggtcctgaacttctggactcaagcgattctctcaccttggactcccaaagtgttggaaatacagacatgagccactgggcctggtcagcaaggcctttaatggagaaaacaagaaaagtatattgaaaagcattaaaggaaacataaatatggagatagggaacacctaataatatcttgaaattgtcacgctctctaaatttacctgtagattcagcatacagttatgccttgcttagtgacaaggatacactctgggacatgttaggcaacttcattgctgtgcaaacatcatagagtgtgtacttacacaaacctagatggtatagcctaycacacatctagactatacgatatagcctgttgctcctgggctataaacctgtacagcatgttactgtatggaatactgtagacaattgtaacacaatggtaagtatttatatatgtaaacatagaaaaggtacagtaaaaatatagtataaaagatgaaaaaaaatggtatacctgtataggcacttaccatgcatggatcttgcaggtctggaagtttctctgcatgagtcagtgggtgagtggtgagtgtgaaggcctagtacgttattgtacactactgtaggctttataaacactgtacacttaggctacactgtttataaaaaatatttttcttcaacaatatattaattttagtttactgtaacttttttcctttacaaacttttaacttttctaggccaggctcagtggcttatgcctgtaatcctagtactttgggaggctgaggtgggcagatcacctgaggtcaggaattcgaggccagcctggtcaacatggcgaaaccccatctctactgaaaatacaaaaattagctgagcatagtggcatgcgnagtcccagctacttgggaggctgaggcaggagaatcttttgaacccaggaggtggagaggttgcagtgagctgagatagtgccactgcattccagcttgggcaacagagtgagaccctgtctcaaaaaaaaacaaaaacaaaaaaaacccacaaaaccttttaactttcctttttttttttctttccagacagggtcttgctctgccactcaggctggagtacaatggtgcagtaaccatttacaatagcattaaaaaaattaagatacttcagagtatatttaaccaaatgaggcaagacttgtacactgaaactacaaaacattgttgaaagaaactaaatactacaatgtgtggctattcctcaaggatctagaactagaggtaccatttgacccagccatcccattactgggtatatacccaaaggattataaatcmtgctgctataaagacacatgcacatgtatgtttattgcggcactattcacaatagcaaagacttggaaccacccaaatgtccatcaatgatagactggattaagaaaatttggcacatatacaccatggaatactatgcatccataaaaaaggatgagttcatgtcttttgtagggacatggatgaagctggaaaccatcattctcagcaaactattgcaagaacagaaaaccaaacaccgcatattctcactcacaggtgggaattgaacaatgagaacacttggacacaggaaggggaacatcacacactggggcctgtcgtggggtggggggggatagcatcaggaggtatacctaatgtaaatgatgmgttaatgggtgcagcacaccaacatggcacatgtatacatatgtaacaaacctgcacattgtgcacatgtaccctagaacttaaagtataataaaaaaaaaagaaactaaatacctaaataactcattattcacgtttgtgctggtgctgttctaaatctactgcactgacagtcctaaaaagtatagcacatacaatgatgtatcatacataatacttgatgatgataataaatgcctatgttactggtttatgtatttactatacattttatcattatttcagagtgtacatctcctacttatttaaaaaagggcaggccaggtgcggtggctcatgcctgtaataccagcactttgcggggccaagccgggtgaatcacttgagcccaggtattcaagaccaacttgggcaacatagtgagaccccatctctacaggaaatataaaaatcagccagatgtggtggcacatgcctgtagtctcagctattcaagaggctgagatgggaggatctcttgagcctgggagtcaaggctgcaatgaactgtgattgtagcactgcactctagcctgggagacagtgagaccctgtctcaaaaaaaaaaaaaaaaaaaaggtggctgtaaaacagctgcagacagtctctttaagaggtattccagaaggcactgttatcatagagatggcagctttatgtgtgtgttaattgcccttgaagaccctccagtggaacaagatgtggaggtggaagacagtgagaatgatgatcctgaccttgtgtaggcctgggctaatgtgtatgtgtgtgtcttagtttttaatgaaacatttaaaaagtaaaaataaacaaatagatatatagatagaaaaaagcttggagaatamggatataaagaaaatatttttgtacagctatacaatgattacaaaagagtcaaaatgttaaagtaaaaagtgttatggtaaactaagattattgttgaagaaaggaaaactattttaaaaataaacttagtgtagcccaagtgtacaatgtttataaagtctagagtaatagtactgttctaggccttctcattcaatcaccattgactgactcacccagagcaacttctagtcctgcaagctccattcatggtaagtgccctatacaggtgtgccattttttagtctttttgtttatttgttttgagacaaggtctctctctgtcgtccagggtggagtatagtggcatgatcctggctcactgtagcctcaacttcctgggctcaatcgatcctcccacctcagcctcccaaatagctgggactacaaggcatgcaccaccatgcccaactaatttttgtatttttctgtagagacagggtttcaccatgttgcccaggctggtctctaactcctggtctcaaggaatccacctgcctctacctcccaaagtgctgggattacaggtgtgagccactgtgcttcagcctttttatctttcacgctgtatacttactatgccttttytatgtttagacacacaaatacttaccattgtgttacacttgcctacagtattcagtatagtcacatgctatacaggtttgtagcgtaggagcaataggccgtatcatatagcctaggtgtgtagtagctataccatttaggtttttgtaaacatacctaatgacatatttctcagaaatgtgtcactgtcattaagtgacacatgattgtacatttaaattgattattgataatgaaggatttatgccattgtggtttttgttttgtatatgtcttatatattttttgttcctaagttcctcctttactggcttatgtgttagatacatgttttctttctttctttctttttttttttttttttttgaggcggagtcttgcactgttgcccgagctggagtgcaatgacgcgatctcggctcactgcaacctccgcctcccaggttcaagcgattctcctgcctcagcttcccaagtagctgggattgcaggtgtccgccaccactcctggctaatttttttgtattttttagtagagatggggtttcactatgttggccaagctggtcatgaactcctgacctcgtgatccacccatctcagcctcccaaagtgctgggattacaggcgtgagccaccatgcccggcacatgttttcttatgtaccattttgaattttttcatttcttttatgaaataacttttttagtggctgctttggggattacagttaacatcttaatttataccactctagtttgtgttgttgttgttgttttttttttttggagacagtgttgcccaggctggagtgcagtggcacgatcttggctccctgcaacctctgcctcctggattcaagcaattctcatgcctcagcctcctgagtagctgggactacaggcacctgccaccacgcctggctaattttttgtattttagtagagaccgggtttcacatgttgccaaaggtggtctcaaactcccgagctcaggcattctgcccacctaagcctcccaaagtgttgggattacaggcgtgagccactgcacccagcctccttgttgctgttttttaaagagatggagtattgctgtgttgctcaagctggagtgcagtggctattcacaggtacagtcacagtgcactgagacctcgaactcctgggctcaagcgttcctcctgcctcagcctccctaatagctgggattacaggcatgcaccaccatgcttggctttaccactctggtttgaatgaataccaacttgatatttatagtatacaaaaatttttctcctatatagctctgtcccccttaagttattatgtcatatttacattttttttttgtttgagacagagtcttcytctgtcacctagactggagtgcagtggtgtgatcttggctcactgcaacctctgcctcccggattcaagtgattctcctgcctcagcctcctgagtagctgggattacaggtgtgcgccaccatgcccggctaatttttgtatttttagtagagacggggtttcaccgtgttagtcaggctggtcttaaaatcctgaccttgtgatctgcccgctttggcctcccaaagtgctgagattacaggtgtgagccaccacgcctggtccataattacatttttatacaatgtttgctcatcaacattgtcttataattactgttttatgttttattcattttctttgagatggagttttactcttgtcacgcaggctgagtgcaatggtgtgatctcagctcactgcaacctctgcctcccaggttcaaggaattctcctgcctcagcctcctgagtagctgggattacagatgcctgccaccatgcccagctaatttctgtattttcagtagagacaggatttcaccatgttggccaggctggtcttgaacttctgatctcaagtgatctgcccgcatcagcctcctaaagtgctgggattacaggcgtgagccatcacacccagcccattttatgttttttaaaccacatagaaaagaggatttcagttgtcaaaaatgcatgaatactgacttttatgtttgcctgtgtgattacctttaccagtgttcttttccttttcatttggatttgagttactgtctggtgtrctttcactttgccgtgaaggatttttagcatttcttgtcaggaacatttactcatgatggagtagccacagttctactccccactttgctcctgtagatgaagtccctgagccgaaaaaccttccttatcaaaaggaccaggcccaggcccggctctgtggctcatgcctataatcccagcactttgggaggtcaaggtgggaggattgcttgagcccaggagttcaagaccagcttgggtaacatagtgagactttgyacaaaaaattgaaaaattaatagggcatgcacacctgtagtcccagctacttgggaggctgaggcagggtgatcacttgggcccaggaggttgaggctactgtgagctgtgataatgccactgcactccagcctggatgacagattgagaccccatctctaaaataaataaaataaaataaaataaattccaggcacagttcctgcttatccctgagtagtatgtttcagtttcctgccagctctcagaattaaaccagacaattgcatcctcctgcaggaactaggggaataaagctctcttgatagtgaaaagcctgcctcccaaagcccttggttgttcacttattcccgagtgaaatatctctgtggtcttgcctgttgcagtgccctcctctcctgggccgtaagtacaagtgactgataaatgctgtcaaaatcacctatgaggtgttgagtatgcttcagccatcccacgacccaagggtaggaattccttcctcacccacagggtgaagaggaggggatgacaattggcataatgaacaggatggtcccagggcccctggtgagctgtaattaactgttcttggtggataactggctccatgatacagcaaaggctgcctgggtccaaactggccattgctggtgggcttgtgctttggccttcattgttttcacttcttcccaccctaggtggctctcatctccaacatgaggattgttatttgactgtacagtggcattctgtgctcttgggtttggtgtgtttataggtggtttatgaggctccctcctgtagaggcagcaacaacacagcaccctaaccagttggtgcttgagttcagcttaccacgagtcaggccagatctcttttgttgctgtgtctactctgtgaaccatcactggctacctgggggagctatacagatgttatttgtgatygtgcacccaccccctgggacaggtctgcccttcctgaggttagcggaaaggaagaaagaagaccactactccagggagaattaaacatggcaccatggatgcctagtgagtgtttttcaggcaagagtaatggccttgcctggcacttgtgctgttgcttcccctgcttctgttcagcgtgctctcctggtgtctaagagcatgaaggtgcaaatctgttgtagcccacaaccsaggrgctgatgaaaaaatagmaggagcatttggtaccagcctctcctgctggagaatgtagctcaactgctttccccatgcaaaacccctagccagtgcacctgggctttgcttagtatggctgcttrccaagaagccagagggctaagcttgtaatggcacagcttgttggctcccacctgggccataaacaaaatgaccttcctggatgtggatcctaaccctggagatattgattggccctccctgtcagaaggggcagctgcctacaaggtgggccattgggcccctgaacctttccctgttctcatccagaaggtccacatggtgatgggacagtgactgaaatggaaagctgcaacttattgtggctagaaatctaaaatattgtttggcaatttatatatagacagcaataaaaaagcctgtgtcatggaaaaggcgggactgttgctaaggatagtttcagtccacccaccactgggccatgggccttgcaggtttccactgcagtactttgctgccygagcctccattgcaagaaaaatcctcctctgtagggtcatagggaaaagccaccctatggcaccctgtggcattgtgagggggttaattcaaacccagcttaagcctgaggttcttaaaccctgtaaaccaaccattgccttgcagggaaggaggaggcctctcaccctgatgataatgatttgaggctctctggagaaagaaatctataaatatgagcagaataaaaagaacttcccctccttgtctgtatgtttttaggggagtttctgaatataaaatagagactaaataagtatgcctcaccttaactgttgtctctccaagataccacatggtcatagcacttatgaccttaaaatgtaccgtggtggacatggaatcagtgagcaataaattaaaatgaagtcattggcacttaacaacttggcttaatgaaaagggaccttgtgaaaaccacagttaaaataatatcgggctgggcacggtggctcatgcctgtaatcccagcactttgggaggccgaggcgggtggatcacctgaggtcaggagtttgagaccagcctggccaacatggcaaaatcccgtctctactaaaaatacaaaaatacaaaaaacaaaaacaaaaacaaacaaacaaaaaaactagccaggtgtrgtggtgcatgcctgtaatcccagctactcgggaggctgaggcaggagaatcgtttgaaccygggaggcggaggttgtagtgagctaagattgcatcactgcacttcagcctgggtgacaagagtgaaactacacctcaaaataaataaataaataaaattaaataaaatagttaatgtggccaatgtaaattaaaacagggccttcaagaattaaggctgggcacggtggctcccagcatttcaagaggctgaggcaggcagattgcttgaactcaggagttcaagaccagctggggcacatgacaaaacgctctctgtactaaaaatacaaaaattagctaggcatggtggtgcacacctgtaatcccagctactcgggtggctgaggcatgagaatcacttgaacacaggaggtggaggttgcagtgagtcaagattgcactactgcactccagcgtgggtgacagagcaagactctgtccaaaaaaaaaaaaagaattgaaacttgtatgaaggggtgattatcccactgcacctgcatctagcagccaaacttggcctttttaacctggaaagcatgaatgtgaatagtgcctcatggtgtgattactggaaccttaaggtcctcagacctgatacccaatattattgaagttactgactctatctaataaacaactggtaaatattttgctattgtagatttggcttgtattagggttctctagagggacagaactaatggaacatatatatatatatatatatatatatatcatgggagtttattaaggattaactcacacaaacacaaggccccacaacacgccatctgcaagctgaggagcaaggagaaccagtccaacttccaaaaggattagttccaaaaggattggagtccaatgttcgagggcaggaagcatccagcatgggagaaagatgtaggcggggaggctaggccagtctctcttttcacgtatttctgcctrtatatattctagcctcgctgtcagctgattagattgtgcccacccagattaaggtgggtctgcctttcccagcccactgactcaaatgttaatcttctttggcaaccccctcacagacacgcccgggatcmatactttgtatccttcaatacaattaagttgacactcagtattaaccatcacaagtccaccggttgtcaacttgaacccatacacatctcctgagatcatatataatcttcaaataaagacaataataaggtcataattatgcctaacataatacaactgtccttcatacaatgggaaacgtaccaattcccaacccaaatactattacataaagttaacaatacataaatgctgatgtgaagtcaataaatcttatgtcacatgataaagggaaaggaaataaaatgaagatttttttagtacaagtatatatatgcacaaacatgttcttaacaaaagagggaggaaatatgacaattacagtcctcgtttctgcagctggtcacatggtcatagctggtattgatgactaccttcatctattacccattctgtattccctttgccttcagcaagcacctcagcaggtcatggtttttttcctggtggagtgacccaaaccttcattcctgaagggtctgggtcatttgtagtcctggctggattgggctgttgtagtttcccattgatctaattacagcacatggtaataccaagagacaccctaatggatctcctgtattccatgcatactcttccttacctccattgtggagtagtagactgattccatcttgataatccgggacaaccatcccaggcaacactgtaactcccttttttttgtttgttttttttgagaaggagtctcactctgtcgcccaggctggagtgcaatggcatgatcttggttcactgcaacctctgcctcccgggttcaagcacttctcctgcctcagcctcctgagtagctgggattacaggcacatgccaccatgcctggctaatttttgtatttttagtagagacagggtttcaccatgttggtcaggctggtctcaaactcctgacctcatgatccgcccgccttggcctcccaaagtgcggggattataggcgtgagccaccgtgcccggccctgtaactcccttcttagccggttcacttaaaggtagaagaagcccaaagtgttcaggtggcaatcttccagtttaatggaattgttgttgggtctcctggtggcagtgttcctccctatggaactaagacctctaggccagcagaacrtaattttgcgggaacaggaagcaaaaattttgcttgtggaacactaggggtgatggtaactggtgccactttcacttccatcccttgattcctggacccatgaatcctggctatgggagaaacagtaccatatattggatgctgattcagagcatacacagccttctggagaactttgccycagccttgcaaaatattgtcacctagttggtgttatatttgtgacttcaaaaggccattccactgttctgtcaatccagctgcttcaggatgatggggaacatggttagatgagtcaattccatgagcatgagcccactgccgcacttttttagccataaagtaagcaccttggttagaggacatgctgtgtggaatactgtgatggtggataaggcattctgtgagtccacagatggtagtcttggcagaagcattgtgtgcaggataggcaaacccatatccagagtaagtgtctattctaatgacgacaaacctctgtccattccatgatggaagaggtccaatataatcaacctgccaccaggtagctggctgatcacccgaggaatggtgccatatcaagggctcagtgttggtctctgctgctagcaaatagggcactcatcagtgaccatagccaggtcagcctcggtgagtggaagtccatgttgctgagcccatacataacctccactcttgccaccatggccactttgttcatgggcccattaggcgacgacaggggtggctgaggaaagaggctgagtgctgtccacggaacgggtcatcctatccacttgattattaaaatcctcctctgctgaggtcacctgttggtgagcactcacatgggatacaaatatcttcacagtttttgaccactgagagagatccatccacacacctcttccccaagtttgtcaccaattttccagtaatgcttcttccaagtccctgaccatccagccaaaccattggctacaaccaattaatcaatatataatcgcacatgtggccatttctccttccatgtaaagtgcacaaccaggtgcactgctcaacgttctgcccactgggaagatttcccttcaccgctgtccttcagagatgtcctagaaaggggctgtagtgctgcagctgtccactttcaggtgatgcctgcatatcgtgcagaatcatctgtgaaccaggccctagtcctcttttcctctgttcactgatcatagggaactccccatgaggccatcggtgcaggctgggggagagaaggcatggtggcaggagtggagaccatgggcatttgagccacttcctcatgtaactcacttgtgccttcaggacctgctcgagcctgatcacatatatgccacttccgtttgatgatggaatgctgctgcgcatgacccactttatggctatatgagtcagaaagcacccagttcataataggcagttcaggttgccaggtgacttgatgacccatagtcaaaccttcagtttccaccagagcccagtaataggccaagaactgtctctcataaggagagtagttatctgcagaagatggcagggccttgctccaaaatcctagaagcttccatygtgattcacctatgggggcctgccaaaggctccaaacagcaccctgtctgtcactgacacctccagcaccattggatctgttgggtcatatggctcaagtggcagagcagcttgcacagcagcctggacctattgcagagcattcttctgttctggaccccactcaaaactgacagcctttcgggtcacttgataaatgggctggagtaacacacccagatgaggaatgctttgcctccaaaatccaaataggcctactaggcattgtgcctctttcttggttgaaggartggtcaaatgcagcaacttattcttcaccttagaaggaatatctcaacaggccccacaccactggacccctagaaattttactgaggtagaagttccctgaatttaagtcagttttatttctcatcctctggcacacaaatgtctcaccagtaagtccagtgtgtttgctacttcttgctcactggatccagtcagcataatatcatcaatgtaatggaccagtgtgatatcttgcggcagcgaaaagtgatcaaggtgtctccaaataagaaaaagcgatcaaggtgcttccgaataagattatgacacaaagccagagaattgatataccctggaggtaggacagtaaaggtatattgctggccttgccagctgaaggcaaattgcttytggtgggccttatggacaggaatggaggaaaagacatttgccaagacaatggctgcataccacctaccaggaaatgtgctaatttgctcaagcaatgaaaccacatctggtacagcagctgcaattggagtcaccactttgttaagcttacaataatccatggtcattctmcaagatctgtcrtctgcacaggctaaatgggagagctgaatggggatgtggtgggaatcaccaccccagcgtctttcaagtccttggtagtagcactaatctccacagtctctccagggatgtgatattgtttttgatttactatttttctaggtaaaggcagctctaatggctttcatttggcctttaccaccataatagcccttatcctaccagtcagggagccaatatgggagttctgccagctgctaagtatgtctatgccaattatgcattctggcactcaggaatgaccacagggtaagtccggggacccactggacccactgtaagttgggcctgagctaaaatttcattaattacctgatctctataagcccctactttaactgtaggaccagtgatgttttgggtcccctggaatcgttagctcagagccagtgtccagcagtccccgaaatgtctgatcatttcactttccccagtgcacagttaccctggtaaaaggttggaggtctccttgtggaaggatgggagaaagagtcactatgtaaattgtcggtaatgtagtagggttcttcctcaaggggacctggtctccccttcattcaaggrgttctggatctgtaaactggctcaagtctggaaattgattgaggggttgtgattctctagtttgtttttttgtttgtttttgttgtttgtttttgagacagagtctccctctgtcattcaggctggaatgcattggtgtgatctcgactcactgcaacctccacttcctgggttcaagcaattctccagcctcagcctcctgagtagctgggattacaggtttgtgccaccatgcctggctaatttttgtatttttagtacagatggggtttcaccatgttggccaggctagtcttgaactcctgagctcaggtgatccacctgccttggcctcccaaagtgctgggattataggtgtgagccactgtgctggctgattctctgtttttataattcaaattagacttttgtcccttcgacttagaaattttctgcttatataaattaagtaggaatgcagtaggcttcctatcactttcacttgtaggaacaccatgattagccaatgctagagctctacattagtcaggatcttctgattgccactttgcctctgctgtccatcagagtagccacgcccaccttgcctttgatggttgagtgctgccacttggcccctgccaccttgggatccaattattcccattatatttaaattttgtagttgagtgtctgcagttcccactgttagatctgacatacagagaagagcaattagagggctcttcaaagatgcaggtgttgccctcacaaatctgtttcacaaggcattggtcaagggtatatcttctgggccctcccagctgggatgagtaggtctaaagtgactaatccactccaccatcccaatctccctaagcctttgtatcccttcctctacrttaaaccaagggagatgaggcatatccagcttgctcacagtggatcatcttcttatctgtattttagctaaccaagcaaataaactmttagaaccttttttaactacccaagtggcaacattgaatgcagagtccgtacttagtggactcaaatcaataaattcagcctgatcaaactttrtgttctttccaccattatcccacacccttaatatccattcccatgcctgttctgcagatttatttatatgaattagaaaactcaagcagttccttttgagtgtagtgcatactctcaacctcacctctaggggcctgttgggactttagttataggtctagaagcaaacgggtgttgggggtggctcctgaggaaaatcaacattatcttgcctggcaaccatcaccattgcctcaggcagcacagggtttatctcctcagacaaaggtggaaaggctgatggcagcatgggtcagggaggggatgttgccactaccagggatggggaagctgtttcttctggcaaaaaagattcatcagagtttacaaactcagtgtcctcagcttcatcagggtcctcccacacatcaccattccaagttgcaggtcctattcttttccaatcaatgcccttacttttgcaatagatacctagcgtggctgtgcattcaccttttgttgcatgtcagccactctcatggtaagagcttgtgtctgtttttccacaattttcgctctttctctacaggagataagactcactcagggcaatcttagcagatttgaatctcagtatctgcttctgaagctgggagagagaatccctgagttcattttctctttttttttgacggagtctcgctcggccgccaggctggagtgcagcggtgcaatctcggctcactgcaacctctgcctccagggttcaagtgattcccctgcctcagcctcttgagtagctgggactacagggcgcaccaccacacccatctaattttttttktgtgtgtgtattttagtagacgggatttcaccatgttggccaggatggtcttgatctcctgacctcgtgatccgcccgccttggcctctcaaagtgctgggattataggcataagccaccgtgcccagcctagttcatcattttctttcaccactttgtccactgaatgtaggagcaaccaaccagcttcattatgttccttggttctccacatatggtcaaaggtatatatagggttactaaactccttgcctgtcatgagcaatgaatcaggagtgtcaaatgcgtttattttgcataactatctaaacagttcatgccaaggactatcagtgtttttcatactattagaagtagagtccttggcatttttgggtctaatcatagcaagcagctaactccagaaactccaaaaccaatgaaagaccttcatacttaatattctcttcctctagaacaactcctggtaccaaaatctgtattacggttctctagagggacagaactctaatggaatatgtgtatttgtgtgtgtgtacacatatatatgtatagaggggtttattaagtcttaactcacatcatcacgaggtcccacaacaggctgtctgcatgctgaggggcaaggagagccagtccaaattgcaaaactgaagagtctgatgtttgagggcaggaagcatccagcacgggagaaagatgtaggctgggaggctaggccagtctttttcacatttttctgcctgcttatattctagtcatgctggcagctgattagattgtgccccacccagattaaaggtgtgtctgcctttcccagcccactgactcaaatgttagcctcctttggcaacacactcactgatacactcaggatcaatactttgtatccttcaatccaatcgttgacacctggtattaaccatcacatggctaatatgccctgttcagagcctatttcaacagcctctaggctgtagttttccttcatctctaaagggacacagtatgcctctaccaggttatccatggggtaccgtagcagccttgtcatcacatagtctttgtaggcaagatctcaactgcgtccaaatttctctaagaggacaactatcatattacattgatgacatcttctgagaagatacttttgacacactaattcaggacatacaagtactgaaaaaggagcacacaaaaagtggtctccacacgttgtgtgaggggtcttgccacctctgttaaattcctgaaagttatttggtaatctgagggccatttcatccctgacaccatcaagaaacagctattgactttctcagtacacacaatgttaatacaaatatctttcagtcctctttgagatctagaggtgacatattcctcatttacaagttttacttaatttcactgatgctgttacttgcaagttggcccaccttggatggattcccttcaacaaaaggctttagaatctgtccacattgcaatatgacaggaatcccatgagtctcctcaaagactcctttaccataggggctttagcagccttctctcataactcatgrtggccacaaattgcccatgagcccctgacgcaagaaactgccctctttgacattgcactgtacatcattagagcagcaactgttggtyacatactggggtctcttggaaatagaggcttttacaggtcctgagcttgtgaccctccataccagctgcccattgttccttgggtcacagaagcagggcgctgcaagtttggcacagctaccaaaacctccttgatgtaggatggagccacacccgagccctctggcatactccatctgtgggaggggtggctttctttgttctcagtttcttggcaartaccatggtactggaggaggtccttggctacctgaggatccctgtgagattaactgaacagaaataggagtttctagactatacatgctggagctcggtggaatgttgctgctttccatcctttattcaggatgctcctgaccaagggtcagcaccagtggccactttcaggcagtcgtcctagcactggatgtcctaaacctggccaaaaaatgatactctcactacatttttaggccattgcctaagagttgccccctttggggtaaagatctctgggaatctcttgcctcacagatacccagaataaaaatcaaagtaacaggtgtcaaggccacaatacaggacctcacctgaacacacctttctgaccagacattactgatagtgaccaaggcacttcgcagaatacacagtggtgagcttttggaaaaggcattcaatgaaagttctacctcccatctaggccccaagcagctggtttagttgggagttctctgatttaagttacaaaggagcaaatggataccccgccgtgtatcactattgctacagacattgactgaatttatgtcccctaggtatagcacttcatatgccagtgccacacaggttcccagactgtcttcattggccataaagggggacacctctaaagtttatgtttttgatgaccatcttgccatattgcccctttctgatgccccttttgatgaccatcttgccatattgccccttatctatcaagattgataagcactcaatcttgaagtgcttatccacctcttgtctgccctgctcagaccatcatactctgtttctggcatgaagcctggcacacaattgtcccataataacatatctattagatggatggatggcgattcccagggctcttctatgcatcttcaaaaactaccctatggaccttctgttctctcttacagcaattctctcaaaacattattcacaactctcttatacattctcaagacttaaagcttgtgattctcaaattttatcactytctcacttgtcccgtttgctctagactcctacagtatttyacctacttacgttaaattcttcttgggttttaattctaactttctcaatacagcaaaagctaaaaagtaaaattatatctcacaaatttaaaattttcacttcatatttttaattcatcacttgacatttttaattcattaggtctactataactgacaaaaatgaaaccactttaaatcttctagctctctcaaaaattttttttttgagatggggtcttgctgtgctgcccaggctggtcctggactcctgggctcaaatgtttcttctgcctcagtctcctgagtggctgggattacaagtgtgagccaccatacattatcacactcttactgttgttttgcagttcttgtttcacttttataaagtgtcttcaaaataccttcttattcttactttctactgacatcacccacaagcagatccatatatttgttatgatcttgctctgattaatctaattcatgatagaattagacttaaaatgtaaaacttcaaacttctgatttaccttgttactagcctggcaggataaatctatgatttctctcctcttacctaacacctaaaatgtaagttttttttttttttttgagatggagtcttgctctgttgcccaggccagattgcactggtgcgatcttggctcactagaagctccacctcccaggttcaggcatttcttctgcctcagcctcccaagcagctgggactacaggtgcccgccaccacacccagctaagttttgtatttttagtagaaacggagttttaccatattggccaggctggtctcgaacacctgaccttgtgatccgcctatcttggcctcccaaagtgctgggattacagcgtgagccactgtgcctggcctaaaatgttagttctttaacaagcctcacgtgtggccacatttagcctgaccaaatttatttttctctgttgccccaaaccctgcctaactccatttggtaaagtcacctagatgtctttcaaacatgtagtgctccttatcttgtttgcccttttcattctagtgtgtatctttcctgtccagatggttaaatgaatgaataagtgaaaagtggttaaagcagtaccttgcatatataataaagtcttattgctgttgttcttgttacatacattttaggttacagctgaagtttgctatttttttgtgtgaaatatccattagctgcattattcatgtacacaaaatgactgtatgttaatctaatattagactatctaatacctgattatctgatacctgaccagattaagttcttgactagtttttttttccacttaaatttttctacccccagagagaaagatccctctttyactcttccttcctttactaggtaagatgcagtagatatttctttgttgattgtatggcctgggttgtgagtactcttttacatttattcacacagaaaaccaaggaactctttttaagtagayatgctaaggtgaatatattcagcttgattattgggtgtaaattggcaagaagtttaaggtttgtgttttgaaatagccttccaagaaattgtgatgcatgcaacttactagtatgtgtccactgatttactactcattcagataatttaaaagaaatcggagatagagcaacactgctaggaccttagggtgcatttgtggcaaaaraacaaaaccagcatgaaaatattttaaagttaaacagttagaaagaaatatttgttatagagcagtgmcatacaaagtgataaagttaatatcaccaccttttaactgtaaagatttatgaagattttttgggatattatgggataatagctatttcttgaaggcatccagctgctgagtaggctaacattgaaaggcccagtacccaagtggatgcttataacgcaggtctgtggttggggatgagcaattatggaggaaagatggtttggattgtggacagcagaggatggtgactgtggtaataaggagtgacagttgccaatagcaaatagaatccatttgtcagatctggtctgtgagtgtcgactttatctgttttgtttcttagtcctttgggacactaggctcagggatgtggtaggtttttgaccatagtattgttaatattgtgttgaatctgggtaagaacagggtgatagttgtcagaggaagcttcataataaaaagatatggttgattatcatgattcatggtattcatgttctggaaagttaccacaagcactgaattaatgaatattgaatcattgctcccagatgaaatacagggttagttcctgccagcctctgcccacatttttgttagctaatccatacataatcctttttaatatgggtttatttttaaaaatatacccatatatatagctgatttattaatattgaatttatggccaatggcactacatctcatgaataaagctaatttaacacacatatattctccacaggcacatcacagcyttcttgcacttaggaacacgagagacagtacttcagtcctacactagcggactattttaaacagtgaaatcaccagcaaaacccacaaaactgaaaaatgtggcactaacagtaccagggacgggcacttgtttatagtatgagaactgaaacaagaagctagagcatggccttgttcagtttcacctgggaatatgtgtgctgggtgactgaagtttttaagtgctcagtgcatgttcttgacaatgaaagcaccaagagtcttgattttgggtttacaaataagttttaatgagtagatgaatttgttgtcacaaaatccatgaataatgaggattaactgtatgaagatcagtaaagattctaagattaggttgaaaactatggtctttaaagctcacactggaaagagaaaccagacatgctgaaataaataaatggttaaaaaattatatatgtatattcatatatgtaatatayacacacrtatatattatatattatatgtatatgaaaagtaaaggatgactttatatatacaaaaatagggttgtgtgaggtacaagactgtttatgaaataaattgataaatagggaaattttatgatttgatggctatgacagsttcattaatgacaactgtggtaraagaaaatgaagatacaacagcagaataaaactacatacctgatcttgtttccatagcctacatgtatgctttctctggacattggcttttggtgtgaatcagctagagtaagaattactgtctgggcaataggagttttcttttgcacatggaaaattattgctgtctgaaattgtaatttggtgttgatgagtggaagagaaaagaagagccaggcaaagtggctcatgcctgtaatcccagcactttggaaggctgaagtgggcagatcacttgaaatcaggagtttgagaccagcctggccaatatggtgaaatcccatctctactaaaaatacaaataccacttgctagtatgtgtccactgatttactactcattcagataatttaaaagaaatcagagatagagcaacacctgctaggaccttagggtgcggtggctcatgcctgtaatctctgcactttgagaggctgaggtggkwggtttacctgaggtcaggagttcgagaccagcctggcaaagatggcgaaaccctgtctctactaaaaatacaaaaatcagccaggcacggtggcgggtgcctgtaatcccagctacttgagaggatgaggcaggagaatcacttgaacctgggaggtggaggttgcaatgagccaagattgtgccattgcaatccagcctgggcaaagagctacattctgtctcaaaaaacaaaaaataaaaaaaataaaaacaaagaaaagaattagtgatgcattggaaacatatgtattagtgagtattttacagcaggagataaaaacctacatttgcctcctccaaacttaatttttyctttgcygtcrcccctcaaacactatcacctgattttttttctggcaattttacctactattcaatgctttcgatgattccccttcatgcctctaccattcatcctaaaataccatttgytgtatttgtttattccactttatccagttttgaaggtcacatttctaaagtgccagattactgtgtttttatttgcagattcctctccttttttcatattcagtttgttttgtctaatcctaagggagtgagatgtatgccttcaggattactttcagaccagatgcctgggctatcctagagcatttgcatgttacatcccctttccayatgaaatgtgttaatatttataagatatggtaaactattctcatttctagaattctggaaagttgacctgatggagaagaaccaggaaaaccaagaccagcatttgaggaaagctggttttgtcaacaacaaaatactgatggaagacagaaatagtgttttaggagaaacatttaatataaattcaaaccttgttccaatgagaaaaatacctgataaatatgacttatgtataatgaacgtgaattatatttcagaattaattgttagtaatagaaactcctttggaaggaagcttgatgagctcagtgcacatgcgaaattgctccttcatatgacatgagcatccttatgccagagagaaacattttgagtgtgayagaaatgagaaagccatctgttagaatgaggacttatttcagcatcaggatattcaaactctgaagcaaatttttgaataccttgagtgtgggaaagcttttcatgaggaggcagccttcagtacccataagagagtgtgcttctgggagaaaccttgtgaatataatgaacaactaagagccttttctgacaatccaaacctccttgttcatcagagtactcacagaagggaaaatcactacgagtttaattgctgtgggaggaggtctgttggtgagaaatctctaaataaacaccatggaggaatcatggggaaaaaatactatgagtgtgagaataattttggcaaaagtcactctttattgacactgaaagaactcaaaaaggaaaaacaagctttgaatgtaatgaaggtagggaaatctttaagaaaccaagtctctctcaacagcatacatacgcagaaaagaaaacctttcaaaatagtcattatgggagttctttttggcatatgtcagttctccctaaacatcagcaaacacacgtaggaggaaagttctatgaatgtaatgagtgtgggaaagctctcagccacagttcatctatcatagtacataataggatatacacaggggagaaactttatgaatgtactgaatgtgagaaaaccttcacaaataggtcaggccttacagttcattggcagatacacacagggcaaaaaccctaagaatgtattgaatgtgtcatgcacattcgatacatacaaatgcaaagtgtcattaggttatgtgacttatatctgaagggaagcctttagatataagtcagtccttacagtacatcagtacatcagagaacacacacaggtgataaacccaatgagtgtagtgaatgtgggaaaaaattctgtgagaagtcrtatctccaagtacatcagagaactcacacaggggagaaatcccatgagggtaaagaatgtggaaaaacctttgtttacaattcattcctcatagtacatcaaaggatacacataggtgtaagaccctatkaatgtaacgaatgtgggaaaacattctcacaaaagccagacttcacttatcatcagagaactcatactggagaaaggccctgtgaatgtaatgaatgtgggaagtctttctcagtgaagtcaaaacttattgtgcatcagagaactcacacaggggaaaaaccctatgaatgtaatgaatgtgggaaaaccttttcccagaagtcatctcttacagtacatcagagaacacacacaggggagaaaccatataaatgtaatgcatgtgggaaaagtttttcccagaagttatcccttactgtacatcaaaaaagacataaaaagagaagccatataaatgtattcaatgcagcaaaacatttaaccagaaatcagcacttactaaacatcaaagarctcaggagagaaacttcataaatataatgaatgcagcaaaactttttaccacaagtcatccctcacagtacatcagagaacccacacaggagagaaaccctacaaatgtaatgaatgtgagaagactttctaccagaagtcatcacttatagcacatcagaaaacacacagaaggcagaaatcctgtgaatctacaaatgtggagagmcttttatcagaattcactaatctgagaaagtayagagagaagtccctgttagcatcttctgaaagtccagaaaccttttcttacttaacctactcagtttacattaaaaacagtgaaggggagaaactttgtaagtatgagaaatattttgcccagaaataaagggccatcttagtgagcagcagatatttgatatttgaaacatcttacgaatattttgaataagttgtaactttgaaaatgattcakttttggttatacatgagagattttagctcactggaaatgtcagtttggtaattgagactaaaaacttcctttagaaatattatactaaaattcttgtttctgatataccaaaattttattgaaaatattcagttacagacatactgtgtactaggaatctaacttcaaaaagcacaattaggtcgaatagtcataaatacaccaaatacaaatgcaaagtgtcataatgttgtgtgagtgtgctttatttttattttttatttcattttattttattttctgtgttccgtaaaactttacttactcaagtccaacagagcttaaaggttaaaaaaaaagtacttacaaagacaggcagcgggctggacttggcctacagccactaatttgctgacctctgtgctaaaatcaaggtgctgctaatgcaatcaatactttttaacagcaccttacatgcacgccattatccttcaaaggcagacatttggctgggcgccgtggctcacgcctgtaatcccagcactttgggaggccgaggtgggcagatcacgaggtcaggatatcgagaccattctggttaacacggtgaaaccctgtctctactaaaagtacaaaaaaaattagccaggcgtggtggcgggtccctgtagtcccagctactcaggaggctgaggcaggagaatggcgtgaacctgggaggcggagcttgcagtgagccgagatcgctctgctgcactccagcctgggcgacagagtgagactctgtctcaaaaaaaaaaaaaaaaaaaaggcagacctttatgctacatgctttcattttgatttttcaaatgttcagtttgcarcttacaatacaagcgctgtaagggaataatatcttgtgggactcaatacagaacttcaatgtyaaagcaatttttcattgtgttaaagcacagaagtgtgaataaggccagtataatgggaagaaataattctacccaaatacatcctatagtaataaatctgcaatcaagaaatccacttgggtgttggagtaaatggccttgaacagaaagaactagtatctaggaaatgcataatcatataaataaaaatttcyaaaataaagcaaaaggttacatttctaagccttaaagtatttttctttcttcacacttgaatttttattctaagtgactgaacaaaaaatacaccatcaagatgaaaaggcaattcagaaaagaaatacaagcacctagcaaataagtgtaaatatatgcaatctccaaaaaaagtaaattataaccagaagaaagaatcggttaaaaaaaattagggtgcatataatttgcattcgaagctttcccttacaagcctgaatcctcagtaccagatcttaatcttctatatctcaggtcagcccctccaaatatagctgcctcatcagatatttcagtttagatctggccagatgatcaggctattcccctaactagtgtgggccacaaaagactcaagtgacattgagaaaaatcagagaagatgaaccaggcttggtagctcatgcctgtaattatctggaggctgactggggaggattgctcgagcctgggagttcaaagccatcctgggctcacaaaaaaatggtggggggcaggtgggaattttgatgcttaaattccttggttccttctgtagtggatttcttcttttttttttttattayactttaagttctagggtacatgtgcacaatgtgcaggtttgatgcataggtatacatgtgccatgttggtttgctgcatccatcaactcatcatttacattaggtatttctcctaatgctatccctcccccagccccccatcccctgacaggccctggtgtgtgatgttccccttcctgtgtccaagtgatctcattgttcaattcccacccatgagtgagaacatgtggtgtttgcttttctgtccttgtgatagttttttgagaatgatggtttccagcttcatccatgtccctgcaaaggacatgaactcatcattttttatkgytgcatagtattccatggtgtacatgtgccaaattttcttaatccagtctatcattgatggacatttgggttggttccaagtctttattattgtgaatagtgccacaataaacatatgtgtgcatrtgtctttatagtagcatgatttataatcctttgggtgtatatacccagtaatgggattgctgggtcgtatggtaattctagttcaagatccttgaggaatygccacactgtcttccacaatgtttgaactaatttacactcccaccaacagtgtaaaagtgttcctatttctccacatcctctccagcatctgttgtttcccgactttttaatgattgccattctaactggcaagaatggtatctcattgtggttttgatttgtatttctctgatgaccagtggtgatgagcattttttcatgtgtctgttggctgcatagatgtcttctttttttttttttttttgagacggagtcttgctctgttgcccaggctcgagtgcagtggcgtgatcttggctcactgcaagctctgcctcccgggttcatgccattcttctgccttagcctccggcgcttgccaccatgcccagctaattttttttgttttgtatttttagtagagacagggtttcaccatgttagccaggatggtctcgatctccagacctcgtgatccacccgcctcagcctcccaaagtgctgggatgacagccatgagccaccgcacccagacagatgtcttcttttgagaagtgtctgttcatatcctttgcccactttttgatggggttgtttgttttttttcttgtaaatttgtttgacttctttgtagattctggatattagccctttatcagatgggtagattgcaaaaattttctcccattctgtaggttgcctgttcactctgatggtagtttcttttgctgtgcagaagctctttagtttaattagatcccatttgtcaattttggcttttgttgccattgcttttggtgttttagtcatgaagtccttgcccatgccaatgtcctgaatggtattgcctaggttttcttctagggtattttatggttttaggtctaacatttaagtctttaatccatcttgaattaatttttgtataaggtgtaaggaagggatccagtttcmgctttctacatatggctagccagttttcccagcaccatttattaaatagggaatcctttccccatttcttgtttttgtcaggtttgtcaaagatcagatggttgtagatgtgtggtgttatttctgagggctctgttctgttccattggtctacatatctgttttgataccagtaccatgctgttttggttactgtagccttgtagtatagtttgaagtcaggtagcttgatgcctccagctttgttttttttgcttaggattgtcttggcaatgcgggctcttttttggttctatatgaactttaaagtagttttttctaattctgtgaagaaagtcattggtagcttgatggggatggcattgaatctataaattactttgggcattatggccattttcacaatattgattcttcctatccatgagtatggaatattcttccatttgtttgtgtcctcttattttgttgagcagtggtttgtagttctccttgaaggggtccttcacatcccttgtaagttggattcctaggtattttattgtctttgtagcaattgtgaataggagttcactcataatttggctctctgtttgtctgttattggtgtataggaatgcttgtgatttttgcacattgattttgtgtcctgagactttgctgaagttgcttatcagcttaaggaaattttgggctgagatgatggggttttctaaatatacaatcatgtcatctgcaaacagggacaatttgatttcctcttatcctaattgaataccctttttttctttctcttgcctgattgccctggccagaacttccaacactatgttgaacaggagtggtgagagaggacatccctgtcttgtgctggttttcaaagggaatgcttccactttttgcccattaagtatgatattggctgtgggtttgtcataaatagctcttatcattttgagatatgctccatcaacacctagtttattgagagtttttagcatgaagggctgttgaattttgtcaraggccttttctgcatctattgagataatcatgtggttttttgttgttggttctgtttatgtgatggattatgtttattgatttgcatacgttgaaccagccttgcatcccagggataaagcccacttgatcgtggtggataagctttttgatgtgctactggattcagtttgccagtattttattgaggatttttgcattgatgttcatcagggatattggtctaaaattctctttttttgttgtgtctctgccaggctttggtatcaggatgatgctggcctcataaaatgagttagggaggattccctctttttctattgattggaatagtttcagaaggaatggtaccagctcgtctttctagctgtggtagaattcagctgtgaatccgtctggtcctggactttttttggttggtaggytattaattattgcctcaatttgagagcctgttattggtctattcagagattcaacttcttcccggtttagtcttgggagagtgtatgtgtccaggaatttatccatttcttctagattttctagtttatttgcatagaggtgtttatagtattctctggtggtagtttgtatttctgttagatcagtggtgatatcccctttatcattttttattgtgtctatttgattcttttctcttttcttctttattagtcttgctagtggtctatcgattttgttgctcttttaaaaaaaccagctcctggattcattgatttttttgaagggtatttttgtatctctatatttttcagttctgctctgatcttagttatttcttgccttctgctaccttttgaatttgtttgctcttgcttctctgattgttttaattgcgatgttagggtgttgattttagatctttcctgctttctcttgtgggcatttagtgctgtaaatttccctctacacactgctttaaatgtgtcctagagattctggtatgttgtgtctttgttctcattggtttcaaagaacatctttatttctgccttcatttcgttatttacccagtagtcattccagggcaagttgtttagtttccatgtagttgtgtggttttgagtgagtttcttaatcctgagttctaatttgattgcactgtgatctgagacacagtttgttgtgatttcttttacatttgctgaggagtgctgtacttccaattatgtggtcactttyagaataagtgctatgtggtgctgagaagaatgtatattctgctgctttgggctggagagttctgtagatgtctattaggtctgcttgttgcagagctgagttcaggtcctggatatccttgttaaccttttgtcttgttgatctgtctaatattgacagaggggtgttaaagtctcccattattattgtgtgggagtctaagtctctttgtaggtctctaaggacttgctttatgaatgtggatgctcctgtattgggtgcacatatatttaggatagttagcttttcttgtttaattgatccctttaccattatgtaatggggttctttgtctcttttgatctttgttggtttaaagtctgttttatcagagactaggattgtaacccctgcctttttttgttttccatttgcttggtagatctcctccatccctttattttgagcctatatgtgtctctgcacatgagatgggtctcctgaatacagcacactgatgggtcttgactctttatccaatttgccagtctgtgtcttttaattggagcatttagcccatttacatctaaggttaatattgttatgtgtgaatttgatcctgtcattatgatgttagctggttattttgcccattaattgatgtagtttcttcatagcatcgatggtctttacaatttggcatgtttttgcagtggctggtactggttgtttctttctatgtttagtgcttccttcaggagcatttgtaaggcaggcctggtggtgacaaaatctctcagcatttgcttgtctgtaaaggattttatttctccttcacttatgaagcttagatggatatgaaattctgggttgaaaattcttttctttaagaatgttgaatattggcccccactctcttctggcttgcagggtttctgccgagaggtctgttctctgatgggcttccctttgtgggtaactygacctttctctctggctgccttaacatcttttcgtttgtttcaaycttggtgaatctgacaattatgtgtcttggggttgctcttctcgcrgagtatctttgtggtgttctctttatttcctgaatttgaatgttggtctgccttgctaggttggggaagttctcctggataatatcctgaatagtgttttccaacttggttccattctccttgtcactttcatgtacaccaatcagatgtagatttggtcttttcacatagtcccatatttcttggaggctttgttcgtttctttttagtcttttttctctaaccttgtcttcttgctttatttcattaatttgatcttcaatcattgataccctttctcccacttgattgaattggctattgaagcttgtgcatgcgtcacgaagttctcgtgccatggttttcaactccatcaggttatttaaggtcttctctacactgtttattctagttagccatttgtctaatttttttttaacgtttttagcttccttgcgatgggtttgaacatcctcctttagctccgagaagtttgttattaccgaccttctgaagcctacttctgtcaactcgtcaaagtcattctccatccagcttttttccattgctggcgaggagccacaatcctttggaggagaagaagcactctgatttttagaatttttagcttttctgttctagtttctctgcatctttgtggttttatctacctttgatctttgatgatggtgacctacagatggggttttggtgtagatgacctttttgttgatgttgatgctattcctttctgtttgttagttttccttctaacaatcaggtccctcagctgcaggtctgttggtgtttgctggagttccactccagaccctgtttgcctaggtatcaccagtggaggctgcagaacagcaaatattgcagaacagcaaatattgttgcctgatccttcctctggaagctttgtcccagaggggcagccacctatacgaagtgtctgttggcccctactgtgaggtgtctcccagttaggctacatgggggtgagggacccacttgaggaggcagtctgtccgttctcagaactcaaacactgtgctgggagaaccactgctctcttcacagctgtcagacagggacgtttaagtctgcagaagtttctgctgccttttgtkcagctacgccttgcgcacagagatggagcctagaggcaataggccttgttgagctgtggtgggctgtgcccggtttgagcttccgggccactttgtttaccwactcaagcctcagcaatggcagacgcccctcccccagccaggctgctgcctcacagatcaatctcagactgctgccttagcagtgagcaaggctctgtgggcgtgggacctgccaaaccaggcacgggagacaatcaccatatctgccggttgctaagaccttgggaaaagtgcagtatttaggtgagagtgccccatttttccaggtagtctgtcacagcttcctttggctaggaaagggaaatcccctgaccccttttgcttcccgggtgaggcaacaccctgccctgctttagctcaccctctgtggactgcacccactgtccaaccagtcccaatgagatgaaccaggtacctcagttggaaatgcagaaatcacccgtcttctgcgttgatcatgctgggagctgcagaccagaactgttcctattcggccatcttgcaatgccctctgcgagtgtgctttataagagaaagattatatgtgttgattttgtcacaggaactcatcataatcttatgtaaatgtgcccttaatttaataattttaatgatgtgtttaaaatttcccacacttaatgtttttctttttatagctataagaaaaaatgtatattttaaataaaatatttgtagagagtaaattgatgtgttgaaatcttgttacattctactcatacataaataartgttagcatttgatatggtttggctctgtgtgcccacacaaatctcatgttgaattgtaatccccatgtgtcaggggaggggccgggtgggaggtgattagatcatgggggtggagttcctccttgccgttcttgtgatagtgagttctcatgagatctgatagtttaaaagtgtagcacttaccccttttctctgtctctcctgctctgccatggtaagatgtgccttgcttccccttcactttcagccatgattgtaagtttccttaggcatcctcagccatgtgggacaggactgtgcgtcaattaaacctcttttctttataaattacccagtctcatatagttctttataccagcgtgataatggactaatacaccattattactaaactacttacccggtaaggaatccagagaggccagacatggtggctcatgcctgtattcccagcaccttgggagacgaaggcaccaaggcaggaggattgcttgagcccaggattttgagaccagcctaggcaacatgatgagaccctgtctctatattaaaaagktattattaaaaaagaatccacatagtgtgactgtaaactcagagtcagccaaatggaataataaactatgcaacagttaaatacaaaattatttaaaggatttttgcttccacctataaaaggaatttttgcttccacccattctccagtatttgtggtcttaaacaactggcaaactggccaagatagatgaaataactagaaaactggaaaaatgtatgaaacaactgttttaagacttggatattaggaattgcacaaccatgattcttgaaagaaaggaagcaaatatggccagtcttatgattggcacagcttcttgtcagaaggaaattcctagactatggcatagatagagataactccaaacatattcttattctwtgaagcataaatatttcagagttcaagaagtttaaggcagctgtagtatgtggactagcatactggaaagggagctagcagagacaatttgagaaatctgagtaccaatctgcatatgcaacgggtcatgttctttaaggcttggcaaagaacagctgctgccaaaggagcaattattggggaactcaaagacaaacacttcccagatctcatacagagttgggaataattcaagctcccaccagccaagactctttctccttcagttcctgagatgacagtctctttctccattagtatggatttttgaagatcccatggatatattgggagtgggcaaggattgggcatgtttgagatgctgtattgrtctgcttgggctgccataacaaaataccacagacttggtggcataaacaacagacatttatttttgcataattctgtaggcttgaagtccatcatcaaggtgctggcaaattctctttctggtaagtgcttcctggcttctggattgctgccttctcactatatcctcacatggcacttcctcatggcttgcagggtgggggatggggagakagagcatgtgctctagtatctcttatttgaaagacatattctattagatcagggcccactcctactaccttattgaaccttccctgctgccaaagaggccctatctcaaaataaagccacactggggcttatcgcttcaatatatgaattttggggggacacaaacatttcatttattatattctgctcctagcccctcaaagttcatgtccttgcatttgaaatacatgcattccatcccaacaatcccaaaagtgttactcattccagcattaattctgtagatctgaagtccaaagtgtcatctaaatattatctaaatcatgaaagggtgaccattgaggtatgattcattctgaggcaaagttcctttccaggtatgaaacaagtgaaaccagacaaagtatgggcttccaaaatgtagtggttgtatatgcataggatagacattcctgttccacaaggaagaaatctgaaagaaaggagtgacggtcccaagccagtccaaaaccagcaaaacaaattccattagatctaaggcttgagaatgacctctttattggccaagcatggtggctcatgcttgtaatcccagcactttgggaggccaaagcgggtggatcacttgaggtcaggagttcaagaccagcctgaaacatggtgaaaccccttctctactaagattataaaattagctgggcgtggtggcacatgcctgtaatcccagctacttgggaagctgaggcaggagaattgcttgaatccgggagatggaggttgcagtgagccaagatcatgccattgcactctagcctggacaacaatagcaaaactctgtctcaagggaaaaaacaaaacaaaacacctctttggctcaatgcccttcctgcctggggtggtggcctcaacccccatggccctaggtggttgttccaccacatactctgtcgggtggacctgcccacaaggccctaggcagggttarcctggcctgtttaaactgaagaaatggtggctttattctttgaaaccaaggagggagcctttatgatctttggggtcattcttccctttcaaagaatagtgcatctcccaaccaaatagctctgttgtcccatcctgcaaaatccaagaagcccagcagtcttcccttttccatcaccttcagttcaatttgacagtatttctacttatataatcccttaatctctctgttgagcggcaatccagtcacatcctcagtgttttcttcagaacatgcttctcttttgcagtgtggataggctcagaattttacaaatctttaagttcttgttcgcttttgccaatcatttcttcaattctctgtcttctcagattttactgtaagcaatcagaaagacccaggccacaccttccttgttttgcttagaaatctcaactaaatatctggttttatcacttgcaaattctactttccacaaaactagaacacaactcagccagctttgccaccttataacaaggattgcctttcctccagtttccagtaacacggtcctcatttctgtttmggcctcaccagaatggcctttcacatccacatatctatgaacattgtgttcatgttgacatatgtattctgggacaatagaggctctctctgtttctcttactttctttttgagctctcaccagaatttcctttaatcttagtattttcaccaacagtcccttaaggcaatctaggctttttctagcatgtactttaaagctcttttggcctcttcccatcacccagtcccaaagccacttgcacatttttaggtattatagcagcaccccactttatggtgccaaaatctgcatcagtatgcttgtgctgccttaagatactacagaaggggccaggtgcagtggctcatgcctgtaatcctagcactttgggaggccaaagccagcagatcactcgagctcaggagttcgagaccagcctgggcaacatggcaaaaccctgtctctactaaaaatacaaaaattagctgggcatggtggtgggcaccggcagtcccagctactcaggaggctgaggtgggaggatcgcttgaacacaggaggcagaggttgtagtgagccaagatagcaccactgcactccagcctgggtgacagagtgataatctgtctgtaaaataaaataaaataaaatacaattctacggaagagattgcttaactaacagaaacttattctctcacagttctgaaggctagaagtcccagactgagttcctggaagattaastttcttgtgagtgctctctttgttcctggcttacagatggccaccttcttgctatgtcctcacatagccagccagccagccttccttccttcctttcttccttccttcctcttccttcttcttccttccttcttcttcttttctttttccttccttcgttcctttgttgtggaaagtcagggaccctgaacggagggactggctggagctgtggcaaaggaacataaattgtgaagatttcattttaatatggacatatatcagttcccaaataatacttttataatttcttacacctgtctttacttcaatctctgaacataaattgagaagatttcattttaatatggacatttatcaattccccaataatacttttataatttcttatgcctgtctttaatctcttaatcctgttatcttcrtaagctgagaacatacgtcacctcaggactattgtgataattttgttaactgtacaaattgattgtaaaacgtgtgtttgaacaatatgaaatcagtgcaccttgaagaaaacagaataacagtgattttcagggaacaagggaagacaaccataaggtctgactgcctgtggggtcaggcaaaatagagccatatttttcatcttgcagagagcctataaaaggatgtgcaagtagggaagatatcactaaattattttcctagcaagaaatattaataaataataccctggggaaggaatgccttccttgcgggaggactataagtggccgctcttggagtgtctgtcttaggcagtctctgagataaggactgaaatacgccctggtctcctgcagtaccctcaggcttactaggattgggaaactccaccatggtaaatttgtggtcagactggttctctgctcttgaaccctgttttcttttgtttaagatgtttatcaagacaatatgtgcacagctgaacatagatccttatcagtagttctgattttgcccttgtcctgtttcctcaaaagcatgygatctttattctgccttttgtcctttgaagcatgtgatctttgtgacctactccctattcgtacaccccctccccttttgaaatccttaataaaaacttgstggttttgtggctcaagtggacatcacagtcctatcgatatgtgatatcacccccagaggcccagctgtaaaattcctctctttgtactctttcctttatttctcagccagccatcacttatggaaaatagaaagaatctacattgaaatattgrgggctgtttcccccgatatttttccttccttctttcttttctttcycttttttctctctctttcttctttctttctctctccttcctttccttcccctccttctcttctcttctctttctttttttcagagtcttgctctgtctcacaggctggagtgtagtggtgccatcttggctcaccacaacttccacctcccaggttcaagcaattctcctgcctcagccttctgagtagctgggattacaggcgtgagccatcatgcccaactaatttttgtatttttaatatagacagggtttcactgtgttggccaggctggtctggagctcctgacttcaggtgatccacctgcctcagcctcccaaagtgctgggattacatgcatgagcctcctctttgtctctttgccttctttaccttttttccttccttccttccttctttccttccttctctctctttctttcttctttctctctctctctctttctttcttgttttaagacagaatccttggccgggtgcggtggctcatgcctgtaatcccagcactttgggaggctgaggtgggtggatcacgatgtcaggagattgagacnnnnnnnnnnnnnnnnnnnntttgtactctttcctttatttctcagccagccatcacttatggaaaatagaaagaatctacattgaaatattgggggctgtttcccccgatatttttccttccttctttcttttctttctttctcttttttctctctctttcttctttctttctctctccttcccttccttcccctccttctcttctcttctctttctttttttcagagtcttgctctgtctcacaggctggagtgtagtggtgccatcttggctcaccacaacttccacctcccaggttcaagcaattctcctgcctcagccttctgagtagctgggattacaggcgtgagccatcatgcccaactaatttttgtatttttaatatagacagggtttcactgtgttggccaggctggtctggagctcctgacttcaggtgatccacctgcctcagccttccaaagtgctggattttgggtgtgagccactgtgcctggtctcacatagcctttctttggtgcttcagtgcagagagagagagacagagagctccctgatgtctctccctataaggataccaatcctatcagagccggatgccacccttatgacctcattttaccttagttgcatccttaattgaggatgtaatttggaggcagaatctccaaatacagctgtattggggattatgacttcaacataggagacgcaaacattcagtccataacaaaagcttaaaatgagcctttcaggccccaattactcagccttttctcctcccattggagcctctatctcttcatctataagtgggtagaattatctatatctggaagagtggaactaagccttgaacaaaccattattrcttgtctaatgtgtgccccctgcctcgtgctcagtgggtccaggagagggagctcagatgttaagrctgcacaagtacagcttagcgcctgggtgccatcatgttctgtggtctcagagtaacattctgttaaagagaaagggaaattgagagagattaggaaccacactcagtctccgtggagtgttagggccctcatgtcttcctcagcattgatagttcctgggttcatggctgatatggtcaggatgtgtgtcccctccacatttcatgttgaaatatgacctccactgtcagaggtcgggcctagtgaggtactggatcatgggggcggatccctcatgaatggcttagcaccattcccttggtgatgagtgagttcttggtcagttctctggagagctgagtgccggttgttttaaagagtttggcccctccttcctcaggtctctcttcttcctctcttgccatgtgatgcrctggctcaccctttgccttccagcatcattggaagcttcctgaagccctcagcagaagctragcagatgctggcaccatgcttcctgtacagcctgcagaaccatgagccaagtaagcctcttttcataaattaccagcctcagstgttcctttatggcaatgcgataatgggctaacacagtggccctgggctcaggattaacaaggctgtgctagcacyaagcaatcatactggaaggctgargtgggaggatcacttgagctgcggaggtcaaggctgtgatgagtttcctggagtcaaatgattctcatgcctcagcctcttgagtagctgggattataggtctgcaccatcacacccagctaatttttgtatttttagtagagacggggtttcaccatgttggccaggctggtcttgaactcctggcctcaagtgatcctcctgcttcagcctcacaaagtgctgggattactggcacaaaccactgtgcctggcccaagtaattgttttgtattgattgaatttttctttgtttcttacacttcagtttagattttagggtatatgtatacttataaaaaaatgagatcatgtcttaaatattctttcttttttgagacagagtctygctctgttgcccagtgcccaggctggagtgtattggtgtggtctcggttcactgcaacctctgccctctgggttcacgcgattctcctgcctaagcctcccaagtagctgggattacaggtgctcaccaccatgcccggctaatttttgtatttttagtagagttggtagagacagggtttcaccatgttggccatgctggtctcaaactcccgacctcaagwgatccacctggctcagcctcccaaagtgctaggattacaggggtgagccactgtacccagccaatgttcttgtgtaacttgcatttaaaattttgtgatatgctgtgaactctttccatgccccattctatcttgaaaatatgcttaatggccaaatatttttccacttttcaaaactgcatttgggtttacccatatcctatattttgacatttagacaacttctgcttttgctcgtgtaggggattattccattaaaagtagacaagataattttgatcaacctgtgtaataragaaaatggacaaagctgaaaaaaatattttaggctgggtgcagtggctcttgcctgtaatatcagcactttgggaggccgaggcaggcggatcacatgaggtcaggagtttgagaccaggttggccaacatggtgaaaccccatctctaccaaaaatacaaaaaatagccaggctttgtggcacatgcctgtaatcccagctactggggaggctgaggcatgagaatcacttgaacccaggaggtggatgttgcagtgggccaagatgcatcaatgcactacagcctgggtgacagagtgagactctgtctcgaaaaaaataaaaatactttcaacattctttctaagcacataaataataagacagtgatcactggggtatgatgtaaaaagaatgggaattccatgtcagcacaacgtatgaggctgcctttgctctggagactcaggctgacctgagagaggtaataggctgaggtttgcttttaagggtgttgcagggatgatggggcagaaagagacctctgtggcccatggatgagatggaccaggatacctctgccttgaccggacccttggaagattctgtacaggtagcatgaacaaaaagaacatcagccttccttcccacaaattgcagtggacttcaagatgtttggaaagcccagaacattcttmagccctgaaatctccttttatttttattttttttttgagatatggtcttgctctgttgcccaggctggagtgcagtggtgtgatcatggctcactgcattctcaacttcctgggctcaaatgatcctcccaaatagctgggactacaggcatgtgccaccatgcccaggawttttttttttttttttttttttttttgtagagatagggtctgttgtccagttgcccaggctggtctcaaactctttgactcaagcaatcctcctgccttggcctcccaaagtgttgggattataggcatgaggcactgcacctaacacgaaattcctttaaagatatcaaggagtgtgtccccygttagcagcaagaaaaattcctctggaggaggaaacatcatcttaggtctctctctcttcttttttttttttttttgagacggagtctcgctatgtcatccaggctggagagcagtggtgtgatctcggctcactgcaacctcyrcctcccaggttcaagcaattctctgcctcagcctccagagtagctgggattacaggagcccactactatgcttggctaatttatttttatttttatttattcatttatttttgagacagagtcttgctctgtcccccaggctggagtgcagtggcacaatctcggctcactgcaatctctgcctcctgggttcacgccattctcctgcctcagactcccaggtatctgggattacaggtgcccaccaccacgcccggctaattttttgtatttttagtagagacagcgtttcatcgtgttagccaggatggtctcgatctcctgatctcgtgatccacccgccttggcctcccaaagtgctgggattacaggagtgagccaccacacctggcttcttttttttttttttttttagagctagaagagaacatcatacacataaattcattgcattatacaaataaacacctgattgacagatcacatcatgtgaaatttatatagaaaataattgatacaggttataataatttatgcaaagataatattagaaaaattggaaaagattaaattatgcagaattgaaaattcacttaagaataaaagaggcatctgggaggtgaggagtgcctctgcccggccgccccgtctgggaagtgaggagcgcctctgcccagctgccccgtctgggaagtgaggagcgtctctgcccacccgcccatcatctgggaagtgaggagcacctctgcccggctgcccatcatctgggaagtgaggagcacctctgccctgccacccatagtctgggaggtgaggagcgcctctgcctggctgccccgtctggggagtgaggagcgcctctgcccggctgccccgtctggggagtgagaagcgcctctgcctggctgctgtgcaatcttccaagtgtgaagtgacagcctttctgcaggtgtacccaacagctccaaagagacagcgaccatcaagaatgggccatgatgacgatggcggttttgtcgaaaagaaaagggggaaatgtggggaaaagaaagagagatcagattgttactgtgtctgtctagaaagaagtagacataggagactccattttgttctgtactaagagaaattcttctgccttgggatgctgttaatctattaccttacccccaaccccgtgctctctgaaacatgtgctgtgtccactcagggttaaatggattaagggcggtgcaagatgtgctttgttaaacagatgcttgaaggcagcatgctcgttaagagtcatcaccactccctaatctcaagtacccagggacacaaacactgcagaaggccgcagggtcctctgcctaggaaaaccagagacctttgttcacgtgtttatctgctgaccttctctccactattatcctatgaccctgccacatccccctctctgagaaacacccaagaatgatcaataaatactaaaaaaacaaacaaacaaacaaamaaaaagaggcagcagggcactgtggctcactgtaatcccagaactttgggaggctgatgtgggtggattgtctgaggtcaggagttcaagaccagcctggccaacatggtgaaaccccgtctctactaaaaatacaaaaataaactgggcgtggaggcaggcgcctgtaatcccagctactcgggaggctgaggcaggagaatcgcttcaacccaggaggtggaggttgtagtgagatgagatcacgccacttcactccagcctgggcgaaagagcaaaactttgtctcaaaaaatagaataaaataaaacaataaaataaaataaaataaaataggcgtcactgttttgctgcagaaaatcctctttcaaagcaaattcactggtattggtataattctgataagtgtgtttacatttctaaatgttttcaaacattctggtatccaaatgctgtgtcaaaagatgctaaaatgtcttgtgccacccaccttcttactacaatcttacatactttcaytgtgccccataatgatcttcatggatgctatatccatttataattccatgggtgaggccaggcacagtggcactgtaatcccagtgctttgggaggctgaggcaggaggatcactkgagtctaggagtttcagtttgcagtgagatatgatcacgccactgcactgcagcctgggtgacagatccagaccttttctcaaaaaaaaaatccatagttgcattgttcattatttaatcaatctctattttattgtgaagacaggagtggtcaccatagtttccacagcacaaaggacacgttttcctacatgccaagtactctttaagtgttgaggtgaatctgtgaagtagtttaatgattgctgtcccttatttttataaacatttgcataaacagagcttctaaaaattgcaagtaactgaggtttgcttttggagtacaaagagtcatcaatgcttgggtgtttgcaaaaatattacctaggcaggacatccaggttccatctcacagggtagacactaatggaaagagggacttgtaaatcacttaatgagatgggatttaattagagtcaccagttgttacatctagcaatcccacccaccctcccttccaaatctagctattttttcctttgagaattatcactgcagaacttgttcatcaactagtatatatctggttctttcatatttcccattttcctttcatgagaagattcaatgaagatgtgaaagtgtgtctgaagtgggttcccttgaagtttgtttttaattttaattaattaattaattttttttttgatacaaggtcttgctctgttgtccttgaactcctggcttcaagtgattactgctttggcctcccaaagtggtgggattacaaggatgaaccatcatgctcagcctagaagttctgtttttatttattctgcaaaattgttgtgtatcttctccagtctagaaacttcattagcctcaagggaaacaactgaacatgaatttcaattcctgctgcaaagacttttgtattcactaccaggtcccttgtggatttttattagggacagtccctaagtgataattttgccataagaagtgaggycctggctgggcgtggtggctcacacctgtaatcccagcactttaggaggccaaggtgggcagatcacgaggtcaggagatcgagaccaacctggctaacatggtgaaactccgtttctactaaaaaatacaaaaaattagctgggcatggtggcgggtgcctgtagtcccagctactcgggaggctgaggcaggagaatggtgtgaacccaggaggcagagcttgcagggagcagagrtcacaccactgcactccagcctgggcgacagagcgagactccttccccccgcccccccmaaaaaagtgaggtcctccaaataattggcttattattggagttagggctttggaaggaaggatacagatactgaaatcttgaaaacttaggcaaacaccactgaaatggtaggaaaatttgaaaattgaatattggtttctttttgctgcattcagcaaagttctgataatagatttaaactaatactacatctaggcatattggatgcagaggtggaaggaaatcatgcatttctttttttttttgtgagtcagggtcttactctgttgcccgtgctggagtgcagtggygcaatcatagctcactgtagcctcaacctgccaggcctgagcgatcctcccacctcagccttctgagtagctgagactacaggtgagcaccaccacgcctggctaatttatttttatttttgtagagatagggtttcactttgctgcccactttgaagttccaggctctggtgatcctcctgcctcagcctccaaaagtgctggaattacaggcatgagccactgagcctggccccaaagggcttttttttttttttcctcttgagacagagtctcactctgttatccaggttggagtgcagtggcacaatcttggctgactgcaacctctgcctcccaggctcaagcgattctcgtgcctcagcctcctgaggagctgggattacacctggctaatgtttaaaatatttttggccaggcgcagtggctcacatctgtgattccagcactttgggaggccaagacaggtggatcacgaggtcaggagatcaagaccagcttggccaacatggtgaaaccccatgtctactaaaaaaaaaattatctggttgtggtggcacgtgcctgtaatcccagctacttgggaggctgaggcaggagaatcgcttgaactcaggaggtggaggctgcagtgagctgagatcacatcacttcacgccagcttggcgacagagcaagactctgtctcacaaaaaaaaaaaaaaaaaaaaaaaaatttttttaagtagagatggggttttgtcatgttggctaggctggtctcaaactccttgcctcaagtgatccatctgcctcagcttcccaaagtactgggattacaggtgtgagccaccaygcctggctccaaagggcttttaagaagaaactttcctatgcatttatttactagacaaatccattgagcttgtggcacagacgggttgaagtgtgttacctcttcagcagaactggtcctttttttcagttgcatttttatttacttagaarttaaagtcatagagtatgaataaaaatctcctgcctaaaaaawgtttgattaaaaatgtccagtttattatacatatttaaatattatgaatgtggctgttagactgatttttttttctctgcaagtttttatacaggctaaatggatttaaaaagtgtcatgcaagtactaggtattaaaattagctttattgaattaaaatttatgaacaataatatctgccaatgtcattaaatggacaatttaaggaatttttgacaaatatatacatctgtgttaccaccaccgcaaacatatattgcagcggttggcaaacgttttctgtaaagggccacatagtaaatgctttaagttttgcatgacrtccrgtctctgtcacaactactcaactctgcaactgtagtgcaaaatacatatatgaacaaatccttattccaataaaacttacaaaaccaggtggcaggctgaattgggcctgtgcactgtagtttgttgacatgatatagaatctttccatcactgcaaaaatgtccttatgccactttgtaattatttctttttcacayccccacccactggcaacaactggtctgctgcttatcactagttttgtcttttctacagtttcataaaagtagaattgtaatcatgcagtgtgtattcttttttgcctggcttttttacttagcataacagttacaagattcatctgtgtgttctatttatgcacgttacaagattcatctgtgtgttctatttatgcgtgttacaagattcatctgtgtgttctgtttatgcacgttacaagattcatctgtgtgttctattggtgcatgttctattggtgcatgttctgcaatattttaaactctacaatgtaggacatttaggttatctccagttttgggctactatgaggaaaggtgtaatgaacatttatgtataggttttctgtgaacataagtttaatttctctgggaaaaaggcacaagggtacaactgctgggtcatatagtgtttgtttacattttaaagaaactgccaaactaatttcgggagtgggatgccattctacattcctaccattaatttctcaagatgcacttttttcttttcttttcttttctttttttttttttttgagacagagtcttactctgtcacccaggctggagtgcagtggcacgatctcggctgactgtggcctctgccttctgggttcaagtgattctcctgcctcagcctcccgagtagctgggactacaggcatgccccaccacacccggctaatttttgtatttttagtagagacagggtttcactatgttggccaggctggtctcaaactcctgatctcaggtaatctgcctgccttggcctcccaaagtgctaggattacaggggtgagccaccacacctggctgagatccactttttcatatccttgcctgcatttgttatatttactattttatctcttctaatatgtgtgtagtgataactcattctggtttgaatttatatttctctaatggctgtttgacgtcttcttatgtgcttatctgccatttgtatcttcactttagtgaaatgtgtctttgtatcttttgttcattctctaactggattgtttgttttcttactgttgaattttgaaagttcttacttgatacaatcctttgtcagatatggtttataaacattttcttccagtatgtagcttgagacagagtctrgctctgtcacccaggctggagtacagtggcacgatctcggctcactgcaacctctgcctccctgcaacctgcacctcccaagttcaagctagtctcctgcctcagccacccaagtagctgggattacaggcacctgccaccatgtccagstaatttttttttttttttttaagtagaggcggagtttcaccatgttggccaggctggtctcgaactcctgacctcaggtgatccgcctacctcggccttcttttcatcttcttaaagggtcttttacagtgcaaacgttttaaattttgataaaattctattttttccatttattgttttatgcattatgattttaatatgtcaagaactctttgcctagcttatgtactaaagattttctccagtgttttcttcggcaagtggtatagttttaaatttaaaaccaggatccattttgaattaatttttgtattaggtgtgaggtttaggttgaagttttttttttttctgacttatggctatctatttgctccagcactgtttaaaatattgtcctttctccattgaattgcttttgcgcttttatcaaaaactagttttctttacttgtgtgggtctatttctggattctctcttctgttccattaaactgttttatctctgccaattccaaactgtttgattgttttttaactataaggaagtcttaaagtcaggtagaatgatttctttcattgtattctttttcaaaaacattttcagtggttgcagttcctttgccctgccatataaatttcagagtaagcctgcatacatcaacaaaaaaatcttgctgagattttgataggaattatgttaaaactacagatcagtttgaagagaaytgacatctcaaatatcaatgaatatgtatgtctcgacttatttagatcttcttcgatttcttttattagtgttttgtaattttcagcatacaagtcctatacatgttttattagatttatacctaagtaatttttttattgttgagtgattgtaaatggtattcagcctttaacctcagttttcacataatcattgctagcacacagaaatgcagttgatattggtatgctgatcttgtattctgtgatcytgatgaactcatttattctcgtcgtgtgtgtatgcatgtatccctttgaattttctgtgtagataattgtgtcatttgcaaacagtgacagtttttaaaaatctatatgtctttttcctttttattgccttattgcactgactaggacttcgtgtactatgctgaataagagctgtgggagtggaatccctgccttgttcccaatcttatgaagaaagcactgcttttttttttttttttttttttaccattaagtatgatagtaactgtacatatttttaggtgctctgtgtaaagctgaggaggtttctctcttttcctagcttggtgaggttactatgaatgggtgttgaattttgtcacattttttcctacattatttgatatgtgcttttgcttcattggcctattaatatggtggattaatatattgaactattcttgccttcgtggaataagcctcacttagttgtagtgcatgattctgttgatatatttttgggttcartttgctaatttttttttttttgagatggagttttgctcttgttgcccaggctggagtgcaatgttgcgatctcggctcactgcaacctccacgtcccacgttcaagcgattctcctgcctcagcctcccgagtagctggaattacaggcatgtgccaccatgcctggttaattctgtatttttaaaagagatggggtttctccatgttggccaggctggtctcgagctcctgacctcaggtgatccacccacctcggcctcccaaagtgctgggattacaggcatgagccaccatgcccagcctcaatttgctaatgttttttgaggactttgtgtatgcaggatatgaagggtattgatctgtatcctgtatccttcaatattaaggatattgggctgggtatggtatgtaatgtaatgtaatgaaaactgtaatcccagttttcttagtactactgtctgacaactttggtattaggaaaatattggcatcataaaatgaatttgtacttctctgatgattaatgatattgaccatcctttcaggtgcttactgaccatttgcatatgttccttcataaaatgcccattcttttgtctagttttttttctttttctttttctttttttttttttttaggcagaattttgctcttgttgtccaggctggagggcagtggtgcgatcttggctcactgcaacctctgcctcctgggttcaagtgattctcctgcctcagcctcctgagtagctgagattgcagacgaccgccaccacacccagcttttttttttttttttttttttttttttttttttttttttttttgtatttttagtagagacggggtttcaccatgttgatcaggctggtctcaaactcttgacctcaggtgatccgcccacctcagcctcccacagtactgggattacaggcgtgagataccgtgcctggccttttgtccagttttgaatgtttttctgaattactgggttgtaagagtctttaatatattctgtatataagtccttcttcatcacatatttgtcctataaatatttccccccactccataactttcgtttcttgatatgaagtttcaaacaacataagttttaaaactgatgaaacccaacttaattttttcttctaagatttacgtttttcatgtcctctttaatgaagattttcttctaggcactttatggttttcatgcttatattactcatttttcccctatacaaagattcaattgttacagaactgtgttgaaaactctatcttttccctttatctttgcatctttgttgaaaaccacttgaaaatatatgggtgagtccaattctgtttacctgtatgtgtagcctagatccagtaccatactatcttgatcactatatctttagttttgaaaaaagtctgtaatcccagcactttgggaggctgrggcaggtggatcacctgaggtcaggagttcaagatcagcctggtcaacatggtgaaacctcgtctctactaaaaatacaaaaaaaaattagctggatgtggtggcacacgcccgtaatcccagctacttgggaggctgagggaggagaatcacttgaacccgggaggcagaggttgcagtgagccgagatcgtgccactgcactccagcctgggtgacagagggagactccatctcaaagaagaagaaaaaaatcttaaaaaattgttttgactttgtaggtccttgaggtttataactcatgcatacagtgtatctatttatttttaggacttatttactttyttctagcattagtacatgttttgtagctttagtacaggtctagtaactttgtccctacatttcataattttgatgccgttttcatactttcaactttttaaaaatattgagcttgtatcctgtgaccttgctaaacatacttactagttttaaaaacattttcagacactttatgcttttccatatagacaatcatgtcacagcagtctcatgccttctttcacattctgtatcccttttctttgagacagggtctcactctgtcgcccaggctggagtgcagtggtgcgatcacagctccctgcagccttgatctcctgggcctccagtgatcctcctgttcagcctcctgagtaggtggcactacaggcacatgccactatgcctggctaatttttatttaagttttggtagaaatgaggtctcactatattgtccaggttagtcttgaactcctaagctcaagcaatcttcccaccttggcctcccaaaaatgccaggattttaggcatgagctaccacacccagcctcttttttattggcttattgtactggctaggacatccactacaaggttgactggaagtggtgactagacatctttctcttgtttccaatcttaggagaaaagtgctttttacttcaccagtaagtacgatgtcagatgtaggttctcccatagatgctctttcttagattcttgaaactcaatttaattcctaatcaactgagcggttttatcatgaatgggtgttaaattttttcaaatgttttcctacattaaaaaaattatgtggtttttctttttaatattaatatgaaacattgctttttgaatgttaaagcttgcatttctaggataaaccctacttggccatatgtgtttccttttatagattgctgtgttcaacttggtattttaaaaaggatttttacatctatattaagagatattgatctatgagtttttcctatgatgtcctttttggctttggtatctgggyaatgttggtctcatgacttttctttgggggaaggttatcagctaaaaattcaatttaataggactattcaagttctctcaagtgggctttggttctatagtccttaggataaaattttccaattcatttaagttgctgaatttattggaattaagttactaataaaattcctgtattaccttcttggtgtataggacctatagtgatatttactctttcattcctgatacaggaatcctttcaaccctttcaaagagttaggttttggttccattaaattttctctattgtttgtccacttgtgatttttgtgacttttagctctgtatcatctcctgttctacttgctttggatgatttctgttctttttctcatttcgtaaggtggaagtttagactatcgaattgaaatctttwtctctgatttcacctctaagcactgctttagctacatttcacaaattctgacatattcattcagttcaaaatattttcaaatttttcttactttctctttattgctcatttaggagtatgttgtttaatttccaaatactaagagattgttcagacatctttgttattggtctcttacttaattctgtcctggtgagagaatataccttgtatggttttcattctttaaaaaattttaagactgttttattacagtccatagtaggcacacttgaaaagaatgtatacaggttgggcacagtggctcacatatgtaatcccagtgctttgggaggtcctggagggaggattgcttgagcctgtgagttcgagaccagcctaggcaacagagctagactccatccctacaaaaataaaaaatagctgggtgtggtggcacatgcctatagtcctagctactctggaggctgagacaggaggattgattgaacccaggaattcaaggttgcaattaactcattgcaccactgcacttcagcctgggtgaaagagtgacacactgtccctaaaaaataaaaatatattaatatatcatgctaatgagtgttctacaaatgccaattagtcaagttagttgatagtgctgttcaaggcttatacctcctaagtgacttgtgctatcaattacttatttaactatctaattataattgaaattgtgcctctttcaattttgccagtttttatttcatgaattttgaagctctgtttatgtgtacttaagctagaaagtagctttgctgtaggattcccgaattcccataatacagaggtctttcccttggggccattcaacttctgcagagaagaaacttcccatttcttgctggacgttaaacctctggtcagccacgtacaggagttggggagcagtgtgtgtttatgtaatgaggaggtatgttccatatacaaatggccattagtttcattgctttctcttcacatctcactcccatcttccaaggtactaagcatttctgagcctggtgccaaattggttccttcttttccttatccccatatgcaagcagcataactgtgcctgcttctgctctactggctatctttccatctttcaaattttcatttgctgatagtctttctcctattctccttattgctgtagtttgataaattaaattttcctcgcatcttaatgttgtccaatgtgatgagacatgtttaacaaaagtgcattctcgaatactttctgtgctagccatttttagcttatcaagccccaacatgatttctgcagcctctaagctgccccctgctccttatgtattcatttttccagctctgcctctggaacctatttgttattatcacctgctctcaggtacccctcctgagtagctgggtctgcaggtctgtgccagcacaccagctaatttttgcacttttttatagagacaagattttgccatgttgcccaggctggtcacgaactcctaggctcaagtgatgcaccctcttcagcctcccaaagtgccaggcatgttactttggacccttcctcacattcactctggaagtatcccaataaactagctgtactcaccaaaaaggactacttatgttcctgaatagttgcctgggaggggctgttcaacttcctatcaaaatggtatatgggaatgtactacatgagtaactctcttccagctttttgttgtgtggctacaaactattatatctttttgcaataaacacaataatttccatgtccattgtatttccaactgccctcttggcctaaaatggacgcagtgtacaatcatagtttagagggggctaatcaggactggaaagaagtatgaaaaacacaaggcacaaaatttgaagagaaaccagagtttcaatttmtcagagaatgtgaacaaagggaaacatgccctgcttgagaataaatataaagttcttgccgttaaaatgctgggtagaacawgtagttgaattgtaaagtacagacacttttactctacccatctgagaaacaagaacaatccattcattgtacagcataacaaagtgcttgatacttaaatattttgaatgagtgatttttcagtgagggaacatatctaaataacccttacatctctctcctttgtagaatataaagtaagagtgatactaaatatttaacagtttttacagtatgagcgctgtgaagacctgaatgggctaatgtcagttagcgaggatctttcttgtgaacccgctggtggmtgtgaaggttggagctctggctgaagcccttcccacacttgctgcactcatagggcttctctccagtatgtactctctggtggatgaggagtttggaactctggctaaatcccttcccacacttgccacagtgatagggcttctctccagtgtggactctgagatggatgcgaagatccgagctctggctgaaacccttcccacactcatagcattggtaaggcttctctcctgtgtggatgcaccggtgaatgtgaaggttcgagctctgactgaagcccttcccacactcaccwcacttgtagggcctctctcctgtgtgtactcgctggtggatgtgcaggtttgagcgctgactgaagctcataccacactcctcacactcatarggcttctctccagtgtggactcgctggtggatgtgcagtttggagctctgactaaagcccttcccacacttgtcacatttataaggtttttcgcctgtatggacggcatgatggatgagcagacttgagctcctggtgaagcccttcccacacttstcacacttataaggcttctcatctgtgtggactgcctgatggataagcagactcgagctccttgtgaagcccttcccacattgctcacatttgtagggtttttcttctgtgtggtctctctgatgaagtagtagctctgagctttgactgaagttcttaccacactgactacmttcgtattgtttctctgcagtgtggattttctcatatggatgaccatctgggctggtgttaagtattttcccacagttattatggtcacagggtttctcctctgtatgasctctctgctgactacaactgaccacctgtgatttccatccatgaatgtctttgcagttacagtcaatgggatccaaagattcttttaactggccattctggcaagttgcctcaccatttaacaatggcgaggccagttcttgtccatcagacaccagtttaacttgaaggttctctgaacaactttccccctttatcacttttctctcagtgctttcttccattacaaagagacgtctgctttcctgatgatcctgaggctcattcttacagaacttcactgaagagtcttgtgtgtctatttggcttgagactttcaaaggcaaatatgtttcactttcaatgttttygaaacaaccactttgaagagtcatcacactgtccctgtttctggaaataggagaagatgcttctccccactgttgacaaggggaaatatctagttcaggctccccatccacttcccctcgatgattcacaatacaatcctgacttccagtaattgtactggccatgccttccaaaactagccaggaggaaagctcatgtaacagatcctgaagtgttttctgytgaagattctccacagaattttcattcaagtctcctagggaacaaagacaattcagtggtaagaacaaagggtagacttcaagatttcagagtgagagtgcctaaggcctgaagtcttagtaactaggaaaaagttcagcttgtctttatagtcatgtcctttgggttaaggtcaggtacatttgtatctgggtacaagacagaaattttctcttggcttttaagcatagccaaggaaagtcttccctaactaatcctatagaaggctgtaagtcctatatccttgctaacaataacatttcatctcatctcacttcatttttttttttgagacrgagtttcactctgctgcccaggctggagtgccgtggtgtgatctggtctcactgtagcctccacctcccaggttcaagcaattttcccacctcagcctcccaagtagctgggattataggcacatgccatcatgcccagctaatttttgtatttttagtagaggtgtggtttttccatgttgaccaggctggcctccaactcctggcctcaagtgatccatccgcgtcagcctcccaaagtgctgggattacaggcatgagtcaccacacccrgcctactttcctttaagtaaatttgcatttaattggtattctgctttcataggtgtggggaatacaaggaagaaaatataaatccttttgcttaacaagctaaagcttcctgggaagacaaatacaccaaataatgataatactaagtgagtggtgtagatgaatgtatagtacaatacagtacaagagatgtatgcctaaccagccacgaaagcacagcagaggaacactcaactcagaccctggtgtttaggaagatttctgggagaaaatgacaggaaaaacaaaaaacaaacaaaaaaaaggaagtgaaatgtggagagaaaatatgacatgttaaagaaaactacaagcggcttcttacgaaggagataaaaacagtaagagtggtgaagaatgtgccacggaggggaagtaagaggacagagcaaagggcttagtgtctaataataaggaccytggggctaaaccctgaagggattgaaaactattaaagaattttaattcagagtgaaatgactgactttgtgacaataaacaccactggaaagcaagactttaggtagcgagacggctgccatagcaaatcagaagaaaaacggtaaggatgatagttgtggagagaataggagaaattcattctagatcatgtgatgataaactaaacctagaagagaaaggaggcaccaagcctgttccttgggattcctgcctgagtgacggtatggtggtgctatataatcagataggaaatgcaacaggaagaggctgaartagggaaggcagcagaactgccttgtataatctgtggtgttggtggaacattcttgcagtactggtcmgtaagctgtgagatatatataggtctggaactcctgtgagagaactgtgctaggaatacagagtttagacttactggtatattaaaaaacaaaaacaaaaacaaaaccctccccgagacttaaacaattagagtgaatagcctaatattacactgaaatgacaagaaatccataatactcttgggaaaacagaaaggctgatatcatcagaataaaaacattgaggaactcctaaatgataaggagcagatggattaggagtgatggaggaactaggggaaaaaaatgtacagctcaaattatgtataacagaaggcttcttcgtgggtaaaacatcctaagaaatcatagaaattcaattaccaaactcagaatcaataattacaaagtaagggagcactgaccccatttctctggagtctatgtctcagaaaataataaacaatgataaagtaagacatttcctaattcaacttaggcattcctaacagctgtgctagtttttgctgttagcagcactctcccagcccaccctcttcctcttagaaatagaaatattggatggctagcagcagtgccctcatataaagcctcaagaataaaataaatgatctgccaaagaaagactgctaataatattaactggactgaagagagaagcagaggttgaggtaatgttgaacgtacacaatgaccaatggattaaggtacaaaaaagaagtaattgacaacataagtgcccaggataaaacttcaagctaaactttttaatgggagttctgacaaggaagatagcccagcgctggaaataaagaagcagggcatgccccagataactcagtggcaaaagaggtggacttaaaaaatggcctacaccactgtgcaggggagtacagggaataggaggcccacctgaggctcagccctagcccttagcccttagcccatccgtggggccagtttactgcctgggtagtccccttgcccatgtatccagctacaaaacaattcaaattttttctttttcccaaaataaaacctcagctagctctgccaactgtcaaaaaaaaaaaaaaaaaaaaaaaggcctataatatccaccatctggattcttattacctccctccctagcccaatcagcagaagtgtcccctaaagtaaaacacatatgcatgccaaagtgggtcaagcatgggttgaggacacactcyaatatcatgctgagaacacaagaattttgaaaaaatatataaggagaccaacagaatttaaaaggtacataattaaaawcccagaaaaactggagaggatatcacatttaaacacaatctaataataaaatataaacatattgctatgaaaaataataattctaaataaaatgactgaagatgatgataggttatgtcacttgtttcctagatatgtgtcaggctgttttagtcaaacgcctgcaatctagatgagttaaatagtaaaatgaacacatggctaagatggaagattgaggaattctccaagaatgcaaatgaaaagacagacaaatagaaagataaaagtaaaagcccatcttcaaggagctgcatgaggacagtgaagatggaacacagggagagaaaatgatcaaagaaataataacaaaaaaatgtttcctagaattcaagattcagggcccaataaatgctaaaaaatggtatgtaaaaagaccccaaactaaacatactcttttaaacctcaggacttcaaggaaaaaacaaacaaacaaacaaacaaacaaacaaacaaagaaacagaaaatgctaaaagcttccaaacagaaaagccaggttatgtgcaaataaatgagaattatattgacactgaacaactaattggcaatattgcaaatcttcaatatcttcaaattttgggttaaaagtcattgtgaaattataatttttacccagccaattaaccatttcagtgggaggaaaaaatagacactctttcagacacgaaaagattcaattactaaaacaatcattcaggaatatactatagcaaaattttttaaaatttaagaaaaaggatacatgctgcaagaaatagcagtaagccaagaagtcaatacaatacataattaggccaggcatggtggttcatgtctgtaatcccagcattttgggaggttgaggtgaggtgattgcttgagctcaggagttcgagaccagtgtgtgcaacacggcaaaactctctctacaaaatacaaaacaaaaacccccaaaccccaaaaccatagttgaaaaataaaagaaaaaaataaacaaaactctacaataacagcacggagtcaaaaccccccaaataaaatatatttttaaaaagcaagtattagcttcagaggaaaaataaaaaaattaaaaagaactataatcatactgtactacttgactctacagtgaacaactaattacaaagtcaaagcaatgtaagcattcatcactgacatgactctaacataaattcttgggaagctaggcatttggggaggtaatataaaaaagctacatcctcatctataatatagggaagtcaatagaaattacaaaatattgataaactgagaaataacagtatatcacaatacactaaatttaaaggatactgaggtaccattttccacctgttacactagcacaaacccgaagtctgaagacacacattacttgtgaatgtaaactgatacgaaggacagacattttgacaattatcaatcaatgtcataaatatatgcactcagcattccaacttagagttttactcttcagattttcaggcataatttgtgaaatgacatttacatgagacagctcactttttaaaggccaatgaccagaacctggatagacaagagctacagacatgaaagaaacttttcactgtgcacgttttatatttattttttaaccatgtgaatgcatttattgtttacatgagagagaaaaataacaatatgtaaacatattgtctggagtaggaagacaaacccaatatggaacagctagaaaggtgaaaactgagtgcctttggaagccacactgtggctgatggagcagcagagtcaggaaacaggaatgtttttactatgagctgtccacacaacttgttttacccaggtgagtgtatcactttatttataaatttcaaaagtaatggcaaaaatgaaaaagaaaaatgacaaaagaaaaacagggcagtttgtagcgttaaatcatgaaatgggctgaaatgattaaatggattttaaaggatattgcttcaacagccatatcatacaatacttggaaatggctagtggttatagaaattataggtatatgaaaatgaatgggggaggaattttatgaaaggtgcattttaatgaaagtgtgatgttagcttttaaaaaaatgtttaaaataatatgaagaatgaggctgggcacggtggctcatgcctgtaatcccagcactttgggaggccgaggtgggtggattacttgaggtcaggagttcgagatcagcctgaccaacacggtgaaacccagtctcctctgaatatacaaaaaatagcagggtgtggtagtgggcacctgtagtcccagctactcaggaggctgagtcaggagaaatcacttgaacccgggaggtggagcttacagtgagccgagattgtgccactgcactccagcctgggcgacagagtgagccttcgtctaaaagaagaagaagaaaaaaaaatatgaagaatgagtgtataacattaggagaaaatactgacatgagaaaaggggtccttttatagggatttaacatggcagaaaaaagctctaacacatactgcataaaacagcacattaaaaatacacagtgtaatctcataaaattttaatacatatacttgtaatgtacatacataagtacagagtccatagaaagtgatttgatttcatattatactgtgttgtttgagtttttgagacttttatgtcttacttgcataaaagaaaaatgttgaacaagtatgttccattttatgttaataacaatgaaaacctagagcagagcttgaaattggaagcccatctcctatttcatttttgtctacttgtaaatcactctctacagagcagtcacagtgatactgggtcaatcagagcacaccattccttgatacaatggctgcccactgaagataaatctacttttttttttgagatggggtcacacagtgtctcccaggctggagtgcactggcactatctcagctcactgcaacctccacctcctgggctcaagcgattctcccacctcagcctcccaagaagctgggattacaggcatgtaccaccatgcctggctaattttttgtcataaatctactttttaccagggccttcaacgccataactgagccaggccatgttcaccacctcttctcagtccttcttagatgcaccctgtggtctaccacactcctccttccaggtctttgggtctcttcttgcatggttctctttgcctggaatgttcttcccctccctagccacctgtttaaactattgatcccttagctcccagtttaatgtcacttcagaggctctccgtaagacacatacacaacccgcattmcatcacgtctttgttctctcagagcggtgttccattcttcacaggacttactgaccgtatagtaacactccaaagaatgacatcataaatgatgtttaaaggagacwagtgtacctgcaacatctaacttgagcttgaaaaacgatggcaacaatctgactaatttttaccctattttaagcgttaaacagaatgactttagggcaacatctgtgggatctaggagtgttaataaacttaaaagaagttaaagttaaaaaagaattggtgggagattttagatactgaggacgagaagagagaaattttttttaaaaaatttttttattttgagacagggtctcactctgttgcccaggctggagaattttgctctctgaagcctcaacctctctggcttaggtgatcctcccacctcagcctcccaagtagctgggactacaggtgtatgccaccaggcccggctaattttttatattttttgtagaaggggttttgccatgttgcccaggctggtctccaactcctgggctcaagtgatcctcctgcttctgcctcccaaagtgctgggattacaggcatgagccaccacgcctggcccaagagaaaccgaatatagtcatggcctatttctaaactaggagactggaacaactttaatactgacaaaagtgggactataagaagggaacttaaaaaggaaaataattttaggcttatcaaaatagaaaggagagttgaacaccattaaatgtgtaacagctcctcctataagtggacataccatgcattctcaggggcaataatgtccccaaggggtgagaattggttcataggggacacaacaaatctttttattttattttattttttgggacagagtctcactctgtcaaccaggctggagtgcagtggcacgatctcggctcactgcaacctccaccttccgggtttaagcaattctcctgcctcagcctcctgagcagctgggattaaaggcacccgccaccacgcccagctaatttttgtatttttagtagagacaggattttgccatgttggccaggctggtctcgaactcctgacctcaggtgatccgcccacctcggcctcccaaagtgctgggattataggtgtgagccaccacacctggccaaacaaatcttacatattatgctggtttgggactcataaaaacaatcctacctgacaaaaccttattccttcatacttaatttttctacaggagaaatttaatttgtctccttttggcagggagagagtaatgataaagaaaaaggccgagaaacactgatgatgtaacttaaaaccaaagagccctttgagatttcaagttagaaaaaagacagaagccaggagatcaagaccagcctggctaacatggtgaaaccctgtctctactaaaaatacaaaacattagccgggcatggtggcacgcgcctgtagtcccagctactcaggagtctgaggcaggagaattgcttgaacccaggaggcggaggttgcagtgagcccagatcacgccactgcactccagcctgggcgacagaacaagactccatctcaagaaaaaaaaaaaaaaaaaaaaaaaaaaagaaaaagaagccagagaatctgcagagcaaaggactaagagagaagctggaggaaacagaaaaactrtgatttcatgcatgacaaagaatttcaagagaaggtcaacactatagaaaccatcaataaaactgataatggtaaatatgctgaaataaaaattaaaaaaggaacaaactctgaaagagacaaaagttcagtagtgacttccaagtgggcaattttggtacaagaacagagcacaggcactgggtttatataaagaacgtggaaaggcctggttcactacctggaggtaaccactttgccctgtagcattctctttactccccaggattagctgaaaatagaaactgaaaggccacagttactgagggaagagaaccagggtcccactgtggactgagggaggcaaaaaccctgaaagctaacatgatgacacatttttcagtgttttttttttttgacagggtctcacggtcaccagggcaggagtgcagtagtgtcatctcggctcactgcaactctgccttcctggctcaaggggtcctcccacctcagcctcctgagtagctgggattacatgtaactgccgccatgtcctgctaatttttgtatattttgtagagacagggtttcgctgtgttgcccaggctggtctcaaactcatgagctcaagccatctgcccgccttagcctcccaaagtgctgggattataggcatgagccactgtgcccagccacttttcagtgttttttgtagaatggctgcttttggctataaaatggcaagttcatatggttcaacctagtaggtatacattcatttccccatctaatttaagttcttcatgaacatattttttaatggctacatacttttctgtgatccatgataatttgcctgaccaatcccctgtgatacatctagtgggtaaataattttttcactattttaaataattctataatgaatatctttgttcacaattttcagttaaaattactaattattgccttagactagatatctaaaaaatgaattactgcatttgaaaatgtttaaggctccttgattcaggtagtcaaaaagtgttttatctggccgggtgtggtggctcatgcctgtaatcccagccactccagaggccgaggcaggagaatcacttgaacctgggaggtggaggttgcagtgagccgagatcgtgccactgcactccagactccagcctggatgaaagagggagactccgtctcaaaacaaacaaacaaacaaaacaaaaagactccgtctcaaaaaaagaaaacaaaaaagtgttttatctatttgtagggtatgagagtgtctcaccatgaatttcgattatttttgggaggggagagggatgaattcctgaatgtgtaagaaaagaaataatggaaactggatattgccaggcagggggaggacattcaatgaaaaataaagtccaagcaaagatggcacatgaccaatgttggggaaatgtggggaaaggcaggagtacagagaagcaagtgaccattactgggaaagaccacaacctcctgcagaggtagaagggcagtaagtgaatagatcaggtaaaacagtagcacataggaaacatcctggaagtccctgctttcgacacagactgcaagataccagataactcctggaacgttgaaaaagggattcctctgctgtggattagcctggcttataacttgccatgatgcctggtgctctttgaggttcacttgctattatataatgatctttatcttgctccatctgagagatcacatttcagaaactcacagggattgggtgattgtgcagaaagcaaaatcagtcccacctctggcttataaaggatggaaaaggtatggtttttgagacaacccagtaaaactaccattctccaatttttaccaagttctttagctgcttagaatagtcagaaaacatccttttgtgtcaaaaaggaagtaggaaacaaagaagccaatgggcaggtgtccaagttcacatgtccttacccaccaagaccaagtttctgtagttgcccagcatcacagctccgcacagcttcctgggagcagagtccaggtgacctcactcctcctcggtgaaggccacagaggcatccttgaatgtaactggttcctaaaacattaagcacattcctcctcaacaaacaaccatctgcacaaatgccctgcaagtggggtgaagtcagcagcactggaaaaggtaagaaaggtatagaagaagtttgcagctcagggatctgagtgagctaagccaagttttgttggaaagtctttcctttctcacttacttggctacttccatccaaatcatttccctcctgcccacaacatatctacgctcaagttctcagctactgaatctttctgtgtcactctcttcttgtgtcattgctgagttgtcatcttcaccccattcccaccattatcctgacaaccttaacactcgcaggaacaayttacccaacactctgacctcacatttcttaatctccacagtgccaatgatctcagccacatttcatcaaactgtaataaccataatcgggactagtccactacctggacccctctactcttaaaatatgaatctctctaatatcctacaagttaaaaatcacttcctatgctttctgttcttcctcttctaaactaagtaattgaacattactgggaaaataaaatagcacatatacacacagccataaaacactctcctgagggatcccttgacttaaaataccattcactgccaaatatttatttccagccctaacctcttacctcacctccagactccacctttctaccttttaacatctacactgggacgtctaaagtgcttaaaacttaacaggccctagctgggcacgatggctcacggctgtaatcccagcatttggggaggccgaggtgggcggatcacttgaggtcaggagttcgagaccagcctggccaacatggtgaaacctcgtctctactgaaaatacaaaaattagccaggcgtggtgatgtgtgcctgtagtcccagctactcaggaggctgaggtggaaggatctcttgaacccgggaggcggaggttgcagtgagttgaacaaacaaacaaaaaacaaaacaaaacacttaacaggccccaacagaactcctgctccagcaatatccatcagcatctgctcttccccagtcatccccattttagtaaacagccacaygaaccactcaattgctcaaaccaaaatccccgatgtcatttcattctcatcctcacatctcacctatcacccacctcctttaccgctaaagcatatcggcatccacccagctcccctgccctgcactgtcacctctctaggcctaggcagcacttgctctcacccacatcaacctcctggttggtctgactctactcctgctcccccaaacrtgagttttccacatgacagccaaggtgatcttttaaaacaaaaacaaggccaagcatgaaaccctccaaaggcttttcagtggccatccagtaaaatccagactcttcatcctggcccatgaggctctcctgtcacctccccaacctaggcctctcttatgatcatattcagcaccagtgacccagcaggcccttgaactgcatcaaactcattgtagcttctgcactagctgccctctccattcctcatgattcagctctcagtccaactgttgcctcttcagaaagcatgtcactgaccatctaatccactggagcatcctgtatatatcattttcctggtttaatttaattaatttcttcttataacttatgccttaccttattttcttattcacttgctttcttatttactgtctttccctgctgagatttaaattccccaagaatagagaggctgcctcatttgttcatgactgcatccccaagacctcaagcagggcctggcacataaagggagtccaaatatttactcagtcaatgtcagcaaatctggttcccttcagggctctgtctgatgaagcaatgcttcttaaactacctgtggtgaagaaccagtttttttttgtttttgaaactctcaatttcagtacttatatctgcacagtgcatgggctggcaccactctctaaggcacaatttcaaaagtaaagtgatagaatatataaaaagtcataaaggctgtctcataaatttgatcagctaagccagctttggcctgaggctaaagaggcaccactccctccttccttgggcctgccctgcaggagtgacatgacttacccaacttgtcaccagtggggaaggatgagggtaaagatgaaggtaaggatgggtgctgtctcccaagctttctgttcaaggtcactggtctccattctgaggaagagggctggaaaaggaggctcaagccccggagtaaaggtgggacaaacaaacagaagcaaaggttgctgccttcaagctccatcaccacatcctttagcaaggcatgacccatggcatattaaaagcaagtggactggctgctcttcccaaccagaccttctcttcagaccacagagaaaaaaaaatttctttctgtttaaggctaatctcttcctgtgcattctagatcaaatcccttcttctatcttcagagatgcaagcccaccaattatcttttctctcccttatttttttatccgtcttccattcagttgtctggattgtctaatcctccttctctacctcaacaatattcaaaccatttcagatcctgtcaattctgcctcctaaatttccctccaatgtgttacctcttttccatttccactgccagtcttagtaagacccttattttttttcttacctaggctacaataactccttaccaattctttgtagtacaatttttgtcatcttccagtccctaggttagacaaccagagttattaattttttaaggtcctcaagataaaatggcaggcgggactccattctgagaagggaaaggatatgttggtggactactaactttgtggtaggtaaaaaaaatgacaggagtagaccaaatgaaaagaatcattgtgacaagggaaaggagaaaaggaaaggaaattagtgctcctgttaaagcaagacaaaggtgggactgaaacactgaataatcaacagtcttcccaggtatcagtggcactaaggagtcactccaaggctgtgctcctgcttacagttgggagagcagacttgatattctaaaggccaaccaaagaggaaggtcacaagttcaattgtttcctgtttctatcagacaaatgtcgacctcctcagaactacatacatgccatcatgtggccttccacttctttctagagcccatctctgctgtatctaacaatttactttgaagtggaaaagcaggaagaggcacactagattacctggagtcattcaacacattacacttgagtctagcacagtcctttctatagtaagccctaacttattgagttctcccatccattttggagctttcagtctcaggacaatagcctctttctgaagcatgaggatgagttagaattctcctcctctgagatctcatagcatctttcacatccctctactatagctattaagtctctcccaagttggctggaagattctgaaggataggggctacactcaactcatctttgttgtttgaracagagtctcactctgttgcccaggctggagtgcagtggcatgatctcagctcactacaacctccacctcccgggttcaagagattctcctgcctcagcctcccgagtagctgggattacaacaggcatcaacatgaccagctaatttttgtatttttagtagagatgaggtttcactatgttggccaggctggtctcaactcctgacctcaggtgatcctccccactcagtctcccaaagtactgggattacaggtgtgagccaccatgtctggcctcaactcatctttaaatccccagcaactaccacaattgacttggaatctgaaagataaatataaattcacattcaatttaaatgaataataatacaactaaaagaaaacataaagatagtcaagcccaagaccctcagtttacagagaaaaaaaccacagttcataagggcgaagtgacttacccaatgtcacagaggaaaagcagggttaactaagactcccgcctttcagcagacctaaggacaatgtgtggtacatagaaaacacacaatgcttggaatgaagtccttcctttaaattaaaaaagttgttgtgtaacacacaccagaatctcaaaatttactaaactggcaatccccagttgcagcggcagtgaatacttaatcattagggagcaggcagaagcgaaggaaggaaaatgtattgattctactaaggttaatctcccttgaagtcctcaatyacttttcagggcacagagaagccatgctctcagtacctcaagtcagcttactgtcctctaaacagattttttctaagagctcatgtgtgtgagggctgtatttgccaagcaaaaagatggcctttgctggtagtgttaaaaaacattttttttcccttaaaacgcagtctgatattttattcaaacaacttctgatgtgatgacctgtttagttaatggagaaagaacagcctgaaggaagaaaacacggggtttatttctggccttctgctctctgaaacaaaggacaaggcactttccttcggctctctcagagttagccgagttagagctctccaccataaaacgccaggacagggcaaagagggggccgaccatctcaaacaccatgggattctaagtgggggctgaccatctcaaataccctgggagtctaagggttaattttgaggtaacctcctacagatggttttatggggacaactgaaaactctctttaaaaaagtacgacttggtaatttaaaatttactggaacagttaaatatgtagacatgctagtgaaagagaacaaatcaacctgagtataaaggatgaataactcattttacctaccctagagacacttatagtgtatagagagatatttcacaataaacctttggatgtacaaagatcaacagaataaaaaaggagtgaaactctcctttcactaggtctggaagagagaaggaagcttagttcttaaaaaacaccacagagagttctgatgcatagcctagttgaaaagcatttctagagtgattttgtaaccactgtgctgccatttaacgaatttcctcgtttttgactcatagttaataaattatcactattaatatgcatttttttgtgtacaggtaatataatatgttcatcaagatggtaagctccttgaagaaaagcaccgtggtttatcattctatctgttttgctgagaccacttagcactgggatgagtatggaatagcttggaatgactttcaatgtgagtgaaatgtctggcaggaaaaggcaggctttgagaggctccccaggagggcacagcccactgctctgaggagtggaataaattcttggaggcaggatgggccagtgaaaactctctgtgcagaccctggtgacatcatctgctagctacatgtccttagtatcttaatgtccctacatccatagctataaaataccgtactgggggcctgacaataaagaaaacaacacatggcacagggacatttcagggagatggcattttaggagaaatggaacgccaactcacccggaccctggtcatttcttactcccagaggggatggattcctggaaaggcagagttagggaaagagaaaaagccatgaaaatcaagtccagcaagactgcggggaaaaagttactccgctcctgcctctgacgcttcttcagtcacttccacccacactccctccatcaggtgagaggtgaagcattttctgtcaccaccttcatctctctccacagggctttcgattaaacaagccaagttttccccccaaaaccaagaggctaggtaaattccgcagccgccggcagctcgaagccgtgcccatttcctctgactttcccgatctctgtcctaaagttctagttaagaggagaagcttctcgggatggatttcggttgcccaagacgccttccccgacctcattctcaggagcctggctcgttcctgcggtgcgggrgctcagatgcaagctcttttcagcgaaggcagtgctgcggacagaaacctcagtctcttacaggagcccccgtccgtcgcctaacgtccaccgaaaacccccctgcaataacgcccgtcacaggcgaggaaaaggccggcgtggccaaccacgaagcccccagccggcccaggccagagctcggccaggagggaggaggggccatcggaggcgcggccgctcagctgcagggccccacaggcttcggtgtggccgcagcccggccccgggggcgcagcagctcggaaatgcggcgccgggacacacgtgccgccgcgggccgcgcctccgctggtcgcrtgccctaccatcgccgccctcccggcttccgcagctcggcggcccagcgccttacccgcggcacacccatttcctgacccctgaacgcctctgccagcggctggggaagcccggccagtctcacctcccacgtggaaccccacgcctgcaggggccagattccggatgctgaccgctcgcgcgcctagggccccgaaatacaagtcccagcaagccgcgggcgaaccacgcccacttccggcgcgggcccctgaactctgcgctgtgcggagcgggattcttgggcggaggggaccatctttgagtcagcgacgcgtgtattcaagtcctcctcctcgttttttattacaaacaaataagaattattttaggaatacctgttaaggtgattttcatttgttaaaatactattgggggaaaaggatgtaaatacccataatttcatctttacctttcaaaacattctgaagtgaatatttgccattcggcatcttccatctcacctctgaagttcatccatttaacagatattaattgagagccaactgtgtaccaggagctgttcaagatgcttgcacaaaagtcactgccctattctagttggggaaacaagcaatccataaatatagtaaatatatggcgtcgtgtgtgtcatgaggtggtactgaaagcatagagctgggcggggtgtggcgaggtgcgtttgtgggtgtgtaggactgggggtgtactttgcaattttaaataggggatcttggaacaaacacaggaggtgagggaattagacaagtggctcccagcagtcagaactctcctaaacgcacacaagggttgttgataccaggattttacgtttatttcacttctcaccgagtgacacagagctacccgtttggtcttttcccaattcctttctttcagatttattttggagaggaaagagatgttgcctggacctctcttctacatcctcccccttccttggtgtattagtttccaattgctgtcacaacaaattaacacaaacttagtagtataacaaacatgtattctcttaaacttctggaggtgccaagtctgaaatcaagttttactgggctttataaagtcagtgttggtggggctagttcctcctggaggttctagatgagaatatttctttgccttttccagttcccagtgactgtttgcattccttggcttatggctcgctcctttatcttcaaagtgcatgactgcaacctctgccttcatcatcacatcacatgctcaggcactggctcctcgtgggtccttctaataacgactgttgtgattacatcaggcccagctggctaatctgggataatctcttgacgtcaagatccttaatttaatcacatttcaaaaaaaatccctcttgccatagaaattaacatccacagcttctgggggttaggacatggacatatttgggggactattattttcagcctgcgatgcttggagaggcccacgtccccttcggtctcctcctcagagatgctgtcttaccttttgcctggggaacacaaaatgtctcccttggaccttactcctctcctcattcttcattggaaaaccacagagcttttccctatttagatttaccaccctggccctgaccttcacttcctcatgtgctcacttctctcctcactcaatttaagaggccatggagcatggttatggccagtcctgtgtatgtgccgttacccttaactctcttgtcccagtctttcttggttttattctcttgatggaaacccaaatctgcttgaatccagttcctggcctgcgcctgtacggcagaggttgtttgagaaaaccacatggctgggatgattggtttcattttcagtttataaccattaagttcaagtgggcccttcacgctgcctggctatccttctacatttcttagtccatccattctcctaaatgactatttcacaggttctactctcttttcattatttatttatttatttttttgagccaggctggagttcagtagtgcgatcttggctgactgcaatctctgcttcctgggcacaagcaaccctcccacctcagcctcctaagtagctgggactataggcttgcgccaccacaccaggctaatttttgtatttttttttttaagagatgaagtttcaccatgttgttcgggctggtctccacctcctgggatcaagcgatcctcccacctcagcctcccaaagtgctgggattacaggctgagccaccatgcctggtcttctactctcttttcaagccgccaacaactcctcccatctcactgagtgctgatgactttgctttctgttactgagtaaagagaacttctataccgcctcacaggcacatctgccctcctctctgcattagaaactgtatgctctacttttcattctgagtcactggccctagttcctatatgagaaaattcttttgcaccctggatgttaaatgctttctcatgaatgaggtccttctctctcttctgtatttcaagattttcattctgtactgaattatyagcatactaatgaatacactgtaatattgtccataaaataaataaaaccccttaccttgcaccctatttctctccagccactacctcatttctctgctttgctttacagcaaaactcctaaaaaaattgtccctaagggatgtttccaatttcttttctcccatattctctcttttttcacatgcaaaacccaaaatttaatttttaacttaattttaaaaattggtatataatagatgcacatattttgggggtacatgtgataatttgattaatattatgtgtaaagatcaaagcagggaaattgggatatctatcgccaagtatttgtcttttctgtatgccggaaatattcaaatgattctcttctggctattttgaaatgtacagtaggttaatgttaaccatagctaacctactggtttattgaacaccaggtcttattttttctgtctaactgtgtattacaccttggtatgttttggctctgtgtccccacccaaatctcatcttgaattgtaattcccacgtgttgagggagggacctgtaattcccacaagtggagggagggaggtgattggatcacaaggggcagtttcccccatggtgttctcatgacagtgagtgagctctcacaagatctgatggtttgtgagatatgtttggaagttcctcctttgttcttctctctcctgccaccttgtgaagaaggtgactgcttcttcttccaacatgattgtaagtttcctgaggcctccccagccatgtggaagtgtgagtcaattaaacctcttttctttataaattacccagtctcaggcatttttttatagcagtgtgaaaaaagactaatacataccccttaaccagcctctattcagacccctacctctactctttctgaactctggttaccaccaatctactctctatcttcatgaaatccacttgtttttttgtttagctcccacgtatgagtgagaatatgcaatatttgtctttttgtgcttggcttatttacttaacatcatggcctctagttccacccatattgctgcaaatgacaggatttcattcttgtttatgactgaataatattccgttatgtacatacaccacatttctttatccattcatccattgatggccacttaggttgattccatattttggatattgtgaatattgttgcagtaaacatgggaatgcagatagctctttagtatattgattccttttctttgggatatatacccagtagtggawttgctggatcatatggtaattctatttttagttttctgaggagcctccatactgttctccatagtggttgtactaatttacattcccatcaacagtgtacaatgattcccctttctccaaatcctcgccagcatctgttattccctgtttttcagataaaagtcattttaactgtggtgagaagatagctcattgtgcttttgatttgcatttttctcatgattagtgatgtttaacattcttttatatacctgttagcaattttatgtcttcttttgagaaatgtttattcggatctcttttgtccatttttaaactggattatttgtgtttttactataaagttgttggagctccttgtatattctggttattaatcccttgtcaggtggataggttgtggtattttctcctattctgtggggttgtctgttcactttgttggttgtttcctttgctgtgcggaagctttttagtttgatgtaattccatttgtctatttttgcctttgttgcctatgcttttgaggtcttacacaaaaaattttttgcccagaccaatgccctagagtgtttcctcaatgttttcttctagtagattcatagtttcaggatttagatttaagtctttaatccattttatttgatttttgtttatggtgagagataggggtctcgtttcattcttctgcatatggttattcagtttcccagcatcatttattgaaaagactgtccctttctccaacgtatgttattggttcctttgttgaaaatgagttggctgtaagtgcatggatttgtatctgggttctctattctgttccattcgactgtttgtctgtttttatgccagtcccgtactgatttggttactatagcttcatactatattttgaaatcaggtattatgctatcttcagctttgttctttttgctcaggattgcattggctatttggggtcttttgtggttccacataaattttaggatttttttcctatttctgtgaagaatgttttctgtgaagaatgttattggtattttgttaggaattgcattgaatgtacaaattgctttgagttgtattgtctttttttttttttttttttgagacagagtctctctttgtcacccaagctggagtgcagtggtgtgatctcagctcactgcaacttctgcctcctgggttcaagtgattctcctgcctcagcctcctgagtagcaggggctacaggcgcccgctgccacacctggctaattttttgtattttagtagagacagagtttcaccgtgttgcctaggctggtcttgaactcctgagctcaggcaatccacctgcctcggcctcccaaagtactaggattacaggcgtgagcaaccacacccggccagtagtattgtctttttaacaataccagttcttccagtccatgagcatggactatctttccatattttggtgtcctcttcaatttttttcatcagtgttttatagttttccttgtatcgatcttttacttctttggttaaattggttcctatgtattttatattctttgtagctattgtaaatggggacaaattgtaaataaaaaaatgctttttgatttctttttcagattgtttgctgttgatgtatataaatgctactgatttttgtatgttgattttgtatcctggaactttactgaatttgtcagttcaaagagttttttggtagagtttttaggattttctaaatataagatcacattgtctgccaacaagtctaacttgacttcttcctttctagttcagatgccctttattttttctctcagctaattgctctagccaggacttccagaattataytgaataaaagtggtgaaagtggggatctttgtctggctccagatgttagagaaaggattttcaatttttccccattaagtatgatgttggctttgggtttgtctaatatatggcttgtattactttgaggtatgggatacccccagtttgtygagcatttttatcataaagggatgttaaattttattgaatgctttctcagcatctattgaaattatatggcttctgttcttggttctgtaaatgcaatgtatcacattaatgtatcatgtaaatcaataaatgtttattaaataatgtataacataaatcaataaatgcttaatatttcttgatttatgtatgttgaaccatctttgcatttctgggatgaatcccacttgaccatggtgaatgatctttttaatctgttgttgaattcagtttgctagtattttgttcaggatttttgcatctacatttatcagtgttattagcttctcattttctttttttttgtgtgtgtctggtttgatatcagggtaatgctggcctcatagaatgagtttggaagtattttctccttttcatttttttgaagagtttgagtagagttggtattagttctttaaatgtttggtagaattcagcagtgaagccacctggacttttctttgatgggagactttattacagctttgatctcattacttgttattggcttgttgatgttttctttccttcatggttcagacttggcaggttctatgtgtccaatttatccatttattctaggttttccaatttgttgttgtatagttgtttatagtctctaatgtttctttgtatttctgtggtctcagttatttagtctccttttgttgtttctggttttatgtatttgggtcttctctcttttttccttagacttgctaaaggtttgtcgattttatcttttcaaaaaactaattgttttgttgatattctgwatatatatatatatattttacctcaacttcatttatttctgytctgatasttattgtttcttcccttctaattttggattaagtgtgttcttgcttttctagttccttggggcacattgttagattttttatttgaagtctgtctactctttctttcttttttctttgttttttgagacagagtctcgctctgtcacccaggctggagtgcaggggtgcaattatgtctctctgcagcctcgacttcccaggctcaagtgatcctcccacctcagcctcccgagtagctgggactacaggtatgtgccactacaacagctaattttaaaaatttttgtagagatgaggtctcactgtgtttgtccaagctgatatcgaactcttggcctcaagcagacttcccacttcggcctcccaaagtgccgggattacaggcakgagtcactgtgcctggcctgtctttctgcttttttggtgaaggtgtttattgctaaaaacttccctcttagtactgctttttctgtgttcaatagattttggtatgttgtatttccctgttcatttgtccaagaaattttaaatttttcttcctaatttcttcattgaccctttggtcactcaggagcatgttgcatagtttccatgtgtttgtgaagtttctaacatttcttttcttcttgatttctagttttattccattgtagttaggaaagatacttgatatgatttttactttttttttctttttttttttgagacagggtcttgctttgttgcccaggctggagtgcagtggcatgatgatggctcactgcagccttgacctcctgggcttatgagatcctccccactcaacaacctgagtagctaggactacaggtatgtgccaccatgcccagctaattttaaaatgttttgtagagttggagtttcactttgttgccaggcttgtctcaaactcctggcctcaagtgatcctcttgcctcagtctcccaaaatactgggattacaggtgtaaaccaccacgcctggcccgatttctactttttaaaatttactgaggctgggcacagtggccatgcctataatcctatcactttgggaggccaagacatgtggatcacttgaggtcaggagttcgagaccagcctggccaacatggtgaaaccctgtctctactaaaaatacaaaaattagctgggcatggtggcaggaacctgtaatcccagctactcaggaggctgaggcaggagaattggttgaacctgggagacagaggctgtagtgagccaacatcaggccactgcactctggcctgggtaacagagtgagactctgtctcaaaaaaaaaaaaaaaaattattgagatttgttttgtggcctaaggtgtggtctattatggaaaatgttccatgtgctgatgaaaataatgtgtgttatgcagcatttgggcaaatgttatgtagatgttacttaggcctattaagtatagtgtgcagtttaattgtgatgttactctattgattttttttgtctgtatgatttatccattactgagacagtcccctactattattgtattgcatgccatctctcccttcagacctattaatgtttgctttttaaacttgggagctctggtgttgcatgcaaatttataattattatatccacttgctgaattgatccctttatcattatatagtgaccccttttgtgtctttctacagtcttattttgtattctatttgatctaagtatagtgagtcctgctgtcttttggtttccagtttcatgaagcatctttttccatcccttcactttcagtctatgcgtgtcttcagaggtgaggtgggtttcttgtagtagcatatagttgggtcttatttctttatctactcagtcactctaacccttttaattggagaattgagtccatttacattctgttttattattgataagaaaggacttactactgccattttcttgtttgttttctggttattttgtaattttgtcttcctttcttcctttcttgttgtcttcttttgtggctacgtgatcttctttggtagtatgttttaattcgttgttttttttacttgcagtgaatctattttctttttttttgcattgtrgttcctgtgaggaaaccaaaaaatgtatcttacagatataacaagttattttaaacagatgacaactaaactttgatcacaaagaaaagaagataaacaaaaaaggaaaaaaagaccagttctacactttaactctatccccccattttgacttttagttgtctgaatttacatatatttatattacttacctcttgacaggttgctatagctattattgttcatgacaaatctatcatgcctgttgcggtaaactgaggaccagagagaccgatatggggaatacaggaggatgtttatttaaggaactcaccagctcagtggattcacatccaaaaagcttcaggctgataccaggtgtgatttacagaagagaaagcaggagaatggatttggatgaggtgatttggaacgatttttacctcgccacaaagtttttcttaggttttcattataatattgctgtcctaagcatgttaattctcttactcggtctgtaaaagcttttccccagtaagcaacacagtatctcctgataatagaagtggcttttttgtttgtttgtttgtttgagatggagttttactcttgttgccctggctggagtgcaatggtgcaatctcagctcactgcaacctcagcttcccaggttcaagcgattctcstgcctcagcctcccgagttgttgggattacaggcatgcaccaccacgcccagctaattttgtgtttttagtagagatggggtttctccatgttggtcaggctggtctcaaactcctgatctcacatgatctgcccgccttggcctcccaaagtgagccaccacgcctggcctaatagaagtttttaagagccagacgcttgaacttgtgggcatyggtttgggggaaaagtcagtcagagtaaaattatcttgtggcattgactcttttgcttcctaaggccactggtctcccatgttagttcctccacaaacataacatgaggaaatgcctaggctgccagcaatgttttcagccaactgagcaaacagatttttggctacaggaggaggctctggtaacttttggtctacatgcttatagaatgacttaaagacttggaactgttgctgggctggacggctccgggttccttttttgataacatataggtaagttgctgggtatgtgtgtatgtagacatgtatggggcaacctgcagtccacatgggtaggtctggctttagaatggtgaagtttacaggattacaggtttttgtttcataatctggtttaccggcatttcagtaagcataattggcctttgttgtgtgctagggtgccatgatatgcattactgacaatgtttttctggggtcccaggggaacaaggtggagttgctcttggcatgcatacatatttgtagtcatttctatagtatctttctaaaggtaagttaccacagacaggtgagtctaggtatgctgcctgacaggcatcaaagtacagagaaataggcccttggtaaaaaagagggaccttggtctggttttaaaaggggaccttcctttgactctgcgtgaatgtcaaaccattcaccaggtgaaaatttagggtcatagtatacataaggctggccatcctctgggtcacagactgaataggtggtctgattgtaagtacaagttcttaagtgagtccttgtacacttataagtatggtacaatagagttatagttatactgttccttgaccaggtagtatgtgtacagtggggacacccttctataggtgcttcttctagcatggttaaggggggtaacaacagcaaaacaatgtatggcatattcatatccagcaaggacagaagagggggaggaggttgagcacagcaacagaacaataggaaaacagttagtattacaaggaaaactactagtcctaagatttctaaccacctttacttgcttgatgagtcctcaagcttcagccatgtatagactagtcagcttccggtgtatgactagagcagggcttgttgtctcctcaagtttcagccatgagtagactggtcagcttccggagtgaccacagcaggctggttgtctttaacagcagcttggtctcgtcttaggatcagcgggattggatgatctgggtcctgctggctggtccacttgtcctgagcttccggtttcagcagactgtggtggatccaaggcacaacacctgcaactttaacagcagtgggagtggacaagattatagcatagggcccatcccatatgggtcctagagaagtttggttctacttcttaacctaaacaaaatctccaggtttaaaggggtgtactgggtctgtcaggcttataggtattctttcatgtacctaactatggacactttgcaaggctgtccttaaaacctgcattggctttcttaagattaattctcctagttcacggagatcacctttaatttgacctatgactgggggaggccgactgaacaaaatctcatatggtgaattcttagttgtttggtgggggtgcatctgactcagaggaggaccataggctagacctgatmctatctcagatgagttttttggcaatatttcttcagtagctgcttgagtgtccagttcatgcgttccacttttcctgaactttgcggccaacaggctgtgtgtaacttccattttatttttaatagtcttattaaatcttgcactatttcagctacaaatgccagcctattgtctgatcctaaagatagaggcagtccaaacttggggataatgtcttttagcagtactttggtcactactcgtgctttttctgttttggtggggaaagcctcaacctatcctgaaaagatgcaaataagcagtagcatatactgacagcctccagcrsggggcagttcggtaaagtctataagcaagttttcacaaggcgtggctcctacttcctgaattcctgggggccaagtgggcccctgtcatgggttgttctgagcacaggttaagcattgttcaccaatggcttgagtgatagcagagagctgtggcacatagaaatggcatttcagtaacgtttctagtgccgtttttcccatatgagttccttgatgaatttgcttcacaaacttaggagctaacatcactggaatggctaatctcttatcgaataatttctaccaccttcctttaatatattttctagcttcctgggcaaaccaggctctttcatttggagtataacttgggtcccttggagaggaggttctggcaggagaggcatagctaaggcttcctcttgaaaatgcggtgtaatcattgctgcctgctttgcctctctgtctgcctgtttcctttggcttctggcgtccctgcctcttggtgtcctctgcagtgcattacagctactttttctggagcctatacagcctccaagagctgtagaatttcttccttgtactttatttctttgcctccagctgttaaaagtcctctctctttgtatatagcttcatgtacatgcaatgtagtaaaagcatacttagaatcagtgtaaatattaaccttcttgtctctgctaacacagtgctcttgtcagggctattaattctgccttttgagcatgttgggaataggcccccaaatctggccataaacaaaatctctgcaggcctgtgacatgttcacaagggcaatgacacccatgctgaaggttgttggtttactgggdcatttccggctgaggccactccctcacccctgtacaatatctgtcccccaacacagccggtagtgctgcagtagatttatgctgcacaaaagctgtgagccttctgcctggggaacccctgcaaaaagttccaacaggggtctgtggacccttgccagcggggatgataggattacttctaggtagatctagtttaaatttaaaaggagtgcaagtacatacaggagtcactgattcagattacaatggggaaattcaaattgttatatctacttctgttccctggaaagcagagccaggagagcgtatagcacagctcctgattgtgccatatgtggaaatggggaaaagtgaaattaaacaaacaggagtatttagaaacacagataaacaaggcaaagcagcttattgagtgaatcaaattactggtaaacatcctacttgtgaaataactattcagggaaagaaatttaaaggtttgctagatacaggagtggacaattcaatcatttctctacagcactggctgtccatgtggccaattcaacctgctcaatttaacatggttggagttgataaagcccctgaaatatatcaaagtagttatattttgcattatgaagggcctgatggacaacctgggactattgaaccaattgtaacttctctacctataaatttatagggaagagatttattacaacaatggggagcacaagttctaattccagagcaattatatggccctcaaagtcaacatatgatgcatgaaatggggtatgtccttggtatgggactagaaaaaaatttgcaagttttgaaggaaccgcttcacacagaaagacaaagttcctgccaaggtttaggatatcatttttgatggtggccattgttaagcctccagaacctatacctttaaaatggttaacagataagccaatttggatagaataatggcccccgagtaaagataaactggaggctttagaggacttagttactgaacaattagaaaaaggacatgtagctccaacattttcccttggaattctccagttttcataattaagaaaaaatcaggtaaatggagaatgttaactgtcttaagagccattaattcagttatacaacctatggggacattacagccaggactgccttctcctgctatgattccgaaaaattggcctttaacagtcatagacttaaaagactgtttctttactatccccttagctgagcaagactgtgaacggtttgcatttgcaaatcctgcggtgaacaacctgcagcctgctaagcattttcactggaaagtgttgccacaaggcatgttaaacagtccaacaatttgccagacttatgtggggcaagcaattgaatctactggtaaaacattttcacagtgttacgttattcattatatggacaatatactttgtgctgcccccactcaagaaatattattccaaggttatgatcacctgcaaaactgggtttcttgcactggtttaattatagctcaggacaaaattcagactactactccctactcctacttgggtaccttagtaaatgacactaccattgtgccacagaaagtaaccatacatagggatcaactgataacattaaatgactttcaaaaattactaggggacagtaattgcatgcgacgtgctctaggcattcctacgtgtgccatgagtaatctattttctatccttagaggagattctagtctcactagcccttgacaattaacaaaggaggctgaggcagagttacagcgaattgaaaarcaygtccataaagcccaaataaatagaatagacccagagaagactctagatttgctaatttttccaactcagcattcacctacccgtattattgtccaggagcaggacttagtagaatagctttttcttccacatactaattcacagactctaactccttatttggatcaaatcgctactatgataggaaatgggagaacttggattgttaaattacatggatatgatcctggaaaaattattgtcccactcacgaagacacaaatacagcaagcttttataaaatagtcttacttggcaaatccrtttagctgactttgtgggtattctcaataatcattttcctaaaatgaaactgtttcaatttttgaaattaactaattggattctgcctaaaataactaaatttaaaccaattgacggtgctgagaatgtttttacggaagggtctagtaatggtaaagcttcttattctggcttgaaaggtaaagttttccagatgccctatactttagctcaaaaagcagagcttgtagctgtaattgaggtattgactacttttaatatgcctattaatgtgatttctgattcttcatacatggttcattccacacagttaattgaaaatgctcagttgctatttcatacagatgagcaactgatgactttatttacccaattacaaatagcagttaggagtagaatgcaccctttttacatcactcacattagggctcatacacctcttccaggacctttgactgcagggaatcaaatggctgatcacctagttgctaccgcaatatctaatgccaggcactttcacaatttaacccatgttaatgccgttggtctcaaacacagatacagcattacctggaaagaagataaagctattatccagcgatgcccaacttgccaaatggtgcattcgtcatcttttataggaggagttactcctcgaggattggaacctaattctttttagcaaatggacatcacacatgttccctcrtttgggagactagcttatgtacatgtatgtgtggacaccttttctcactttgggctatatgccaatcaggagagtcttctgcctgtgttaaatgtcacctttgtagtgttttgcagtgatgggcattccagcttctattaaaacagataatgcctcaggctatactagccaagctctagctacatttttctctatgtggaatattaagcacattactggcatcccatawaattctcaaggacaagccatagtagaaataatgaatctctccctgaaacagcagttgaaaaagcmaaagaggagaaacagggactacaggacaccccatatgcagttgaatctagcattattgactttaaattttttgagcctgcctaaaggccagatgctatcggcagctgaacagcatctacagaaaccaactgcaaaggcagaagcaggacaactggtttggtggagagatccgataacaaaaagttgggaaataggtaaaataataacttggggtagaggttatgcttgtgtttctctaggacagaaccagcagccactttggataccatcaagacacctgaaatcttatcatgatccagatgctgaggaagagattctgggaggatccccaggacccccccggttgcagccatgtcaagactgatgcgaggaggaccccaactgtcacaagcaacatctgtcgaacacagccacctacctggggacagatcaagaagctgtcacagatggtggaagagaacctgaggaaagtgtgacaaccagtcataatgcgtaatttaatgatagctatgatagcggtgatcamcattgccatgagtattcctttagcaagggctgacacagagaacaattatacttattgggcatatttatcaatcttggctggcaataatgcctggatgtaatcactctatgacatagttacacatgctttctgatctcagtatttaccataataaatctgctcctataattgaggcatatcgccctcaaaaacctatttgtaaacagaattggacctggtcagaaatagtgaatgtacttgtttgggaacactgcatttgcagaacaggcagaggtgctgcgcaatgattcctatgraatcattattgattggtcccctaaggggatgtttaggttgaattgcacctctcagtctgcataccacggccacactatgttcagctggtgtaaacgaaatggtcagatggtagaaatggtaagaagtacggcaagagttcctattatctggaaacatggcggtatagtggcacctcaacctcaaatgatatggcctactgtaggagctaaacataggatttgtggaaactattaatggctcttaataacataaaaatttgggaaataattaaaaaaagcatccagaagaacactctacaaacttgtctttggatgttgaaaaattaaaagaacaagtatttaaagcatcccaggcacacctgaccttaatgccaggaactggaatgcttgaaggagctgcagacggattagcagctagtaacccattaaaatagataaaaacacttgaaggctttgtgatttcaatgatgattgtgcttttaatctgtgttgtctttatacagtctgcagatgtggctcccgactcctgcaagaagtagctcagtgtgataaagccgtctttgcttttatcgtcttgcaaacacaaaaaggggtaacatgttgggaacaggcccccaaatctggtcataaactggccccaaaactgtccataaacaaaatttctgcaggcctgtgacatattcttgatggtcatgatgcccatgctgaaggttgttggtttactggaatgagggcaaggaacacctggcccacccagggtggaaaaccacttaaagccattcctaaaccataaacaatagcatgagctttctgtgccttaaggacatgttcctgctgcagataactagccagagcttatctctttgtttcggctcatctctttgtttctcataagaaatacttttagttaatctataatctatagaaacaatacttatcattgggtcgctgtcaataaatatgtgggtaaatccctgttcatggctctcagctctgaaggctgtcagccccctgatttcccactccacactctatatttctgtatgtttgtctttaattcctctagtgccgctgggttatggtctccacgactgagttggtcttggcatgagcagatgttccagtaggcagaggctgagtctctaatactgagttcaatgttaccactgcatacctggcatgttgaaccccttctagcacaaaactactcccatctgtgaagtacttgacatctgggtctctgaggggtctgtctgtaagatctttccaactggagagtacctgcatctaccattttgacacagtcatggaggggagctcctggttcaactgagagcagagtagctgggtttagggtgttcactctttctaaaataatgtaagcatttttacacagaagcctgtggtactgagtcatcttctggtttgataaccaatgatgccctctttgatccatcaaagttataactgaatgtggcacccagacggttagctgctgtcctaaaatgaatttgctagcttcttgtgttaacaagatggtggtggctaatgccttaaggcaaggaggcaatcccagcaccatggagtccagttgtttggataaatatgccactgggtgatgccatgaccctatcacttgaatcagaacccctacagcaattccttttcgttcatgaacatatagaaagaaaggcttagttatgtctggtagtcctaaggctggagcctgagttaaagcttccttgatctgtttgactgctatttcctgattagtttccaaaaggaggggctccttttctcccccctttgtggcttcatataacagcttagccatcagtgggaaatttggaatccagatgtggcagaatcctgctgtccctaaaaattctcttatttgatgtcgggtggttggggttggaagcacacaaatggcttgctttcactcatagccaagccggcattccctgtggctcactatgaaacctagatatttaacctcttcatggcaaatttgggctttctttttagatactttgtaacctgctttctacaggagatagaggagatcctsgtttccctgataacagtcctctcggtttggggctgccacaagaaggtcatccaagtactgtaacaaggggcagttatcatttggtggggtataggccttgaggtctgaggccaatgcttccctaaagattgtgggagagtttttaaacccttgtgggagcctagtccaggtgaactgtgtagcttctttgtcctattgaaatgcaaagataggctgactaattggtgccaagtggatacaaaagaaagygccctttaattctaagactgtaaaccaggtagcacttgctggaataagtcctattaaagtatacaggttgggtaccactggatggatggttactgtggcccggttcacaacacacaagtcctgcactggtctatactcatcagaccttggtcctggcagcagcttttgtactggtaaaagtggaatattttagggcgactggcattggactaaaatgccatgtttatagagccactctaagtgtttacagatgccccatacagccttttggggaactgggtactgacgaacccgaacaggagttgctcctggttttaattctattactactggtgcctgatttacagctaacccagatggattgtcttcagcccaactccaggaatttctctaactaactgaaataatttctcttcatcctatgtacaaggctgcgttggtgcctgtagtttctttccataaagtctccactcctcagcctgtgggatgatagagattaacaccatggccttcgggtgacttagatttaaagtcatatcttcctgtgggccaaaagtaacctgtgcgtgcagtttttgaggtaggtctctccctaacaagggaactggacggtttaggagctataggaattcatgctgaacttttcatcctcctataacactcctccttgactggcagaatggcctcttctctgagactccagtagcccctgcaatagttttatagttcttggataatggcactaagggttgagttactacagagtgttcagccccagtatctaccataaagtccatcaattgtcctccaacttctaatgtgaccataagctcctggaggcccaatgagaatgatcctggtctgtcctagtcctcatatccttcagcccctgccagcccgattagatcagtatctggttcctctagggtgcagcagcccctggccaatggcctctttgtctcacagccttggccatttccctcattgccttttggacattcatccttctagtgttccttctttttacactgtgcacattgatccttctctagccttggtcagctcttgaatccctgtctaactagacctcttccacatccacgtccgtgtccatgtcctctcacattactaatctctctttctataagggctgctgccaacaaattggcctttttcttaagcctctgatctgcttccttctttgcctcctggtcacagttaacatacaccttagtggccacttctataagctgggtggcattcatgcctgagaagcctcccagtttctgaagctttcactttatgtcaccctgggcctgtcctataaatgatgtatttaccatatgctgatgttcaacagcctcagggacaaatggggtgaaaagctggtataccccacagagtctttcataaaactggctagggctctcatcacttccctgaagcacctctgagatctttcctatattgattgcctcttttccaccatcccttagcccttgcagaagtgcctcttagtacctctgcaaatgctgaagctgggtcacatcttccaggtcccagctgggatcttggtctgggaactggcccggagtgtatgcctgagcattcactgtgtctgctggtgcatgggcttcaagctggtggagagctgcctgggttactctcctgtgttcctcagtgttaaacagtgtgagaagaagctgcctgcagtttggccaggttagattgtgtgtcagaaggatggactgcatcagatctrtaagagcttggggattctccatataggagggagtatggtgtttccagtttaagagatcagtggttgaaaagggctgatagatgcaagtccgttgccccccctggacttggccttggtcatcacaataaatgggtcctcacgtctccctgagaggcacttgcatagcttaagcatggtcagatctgagacggcctgcttgactatcttgacttccttccctggcctctcgaggctccgatccttccctttggggtgaaacctggggtgtgctagctcctgaatttcgttcttggggggctgttggcctcagcaaagggtggaacacatggaggaagaatctctgctccttctggcagctcctgcaagactggcttcttttgcttcctctgggactttccctttaactctgtgtctgccagcgaagctgctcttactttcatttttggctcagctcaggccacaagtgttttctgataagctgctaaacagggctggatccaggccagtcttgtttgtactatatttaaccatgagtcaatataagaaattgatctggatgcccaggctgtcctccgacccctgtcaccaccttaaatacatggccaattatttccctgtctatagttcctttggtcagccatccaataccaaaaggaggccattctaattcacagagagttctcaacctttggggggtcagcttaactccataatcccctgcaaaatatttcttaaaggtctgtaacttgcactccaatggagtgggttttgatgactttccttccattcctccctttgtggcgcagtacactcactgttccttttgcctcaggctgaccagactgtctcctattgagggagttttcagatgccgcttagctttggaggggttcttattcccaccacaactctgagctgtggggcagctcctattagttgcatgcagcttgccactagtccaggtcagccccacactttgcttggagcacacagtgcacgctaagagatttatgactccccacatcactccccgcattggttccttttgaaactgtttctttcacacactttcacacacctccccactcccagttcctgtgttcctatttagggtagtgagccactctcaccacctccaatttccttttcctaaccaacttagtgagccactctcgcatcctgtgttggttggggtgtgagtttaatctaaattggtgagccactctcactgctccctacctctctgggtcggattatgagttacaccccaggaggtgatcaggctccccttctgtccttatggaacaggtcctgccttgggccccaataccttaccgtggttcctgaagcatgctgctcctggtaatcctcctgtagcccctctcaggttctgttgcactgctgggtaggggcactgggtcacaggagagcctatctcccctctgggctgaagttctcccagccacgcctggggtcacagttttcccttgacccggggctccagccccacaggcaaaggagatagtaagcctgtcatctccactcctggctggcttgccaaaatgttgtggtaaactgaggaccagagagatcgaaatggggaatataagaggatgtttatttaaggcacgcaccggctcagtggattcacatccaaaaactaagcattgaacaaaacagagtttagcttatataggcttgcattcaaaagcaaaacaaaggcagtgagttttacagtgactagtcatgtaatccatagcataactgctgaccttggcaataacctgtggccttgcatagctagtggctagcagctgcatcaaaagaaaaacaggaactttgcaaatcctactaaatacaagcattggcaaacatagtcataactaatagtacaatacaggagagacagtaaaggaatttttcttcttttaaccttgcttgggggtgtctggagttcatttctgcaggctaggtcaccacgacctgtctatacccttgcctgcagcagagaaaaacttgtgtttctcacttcacctttaattactgcatttattcrcttttcttggagtgaataaatgcagtacttattgttattattatttttaaatttctgtctcatgcctattgggctccatagtagaattgtgagtggattgtatgccacaattacagtattagagcattccgggtttttctatgtatttaattttactagtgtgttttgtacttccatttttttcacattagcgatttttttttcagactgaagaagtcacttgaacatttcttgtaagatgggtctggtggcagtgaattctttcagggctttttttcttttgagacaggatctccttttctyacccaggttggagtgcagtggtgcaatgttggctcactgcagcctcagcctcctgagctcaagagaccctcccacctcagtctctctagtagctgagactacaggcatgcaccaccacaccaggctaattttgattattttttgtattttattttattttattttttttgtagagatgaggtctcaccatgttgcccgggctggtctccaactcctggactcaagtgatcctcctaccttggcctcccaaagtggtgggattataggtgtgagcccactgttccaggcctggtacgttagaatcatatcgggagcaatgacaaataagaaatgatgtttagagcccgggcaacatagtgagacccctgtctttacaaaaaactaaaaaattagctgggtatggtggctgatgcttgttgtcccagctacttggggggctgatgtagaaggatggtttgagcttgggaggtggaggctgcagtgagcagtgactgccactccagcgtggatgacagagagagaccctgtcaaaaaaaaaaaaaaaagaaaagaaaaagaaagaaatgtttaactttctttgattcgtatttgcatgaatgtacgctttttttttttttgagagtctcactctgtcacccaggctggagtgcaggggcacagtcacggctcactgcagcctggactattgggctcaagcgatcctcccacatcagcctcccaagtagctgggaccacaggttcatgccatcacacccagctaatttttttgtatttgttgtagagatggggtttcaccatgttgctcaggctggtttcaaactcatgggctcaagaggtcctcagctttgaactcccaaagtgctaggattgcagatgtgagccagcatgcctatattaattttgttttgggtgggggggtggtgagaaaatcactttattctaattaacgctcaaacaataaaattacaacagctcgtttaaggaaaccacagaaatatttgtccagcccaaaattctataccatctcggtgaaattctacacattgagaacaccctcttccattgtaattctgaagcaggaaagatatgaatgacagaggagaattttaactgatggttttatactttatacctttactgtcaattatattttatgctaaattaacttggtcatgagagccattttcatttcttcagtttggacttcttgattaggctattccatttgcaaatctgcactgtttcagcacctcattgagacctcacagagctttatgtcatcctggttctggccacgctccaaaaactgtttcatctcagaagcaaggctgctgctgctgtgctggccgggttccctgaggttcttggtaagtgaggccaggccttggaggctcagcattatttcttccactaaagccyccagtgtgtgccccacagtagagcctgtagcaatgccagctgcagtggttgccatttgggccatcagagctagctaccaaggtgcagcagcacaaaagccagttgcagagggtggggctgctgctgggggctgagctgtggtgctgggttgggtgcagttctcatctcaggtgcccggctggctggaggggccatgcaagtgatgatgtggcttccatgcagcattatgactgcacagaggctcagcctgtgaaagcctgcaaagagcccaacaccataaatatgttacgaatattatttcaaaattgtatgaggtttctaaaaagttgatatatcttggtacatgtagtgaattgctttaatctgatgcttttctgcatagagcttttagctctgtgcaaatcctagagtgttatgtcttcaaggatattcatggaaagaaccaggaattatactcttgaatagaggtttctgactgctttgtagatcatatcattagactaagtaaaaacttacagaacactaataaaaaactggtgtgttcgtgaagatcactaattgtgttagtccattcttgcactgctataaagaatacctgaaagaaagtataatttataaagaaaagaggtttaattggctcaagggttctgcaggctgtacaggaagcatggctggggaggcctcaagaaaccttcaatcatggcagaggggaagcaggcttatcttacatggccagagcaggaggaagagagagagaggaggtgctacacacttttaaacaaccggatctcatgagaactcactcactctcatgagaatagcaccaaaggggaaatctgtccccacaacccaatcacctcccamcaggccccacctccaacactgggattacaacttgacatgcgatttgggacacagattcaaaccatatcactaactcaacatcaagcagaacaagaattaattacatgggactgaactgatggaggagtgaaatgatttttatgtctatttgtttgaaacattgctgattcttttcatgttttgttttgcggaatcaagaaaactttatttcttttgagctacttgtaagtcacagaaattgggtaaaatatactgttttttttttttttttttgaaacagagttttgctcttgttgcccaggctggagtacaatggtgtgatctcggctcactgcaacctctgcctcctgggttcaagtgattctcctgcctcagcctcccaagtagctggcattacaggtgactgccgccatgcccagctaatttttgtatttttatcagkggggtttcaccatgttggccaggctggtctcgaactcctgacctcaagtgatctgccctccttggcttcccaaagtgctgggattacaggcatgagccactgcacccagcctaaaatatacttttgggagcagattgagacatttacctttctctctacctgatttctccagaattcagaaactatttgtgcgtattcttacattttggcaatatagttatttgcataagctcagtaagaatccattttttttaaacaggacgcaagtggagacactgttttcttttttaaaccaccatttgactggaatgacatattttctgatatgaccagactgctttaaataactgaagttgacttataaagccgatagacatggggaatgactggcctggtaccttgtctacacagttcccttataaagttcctgatcttgtggtaagaaaagaatatcagtttctggccacatatggtggctcatgcttgtaatcccagcactttcagaggctgaggcaggtggatcacaaggtcagcagtttaagaccagcctggccaagatggtgaaaccctgtctctactaaaaatacaaaaaaattagccaagcatggtggcaggaacctgtaatcccagctactctggaggctgagtcatagaattgcttgaacccgggaggcggaggttgcagtgagctgagattgcaccactgcactccagcctgggtgacagagcaagactccaatttaaaaaaaaaaaaaaaaggatatcagtttctgacaggcacaggaacctcaatatattttgagacctagagaagagaggaatttatctagtttgtacaggtaagacaggtacagtctgatggcgaatccttggcttggtcactgcactccagcctgggtgatggagtgagactctgtctcaaaaaagtaaaaaaattagctgggggtgatggtgcacaactatactccttgttaattggtgttctcacacacacacacctttggacactaggctgattatctctttaggatgagcccatggaagggtactcactgggtcactggatgtgctcacaatgtgctccttacctttctggctgtgagtcccttcccttaaagttctcactaccccaggccccccaagggtggtcttttcagaaaaaggcctgttcctgtcttatcctgtataaaaccttccaaggcttcccattgcctgcagggaaaggtccaaacttcatcctggcccagcctcttgccagccttggtgctgcccactggctggagcaccacatctccacttggccttgagttcatctgaaaaatggggacagattacaccatccccttcacattgccaactggctaaagaagtgaggaagttaagcatttagcacagagcctgtctctttgtaagttttagctggtagtgattgaaaccgtgaactccccattgctgagaccagctcggctggggagaccctaacccagtggcgctagaggaattaaagacacacatacagaaatatagaggtgtgaagtgggaaatcaggggtctcacagccttcagagctgagagccccgaacagagatttacccacatatttattagcagcaaaccagtcattagcattgtttctatagatgttaaattaactaaawgtatcccttatgggaaacgaagggatgggccgaattaaaggaacaggttgccctagttaactgcagcaggagcatgtcctaaggcacaggtcgctcatgctattgtttgtggcttaagaatgcctttaagctgttttctgccctgggcgggccaggtgttccttgtcctcattcccgtaaacccacaaccttccagtgtgggcattagggccattatgaacatgttacagtgctgcagagattttgtttatggccagttttggggccagtttatggccggattttggggggcttgctcccaacaccccattttgagtccttaatctctattatcagtaaataatgttcttttcaaatgattgacgtaactcctgcaggctctgcctacatctgtccactggcaattgacactttgttcaagccccacacaggagcacttatagtggagtgtactaagagaggatgtctcttagtcttgggccacagaagtgaaattgatattttagttcagataggaaggatggagaggagttggccaggacaagagtgggggcccaagttaggcaagcagaaggaagagcccagggcagctcctgcatgggtccagctccctaggtggtgtgaagcttggtgagcaaggggctaaggaagccgctggggcagagccacatgagctctggccgagggagaggtgaggatggcaaagcaggcaggaaagggtggagggcccagcaggttaggcaaggagttcagacagtcgagggatgatggaaagccaatgggggcaactttgctttgggatccaacaatgactgttggtacccagctctgctatttactaggtgagggaccaaagacaagttacgttctctgagccaatttcctcatctgcaaaatgagaataataattgtaccttctttggtggtgagagctcagtgtaatgatgtatgtaaaaggctctgcatgtcctctggaatcagcaaatggtagccatatataaataaatgcagattctggatccagcccccaaagtaaggaaagactggtccttaggtgcccttgctggaaaaagtgggatggaaaaagtgtgatggaaaaagtgtgattcttttgttttttgtagagtctcactctgtcacctaggatggaatgcagtggcgcgatgtcagctcactgcaacctccacctcccaggttccagcaattctcctgtctcagcctcctgagtagctggaactataggcgcacgctgtcacgcctagctaatttcttttgtattttagtagagacggggtttcactgtgttgcccaggctggtctcgaactcctgagctcaggcaatccgcccgcctcagcctcccaaagtcctaggattacaggtgtgaaccaccatgcctggccatgattcttgataaagtggctttgtaggattcttggctaaaactcggctcaccaggccaagacaaggcatagttgaaaggaggatgcaaaggagcctgactccactttagtctaggagggacgcttgtcagctgttctatccttagcatccagaagtgagtagcacgcagtgggcctttggtcaatcactggtaaattggtaaatgaatgcaccatcctgagaaattttcttaaaaaaaaaggccctaattgaatgagagagatacattttcctcccttagctttccaattcctggagttaataaatagaaacatatgtttttcctagaaaataatacatttgttaaaacagattcaacctactttcattttctatgtcagcaaatagtgaggaaataatgtttttagtgttctaggtgatgtacttttctaacatgctttttatttgtatgaaataaaaacaggattatttggaaacaaatagctatccaaaggcacataaaatatgtctctcatactttccgtatcagtttctggtggcagatgtcaacctaagcagtacattagaaccacttgggggctttaaaaaatccgaatgccaggaccacacttagggcaattaattcagaatctctgaagctgggacccaggtaccttcactttgcttttttttttttttggtatttatttcattctattttctgtataactttaagtacataaagatttatttccacaggatcaggaaatgggtagaaatcacaggacaatctctcttcccaccaaaaaagttgcrtattttggtaagtgtttgtcctagagggaaaaaactgaaatttacattagcagtgctgtgsaagattcttacataaatcaagacctaaaagcagcttgcagtggaggttttggtcccctgttcaggtgcttggacagaagccataagctggtgagtgtgacagggaaaaggaggcagtgaagacaggtgacaggcacctagcagggaaggaggattcaggaataccagactccttggaatggagtgttgtttttcctttttttttttttcatctctgtaggaaggtgctgggcagggatcccagagaaagmaagggtygaatactcctttaactgccctggatgaagggcactgctacarcagctagtacyggagactctcctatctcatggttgaggcagacccaggatagaatagtgaataaaaggaatgcttataggaaacaattttgcgtggaatgctagatggccaagcctcagcctttggtccagtgcaatccttgcctcacttgtcaatagtgaaaaattagtttggttagaagaaccatctggaaacacaccagcttctgctaccttcatgctcattgtcagaaaaagattaaccagtgtgaacgttctgatctgttaattcctgggactgttttcttcccagtggactgtttgttggtagaataacccccaaagctcaaagctaaaatgcatcattagtcctcgtcggcagttgagctgatttggaaaagctgcaccttcctgcagaagatcaactgacctgctatcccactgcacatctgaggtatatttcagtgaaggcaggtagctgtgcttttcagagcagagaagcagttttaagagcagaaaggtagaggaaatctagaaaagaaccgtcttgatacagatttatcccatggtgtgaagggagggcaaagaacccagtggcacttcgcttatccagcaatttctgtcactgtggcgacaaacttctgcccattccagagggtcttgaactgctcaggaactgggaattcattaaagtcaccgccttctgtaggaatgaggacattcatctcagaagatttggcactggctatttcacaatccagggaattcttgctcaggtaagcatggcagccatctgttttgttgatggaaatggttggcactttactcatcacctgaactttgacatccctactgttgattatctccacaatgcccaccatatcatcgaataccagaccaagtttcttacaattatctactgtaatggagttaattttgcccttgatttgcaacatcgtgttgacacacttgtatatgtaagccgcctgtttcagctctgtgtcatcaatcaccagattggaaacattttcctgattttccactctccacttcttgccctccagttcaagtacagctggctccttctttgtggctggtttggggtttaggtgcagagaatggcttggggccactgcgtactggaccactctgagccttcagggtagggttcttgtgagtcttcatgtcatcagatacacgtttcagggcatgtgtgatgctctccccctgattaatctgcgcaaacagtgctgagagggaagcggactcatctgagcctgaactgacagagactagtggaggaggggggcctggtggtgggggaggagtagctgatccagcagagggtccagatggcagtccactcagttcttttgtcacaggccccgttttgctccaggcagtccggtggtatggaactccttaatgtaagcctgcagctctgtgcatatacttaaataagctttgactcagtctacatgcttcttatccacatctttgtactctttaaggactcagtttgtataaaacacagcagcatgattcatttctttcacataagggccaggattgggagccatagccacccagcctagggcctggatactttcactgacagctgacagctgattaaacaacttgctgcctcggttcttctcccaaaaggttatcacttctttgatctgctctgagataggtgccaacaratcggaaagcttattacctgccggctattgacactgagaagctgtaaccaagagagctcactccaacttcaaaactgtgtgtaccatctccacatctttctgcacgtcttccccaatctctttactgatcttcaagtactctgccacagggcaggcaagcagcgagtcaaatgcctgcgcatrtggagctgctcctgcttttgaaggactatctccatatccacggtgcatgtcagaggtatgggatactgcctccaggcggcccactgccctgtccaattttttaccagattttgcatgtcagtcataatgtatcacctcccgactgcgatcagccgctctccacttcccgcaccttcacttttcaaagattcccaggtgatgccaacctgctctgcggatggagcccctaagaccccaagcggcccagactacgtttcccagaggcctccgcggcctcagccacttccgcttccggtccagcctgtctccgcgtggtgcgagcgctgcaccagcccctggctggtggttactgtccgaacggcgtggtgtggtcgctgactctctgggcgtgcagctccgcagccctgccggctcggttcggttcgtgagcggccggggtcaggctgggtccctgaagcctcgagcccctggcgggtgctccccgcctttcccaggggcgggtcgaggggcgagccggggtgggaggggaaggcggcggtgggcagtgcccacccgcagtggctgcgccgtgtggagcgaccgctcgaggctggtgcatcacagagcgctccagccttgcgccccggccgacagattgggccactgacaaggccgtcccccggtgctgccaaaagtgtttggcgtggagctggctgcagtccaggccggatcccagcagccgttccctttcctttcttcccgagcgtacccacctggacctgtctgcccacctgtggagggaacgggcgggcggggacctggtctagagggcagattctagctaggctagggcacggagggacttcctcaatttcctctcttctttcccagattgacttacgcaggattctcagcccttgcctgggagaacagttcaggagacagatggccccaagagcccagatccaggcaagtttgatttttccatttcttgagaaaccacgtgtttcagcgaggtggggtttatgcctcttgcccggacaatgccctgccctgtgtgtggacaaagctacccgaaccaatcctggatgggtcccgcgatttccgtcctgtctacccattacgtagtcattcaccaagtagattattgctacccatgttttctagagtgctagaaacagaaaagtgctttgcaaactggcagacgatgaaaaaaatacacgttagcatgtaaagacgtaggccataaagacatagggtgatagcagtgctctcttgacctttagtgtgtggtagggtgggaggggtggagtagtgggcgccttagttcttcctgaagaataaatgagatttgcataattgcagaggatactaggggaaagcgctgcctgaatgaagtcattatggcgggaccatgaacaaactggtctgagaaagttggaaacattcatggtctagaatcccagactggagtttgcttttatcctggagaaaactaggttttgaaggattttgagaagctgattaaataattggtattttgaaaggaagtgataaacatttgagtgtctattatacaaataaaattaaaaaaattaaagatcacctacatttctactgctctaagtcaagtaatttcatttgaaacacacttttcatttttttaaggcttactcattttttcttttagtatttcatagccattccaatttgttctagtttcattaccactttttgtggcttccttttatactgtgccttcaaccagccctgggaccttgagcaagttcttccaactctctgaacctttgtgtctttagctacgaaatagattttactttatatagttacggcagaaatttagagagatgatatgtatctcagggtttagcaccgtggctggtacatagtaagttgttactcttatgaaaagcaatttttttttcttttttaaaaatattctgccccagagtcagatcatactccctgtaaattctcggataaagctaatcactttccatgtcttttcaaagtttctattcatttgttgattgaataaagcctgaacacttctgtgtcaggcagtgtttttgactgggaggcagcagtgacccacactgtccccctggagctcacattagagaggatgctgacagtcagtgcaaacctctcctgccaggtggtgagaaatcctgtgaagaaaagtgaaatgggtttcgagactgagtggcagaggatggggtggagaaatagaagacctttttgatgaggtgacatgaagggtggagtgagcagaggctaggcctggaggagggagcaggacaggcatgcaggaagaaccygctcaagggaggagtcgcacatcccctsagccctcagcttttacttgttggtttccatgagcactgttggaactgtcagaagctggctttgaccaccttgcttccttctcttgggatgcctccctcaggggttcccggatgagcagaattgggtttggttttgcagggaccgctgacatttggggatgtggctgtggcctttaccyggattgagtggagacacctggatgctgctcagcgggccctgtacagggatgtgatgctggagaactatgggaatctggtgtctgtgggtgaggatggctttctccttgactcaggattggtctgctgggcaactttgtgttttcacagggtgaatggtttggggtattgaaaaaatcttaaatgatgtgctttttgttttgtttttcttaagtatgggcttagaggctggagtttatgccccttacacccctcaagaaaggtcagagccatacagagttaagatgggtagctttgtggtgccaactagcccagttctggaatgtttctgtgtcatgattcatctgcctcccaaaataggagtttctcgtcctccaggaggacctggttttctagttgactttgccccctccctttgctttacttcatgagttggacatcctgggtgccaccctctaggcctctctgacctgtccatgctcattgcagatgctcaagttgacactgaggtctggagtgactgcttgtgcttgtaaccgccatcacattccttttcattcattttttttttcttcctctaagatcctttttctttatgaacagggcttctctcttccaaaccaaaactaattactcagttggagcaaggggcagagccctggactgaggtgcgagaggctccatcaggcacacatgcaggtgagtgggtrgggaacatcccagcagaagctgagcacacggagcagtacgggggttcctgagtggaagctcatctttgagtgccctgttggtgcrgaaaggcactggtttcctcttttgatgtcatcctcctgtcaagtggctggccgcttttctccccagtctttctgcacttgggagggctgctgccttcctgagggcctcaggcccatctgtgccatctcccagccttctgaaatcctcaarctctttatgtgatttttctctctctctttccaggcattcaccaggtatcttttgtttctttctacttctgttccattttctttctttcttttttttatattttttgagacagtctcgccctgtcgcccaggctggagtgtaattgtagctcactgcaacctcaaagtctggactcaagccgtcctcctgcctcaggcccctgagtaggagtagctgggactacaggcgtccaccacaatgcttggctaatttttaaatttttattttatgtagagatggagtgtcgctatattagtcacggctggtctcgaactcctggcctcaagtggtccttccaccttggcctctcaaagtgctgggattacaggtgtgagccaccacgtctggcccatgttcattttccattccttacccactctctcatggaagcttgctaactcactatataccacttcctggtggtagttgcagattccaaacataagcatggttttttagctctcaggtaattgcgatttttggcaaacacattgttggggaagcattttctttccttttcttagggatcttcttttatttgtcttttctactgtcctttgctcttggctctcatttttttctgtgtatactttgtatatgtttttgtatgtcactttctctgtgccatagttcatttctaaatctctaagcctgaatatttctctcacctaaaatatttatcctgccagtattttttcttctaaaactctaattgtcattttgcctctatcctcttcaggagaatgtttataactgtatttcatgtaaaataccagtaatacatagtcttgcttaacctaggtctttgctggttgtgggtgggatgcttttgaagtaattccttttattcttactgtgtttaacatttcccccctaaattcttgtgtagattctttatatagtaacaaaagtcactcagtcttctttattctttgttctttctgttttaattttggttgttatttgaaatagaatgtttaaaacttggatgtaatgaaaacaagcaatgtttcccctaatatttctttcatctgcttagaggactagtaaatctttctacaaagacttcacaaccagtcagtattttatgtttttttttgtgtgtgtatatttccctttctgttagttgttagacatgcttatggtaccacattcagatggttcaaatggtatgcagtctccttcacatacctttctcatcactcagttcccctccccagaggcatccctgtgtcagtttcttgtggagatttgtaggtgtgatgtatactttgtgagagtatccatgaattctttaagcacatggtagcacactcttttgcctgttactttggcatttatgtcttagaagtcatttgacataactatattgtttagagcttctctctctctctcctctctctctttctttctttcttttggagacagagtctcactgtttcctaggctgaagtacagtggtgtgatcatggctcactgcaaccttgacctcctggctcaagtgatcctcctgcctcagcctcctgagtagctgggaccacaggagcatgctaccacacctggctaaatttttttatttttaattttatttatttatttttaaatttttttttgtagagatgagatctcgctattttgcccaggctggtctggaactcgtggcctcaagcaatcctcttgcctcagtttcctaaagtactgggattacaggcgtgcatcaccatgccagcttatctttctttttgatgcctgcatagtgttccactttatggatgtcctataatttatgtaatcagttatctttagtggacataatgactctgaacaatgttgcagtgattatcctcatacacatcaattctcttgtgtacaagtaaatctatagaataaattcctataagaattgttaaaggttaaaatttttaaatccaccaaatttggtgggtatttccgctattcataaagataatacatgtttayactcctaatgacaacatatgagtgccacttttatagcttgtcagcagtgtcttatatgctttgatccttgcaaatctgagaggtgaaaatattttattataattttaatttgcctttctcttatcaggagtgtgatttagcatgtttcaacattttcagcaacccttgtatttatctttcctgagaactgcctgttcagtcctttgcccgttttactgttagattgttggtctttttattgtcagtgtgaagggttctttatacattcaggaaattaattgtatatcatatatatcacagattttttttaaaagtttgttttatatcagctttatattaacaaaggtaatgatggatatgcttgtctttgcatctttgcattgtgtctggccttctcatttgagctggctgttgagttgggatacacatacattgttatttaaaggaagtatttcattcacatgttttgttaagaaattttagttttttaaatcaagcatgattgctgaattttattaaatgccttttcaaggtatatggaaatatctgtcttttccattttgatctgtttctgtggtagattttattctcatttatcttggccatgacacattatatcattctctgaatatgacagtggatgattctgtctgccaatcttttatttaaatttttgcactgatacttaaatgtatttatgttttctttttcatctgcccattttcattgggctttgattttaattttgtaatactttcataaaacatttttttggtctttcatatttttatcctttagtctagtttaactcacatgatagctgttccctaaaggtttgggtcctttgtcccgtttttgcttatttattgtgatgtggagcagaggggaggaattgggggtactttttttgacagtgttgtcaatactgacttgtccaaatagattttctctctctaggaaacagttttagtaatttataatttcctaaaaagcatccagtaattcaaggtcataagttacttgtgttgaacaaagtagctttttataactcttagtaatattctcyacatctttggttacttttccctgatttcttactttgtcttttttccatttcctatattttcctatttcccctttattagctctgttttatttttttgaacaaaagcatttggatgtatttattagtgttactgttttctgtgttttgaatcttaagttccttttcccttttgctttccttgggtttatttactttctcctaaacattttagttattcattcattgatttttcttctttcttactgatgtaatataaatatttaaagccttaaactttgtctatgtaatgttttagttatattcagtaggttacagtatgtagagctttcattatcattttttagatattttacaatttgtgttttgatttctgtgattgaagtactaagagattgataagctagactctccttttcttaaagcctttaaaaaaattaacacatatatagaaaagctgataaaatatgtatacagcctaaattagtattttaaaactctgtacccatgtaaccaaaacttaggttaaaaaatagaactttggcaatacccgagtaaatcacattataattcctcccaattattgtccattctcctccccttgaactaacactatagtttatttttgcctgtttttaacttcatgtgaatggtatcatatagtacatataatttttggtctggcttatgcataacatgttttcaaattcatttttagttatttctttgctgtggatcaatgcttctgaaaactgtagcgtgcctcagaatgcatgctgcagtacagttgcggggccccctgcagagttctttattcagcaggttctcaggcatgctgatgctggtgctgtggggctggagcccatgcttggaaaatcactgttctagagtgactcaytgtgtgactctactgcagtttctctcttacattcagatgcatatatggcattttccagcttttggctattgcaagtgctgtaaacattcttatactttattttttggttcctacgtggctacatttctgttgggcatgtattcagctttagtatataatgtcagataatcttccagagttttgttcccagttatactccttcatcagtgtgtgagagcactccttgttccatgtcctggctagcacttcctgtggtcaatcttgtgaagttagtcattctggtggatgttctgtgtgcctcattgtggttttcatatccatgtctctatatctaatgaggttaaagacattttagggctgggcatggtggctcacgcctgtaatcccagcactttgggaggctgaggtgggcggatcacctgaggtcaggagttcgagaccagcctggccaacatggtgaagccctgtctctactaaaaatacaaaaaattagctgggtgtggtggcacacacctgtagtcccagctactcggggagctaagacaggagaatcactcgaacctgggaggtggaggttgcagtgagctgagattgcgccattgcactcagcctgggcgacagagtgagactccgtatcaaaaaaaaaaaaaagaccttttagaatatttattggtccctatagagcatctctgattgggtaactatttgaagagcctgttattgattacatgtattgtaccatccctctctctgttgttactgactgttaatggtcttgatgaatagcagttcttcctttttctgggctcaagcaatcctgtctcagcttcctgagtagctgggactacagacacatgccaccatgctcagctaattcaaaacatgttttttttctgtagagatggagacttgctatgttgcccaggtggtgggtctggacctcctggcctcaagccatcctcctgcctcagcctcccaaagtgctgggattacaggcatgagccaccgtgcccagcccagttcttccatttgatcaatccctttcttttttgtcagtgcttttttgtgtcatgctttatttaaaatgtttattttaaattatatattaacaattatttattaacatttattatttttgtgattttaatattttttcttttcccgagatcatgaagatattcttctgtgttaatttctagaagctttattatttggtttttatgtttacatttaccatcctcttagaatggatttctgtgcatcatatgagttagggtttatatattttttttctcctaaaatgtactaatgcagaatctcctcttcctcactgctttgcaagaccacctttgtcatagaagaagtgcccatatgtgtcttcacgttgccagctttacaatcagtatcttgaaattttctctagtttgatcataatacattaaacacatatcccatcaaaggccattggaagaatgtgggctgtttctgactgggcttcaccttcaacttacatttccttgaaaaaataagtcttagctctaatatccattgcatggaatttctccccagactactaagtataaatacatataaatatatgtatgtgtatatatctttaggtatagatagatacaacttatgtttataagaaaagcgcatttagtaaaataattggttggtgattgttaattttactacaagtttggctctattagtttttcagaacgtttttgtctgaatcatttcgctctgtctgtcttaggtcttgtgtctgtactttgtaaaaagctagagaaaattcacatagtacacccattgattggtaattttttttttgttttttgagacagagtcttgctctgtcacctaggctggagtgcagkggcatgatctcagctcactgcaacttctgcctcccgggttcaagcgattctcctgcctcagcctcccgagtagctgggattaaaggcatgtgctaccatgcctggctagtttttgcatttttagtagagacagggttttgccatgttggccaggctgggctcgaactcctgacctcaagtaatccacccgtctcggcctcccaaagtgctgggattacaggcatgagccaccgtgcctggcataggtatgttgttttttagatatgttaaaaatttagtttatagtaaaatcttattggcctgagaactatttttgttccttgaatattttttctgttttcttttttccactgagcaattaaatattggttcactcttaaatcctcacagagaactatttttctcaagttcttggtgacatcataatgttctcaaatataccacctgcagaaatctgccctagtagtaattatagcttgctttgtgactctgggctttctcctcaattttgtatttattctcacattgtcttttttcttttttagctgtttcctgtgttgtcttcctaacttggcaacttcttaggggctcactgcattctttaaatgcaatgtttatagtacagattcttttcttttctttaaaatcatacttccttttcctgcccttagtctggccatcttttctcagcaagaatcacaagtgggacacattaataatttttcataacctttagttatgtagaatagaacattattcaagtccttgcacaactctcactttcagcatttcaacataaagaacatttgaatttttaaaattttctttcagtcgaggattactggtttgaaacaaagatgtcagccctaaagcaaagcacttctgaagcatcygttctrggagagcgaacgaaaagtgtcatgatggaaaaaggcctggactgggagggcagaagctccacagagaagaactataagtgcaaggaatgtgggaaagtcttcaaatacaattcgtcctttattagccaccagagaaatcacaccagtgagaaaccacataaatgtaaagaatgtgggatcgcctttatgaacagttcatcccttttaaatcaccataaggttcatgcaggcaaacagccttatagatgtattgaatgtgggaagttcctgaagaagcactcaacgtttatcaaccatcagagaattcattctagggagaaaccccacaaatgcattgaatgtggaaaaactttcagaaagaactcaatccttttaagtcatcagagaattcatactggccagaaaccytacaaatgtaatgactgtgggaaagccttcrctcagaatgcagctcttactcgtcatgaaagaatacatagtggagagaagccttttaaatgtaacaagtgtgggagagctttcagggataattcaactgtgttggaacatcagaaaatccatactggtgagaagccatatcagtgtaatgaatgtggaaaagcctttaggaagagctcaactcttattagtcaccaaagaatgcatactggggagaaaccctatcactgcagtaaatgtggaaaatctttcaggtatagctcatcctttgctggtcatcagaaaactcacagtggaaataaaccgtatcagtgtcgtgactgtgggaaggcctttacaaagagctcaacccttactggacatcagagaattcatactggagaaaaaccctatcactgtaagaaatgtgggaaagcctttcggcacagctcaggccttgttgaacatcagagactccatactggggaaaaaccttataaatgtaatgaatgtgggaaagcttttccccgaagttcagcccttaagcaacataagaaaattcataataaagaaagagccatgaaatgtagttagtgtggcaaattgtgcagagtagtttattccttctgaccatcatagaggagacattaaataaattatgcatttaacagaaatactctgtacttctgagagaacacatcacttgtgaggatattcattgtgaggttctactagtgaaatatttgaagaaactaaatgtatgtcagtatggaagtagttatagcatactgtgtgctaattgaaaagaatgaggtggagctgtaaatactgtacaaagccaggcatggtggcatatgcctgtagtcccagttacttgggaggctgagacaggattgcttaagcccaggagtttgagtctgtaatgcactatgattgtgcatgtgaatagccactgcactccagcctgggcaacatagcaagactccatctctaagtaaaaaaatacaacagtagaaatatacccatgataatatacccaatatacccttgttaaagaagcaagtttcaggaaatctatattatatgcattcaaaaagacctggacaaataaagaccaatcttaacagcagttatctctctctctctctcttttttttttttttttaaaagaaactagctcttactctgtcacccaggctggagtgccatgtgatcatagctcactgtagttttgaacttgggcttgaacaaccttcccacttcagtctctggagtagctggggctacaggcacgtaccaccacactcagctaacagcagttatytttgatgaggatgtagtataggttgagcatccataactggaaaatctgaaatctgaagtgctccaaaatccaaaatttgtctgagcaccaacaggtacaaaattctacaccagaccttatgtgatgggttgcagttaaaatgcacccccggccgggcgcggtggctcacrcctgtaatcccagcactttgggaggccgaggcgggtggatcatgaggtcaggagatcgagaccatcctggctaacaaggtgaaaccccgtctctactaaaaatacaaaaaattagccgggcgcggtggcgggcgcctgtagtcccagctactcrggaggctgaggcaggagaatggcgtgaacctgggaagcggagcttgcagtgagccgagattgcaccactgcagtccgcagtccggcctgggcgacagagcgagactccgtctcaaaaaaaaaaaaaaaaaaaaaaaatgcacccccaagattccttattatttgcatgcaaatattgcaaagtccaaaaaagtctgaaatcctaaatacttctggtctcacgcatttcagacaagggatactcgacctatattggtatgatgaagtgaaattatgactttgactgagttctttgaaatgaaatatttaatcaagcatcattcatgtatcttctgtaacttagtatagttatcttcctatataagaaaactcagaagtcataaaaataagacaaatgccacacagaaactaaaagcttttagtttctgcaactagaggcttcgtagtattaaaatacaaagggctggacttggagaaaatattaccatcatcatatttaacaggtaacacttagactatttagagagtccttaaaatacataaatataaaaattccagtggagaaatggtcttggatgtgaatgtacagttgtcagaaaaagaaatataaatgattatgcctaccaactttgaccttttgacctaacatttctacttaaaatctaattaaaaagtaaaggtggtctttacagcattgtagtaatgaagaggtggaatcactgtaatatctgtcatcagaggaatgttgaagatacatgcagtctttggactaccatgtagtcactcaacatttaattaaaagacagtcctttaattaattaacatttggtgagttagacttttatgagctgacaggcaaagttgtctatgacattaagttgaaaaagatccaaagtaaagaataatggtatagtacttcttttgtatagtcaatgcattgcctgaatattttgtgataaaaatatatcatggatatagttcacaatgtaaaagcaataaagcaaacttaggaatgttataaaatagaaaagaaaggatctaagtattcaactgatgattgcagagggccagatttaatcaaaagaagcacggctgcacacacatagatgattgttggtaagaactggttaagctgctttggataacagtttggcaacatgaatgtaaatgtaaatgtatgttctaattgacccagaaatgccaccctcaaacatttaaggaaataatttgactaacttacagagcttgtattgctcatcgtcattggttatactaatatcctggaaagaggtgggagaaatatctaagtagggaaatgtttaaataagttatgaaactctcataggctagcatcccagttactacagatgtataataaaccgtcacacacttagttgccagtatttgtgttcacagattttgtgagtcaaggattcagaaagggcacagcaggaacagctttgtaactccatgatgtctggggtttcagttgggaaaactcaaggttggaatcaacagttggtcagtggggtcatttgaagcggccacactatgatagccacaagtggctactgagcagttgaagtgaggccagtctgaatggagactagtgtgttgattgaaaataggactgtaagtataaaatgtgcatcagatttcgaagactttgtataaaaaaagaaactaaactatcttaatggtttttatattgattatattttagatagattaaactcaatgtattaaaattgaattttaatgtgactactagaaaatttaaatttacatatgcggcctacatgtatggttcgcatgttgctatcagacaacacaactgaaggctcyatcacaaattgggtggttgatgctgttggctgggacctcagctagggcagttgcatatgaacacctacatgtgacctttttatgtggctgcataggcctcctcagcttggtgcctgggttctgaggagtcaggcagagaaactgttattgcttgttgtgatctagcatcagaaataacagcatctcggctgggcgtggtggctcatacctgtaatcccagcacttttagaggctgaggtgggtggattgcttggggccaggagttcaagaccagtcttggcaacttggtgaaaccctgtctctacaaaaaaatacaaaaaaattagccaggtctgtggcacgtgcctgtagtgctggggaggctgaggtgggatgactgcttgagcctgggaggcagaggttacagtgaaccaagattgcaccactgcactccagtctgggcaactggagtgagaccttgtctcaaacaaacaaacaataacgacaacaaaaaattcagtgtctctttctccatagtcaagcctgtccaaactcaaaggggagggaacatagaacatacttctttggaggagtatcagagtcacattgccagaaaagtatattcgatggaatatattattgcaataattttggaaaatatgatctatcatggaatatgatacaaccattaaaaaggataaagtggatatgttggatgaagaaataggttacaggacagtatctgaaagcttatggcagcaactttgaagtataatctttggagtcagggtgcaagatgcagcttacctcttaatatactttgtgaaaccactggctagttatgtagcctgttgaattgtctaccatgtacagataaaaaaaaaactagttttgtttaaaggaggtaattttataaagtgcttagctgaataccagatgcaaagtgcaaggtaaatgttagctggtgctgtgttagtgatactcatttctgtttttttttaaaaatgtatagtatgtatatatgtacatgcacacatatatatgtacacatgtatatacatatatttcacctatattttttttaaaatataaaattaaaatttctgcataaaaatataaaataaaaaaatttctctcatatatatatatgagaggtctcttacagaattgattaaagatctcaaaagaacatgctccaccatcatctatatcgtgtgcacaaggctcaagagggaccagtggttttacccactgtcaaacaccatgaacaaagcctgggtactggcttgtcttattgaggaaacctactttaacatatgaaaacgaataaaatatttcaaaatggtaatgataattatgggatttttggtaatgtatttcatttaagaagttttcatttaaaagaatagggtgtttattcaaaatgggacaagacaggacaataaaagaaagctgaccaatattccttatgagcatagaagcaaaaatcttgaatagaatattagcgaataaaatccagcaatatatagaattaataatatagaatcatgatcaaatggggttacggctggttcagtgtttggaaatcaatcaatgtaatctacattaaagaagattaaagaccaaagaggaaaaaccacctgatcataccaactgatgcagaaaaagcatttgacaatatacaatatccattcatgatacaagctcttggcaagctagtagaagggaagttcctcaaccacatagaggccaactatgaaaaacctacagttaacctcatacttaatggtgaaagactgaatattttccctataagatgaaaacaaggttaggatatctgctgtcactactcttatttaacataggactggcaatcctggccagtgcaataaatcaaaaaaaggaaataaaaatcatacagattgtaaaggaaagactgtaactgtctctgtttacaaaggacatgattgaatatgtagaacatacaaaggaagctataaaaagcaaatccctggccaggcgtggtggctcaatgcctgtaatcccagcactttgggagcccgaggcaggtggatcacataaggctgggagttcagaccagcctgggcaacatggtgaaaccccatctggataaaattacaaaaattagccaggcattaaagtgcatgcctgtagtcccagctatttgggaggctgaggcaggagaattgcttgaacccagaaggtggaggttgcagtgggctgagattgcaccactgcactccagcttgggtgacagagcaagactgtttcaaaaagaaaacaacaacaacaacaacaacaacaaaatctaataactaataagtgagtttagcaagattataggacccaaggccacatacaaaaattgtttctacacactagcaatgtacaattgaaagctgagattaaaaactgtcatttgcaatagttcataaaataatgaaatccttaggtataaatcaaaacatgcatagtacctgtacactgagaactataaaatgctgatgaaagtaataaaagacctaaataaatggagagacatgtcatattcatgaatgggaagattcaccatagtcaagatgtcagttctccataaattgatctttagatttaacaaaatatcagtcaaaattctggaaggattgttttgtagatgtagataagtggattctaaagtgttatccaaggcaaaggaactggaatagctaaaacaagttttcacaaaactagaaaaagctttgactcactttacacaatttaagactctaaagatacagtaatcaagactgtggtattggtggaggtatagaaatacacatcagtggaacaaaatagtcaagaatggacccacagaaatatgactagttaaaaaattttaaacgtgggtgcaaaaacaattcaatagagaaagcatagtcttttcaacagatggtattggagcatttagacatgtattaaaaatgatctttgaccaatacttcacactttacacatagattaactcagaaaggattatagagctgaaagtagagcacaaacctgtaaaaattttagaagcaaacacaggagaaaatcttcatgatctgggttaggtacagaattcttagacataacacaaaaaccataatccatgcagaaaaatattgataaactgcagttcacagttctggaaggtgggaagtccagtattaagtttctggcatctagtgaggaacttctcgctatgtcatcccatggtggaaggtaagagagtgagagagagaaagtgaaagtgaaagtaaaaggggttgaattccctccttttgtaacaaacccactgccgtgccaacagcattaatccattcactgtacccacatggccttatcatctctcattaggccccacctccccaaacttgcattgggaataagtttccaacacatgattttgggggaacaaattcaaaccatagcaacaataaaatatttgagataaatttaacgaaataaatgtgagacttgtacactgaaaactacaaccattccagaaagaaatttttaaaaatctaaataaatgcagggacactctgcattaatggagttgaagctcaaaattttaagattgcagaactcttcaaattgatctataggttcaatgcagcacctatcacatttgcagcagagttgttctgaacaattgacaaactgattctgcaatttatactaaaagaagaattgagaatggtcaaaacaatcttgaaaaagaacaaagaacaaaattcatcccagtttcagagcgtactatacaactactaagggggaaaaaacaaacttttccatctgccctcacaccacgacagcaatcaacacagaagacttctgtgaccaaatgtgtggggatttttcctgacagatagtgtcagaccccacaggttgagggctcaagcctataagactgcctacaacctctcagatgctaggtgcatctggaggcattctggaggtaagccctggccaccaaaacttctgacccaccagcttcaagttggggcccccacaatcacctctttgggttccatttacataactgctgtcaccacacaattaatttgctagaacagctcacagaactcagggaaacacctacttaaatttactggtttattcttaaggatattacaaaggaaagtgatgaggaggtgcctagggtgaggcatgtgggaaggggtatggagctttcatgy

SEQ ID NO: 6769 - DNA, 15371 bp, Homo sapiens
tatgtacaaattggaaataaatttactctgtccaccagactggagtgaggtggcacaatcttggctcactgcaccctccgcctcccaggctcaagcaattctcctgcctcagcctccagcgtagctgggattacaggcgcctaccaccacgcctggctaatttttgtatttttagtagagacagggtttcactatgttggccaggctggtctcaaactcctgacctcaggtgatccacccacctcaacctcccagagtgctaggattacaggcgtgagccactgcgcccagtcaacaagaacaatttatccaagaactctgttggtataactaagattatcttttttatcatataaaaaattgtcttcctataatccgtatgtataattgcataataactataaaatttggatgcctaagcatttatgtgtaccaaagggttcatagaatcaataatctgtactgtttccactgttcttcaagtagatttctagattaactatgaagtccaaaggaagactgtcagcaggatgatcattttttcttgcccaccagatgcacactcgcagcactcccctgccagcccgtattcccccatccgttttcctcatgcggaaattagggaagcaggagcgcacaggggtccacaaaggctgacaatcaaaacacactgaaatgtacctcaaggtctctactgagacattcagacattgactatgataaggctgtgcagctgaggtgcatgaatttcacgtgtatgcaacatgagagatatttgcaggaagttaagcttcacgatgggaaatgcctgtgtgggtgtatttgtttgttttaaatacttaaggatgatcagagactatggggggaaaagctgttcttcctaagagaaattcactctcattttctaaggaattcttcctctttcctctgcttccctgcaggaaacgtggagtgagaccaaagctgtgactccagtccacaccagagcccaggaagactcccaggaccctggagatgcctgaggaccaggggcttgtggtatgcgggaaggagggttctacagtcaccatgaggaacagcaattggctgtagtaaaatacggactgacaaaggcaggaaggcaaaaggcacccaggttcgcccaggtgagatgagaggcccagttcttccgaggtaggtgtggtgtccctcaaaagcccccagggttctgttgtgggcaccacagtgtctggaagtgtgtgtggttggcggggcggggggggggggtttgtccaaggaagggccttgaggctcatttcccctgcagcagcaggagcaaggggctggcactgggaagcctcgccctcgttgcagcaggcaggtgggtggatggttggatgaacagcataaccctgcagtgaagtctgtggagggaacagaggtgcatggatggagacatgcacacagcccaccagagactgggaacccccacacccacatggtcctctcatttatccagaaaggcgaacatcaggtttgaggaggaatggaacctaaaacaaatcttttccctaaatgtggagctgatgcgaccagttgtctctgctctccagttcctgtttctcacacagagcgcacctactgacctggcggtggcttgttgggaggcgattccttgcacgcccaagcccaattgcataggtcaagatgagacccacttctcaggcttcagttccctgcaaatgaagtagaacttaggacccccatacttcccagtgatcctagcaggcgtcactggggtctccactcttgccagttaacccagttgaccacattagggactgtcatgcctccccagtgacaatctcataaaggaggaagagactgtagacagataaaagcagcagtagatgaagcagatatgctcttgaagatgcatgttcatgagaacagacccaaatagactcagatggtctcactcccattgaggctatatagaacgcatgacaaagatatacatgattttcaaggccacttttcaagtattaaataaatgtatcacatagtgattaaaaagtgcaatctctaatcctgagtttctgctgcccaaaagatgtctaatagtataatgagaacatttcctccagggctcaaagtatgctccctatcaggtacaggccagacatgaggccccagtggtctggagcaggcaggaggtgaaaaacaggacacactgtggagcagagaatacaaatgggaggccgaggcgggcggatcacaagctcaggagttcaggaccagcctggccactatggtgaaacctggtctctactaaagatacaaaaattagctgggcatggtggcacacttctgtagtcccagctacttgggaggctgaggcaggagaatcgcttgaacccaggaggcagaggttgcagtgagccgagatcatgccactgcactccagcctgggcaacagagtgagactccgtttcaaaaaaaaaaaaaaaaagaatatgtacggaggacacgagtgatctcagaagagtctgctgaacactggacttgagcctggcacggaatgcccagtcccgctctccacccaaaggagctggacctcagatcaccccaaaccactcctggctcatggtggagcacacatgttccaaaacttaggaaagtgaggactgtatttggggcagagaaagaaaaaatggatcaggacaacatatgaaagatctaaagaaaataagtaaaggcttaattattgttttgaaaataatttgtcaaagtgtttgaggtttttttacagcaagctccataattcggtaactcaaaattatgttcctaatataaaaatgtcatttggaggtttaattatttgtaatttttatactttttagttttgtaaatttaagagttctattctgggttgatgaaagtagaaaatgtaaggtgtgggaaaattacaaaaacagaggagattctgaaataatccttaagaaaccacctaaattcctaggagaatttcacagtttcaaaggctatgaaatgggtgggctcaggcctagatctccaaggtacaaggagagccaggtgacacctgtgttccaggggaagagaatagaaaatggactgaggactgtctctgacagggtgagcagctggagtgggaaggagcgatttgggggacccaggagggtggagggactgggggctgggagctgagggcggggctgtgcttcagcctcctcctcccactgcccctcccccacccccaggagccctttgtgaggaggaggccccagctgtgtgatacaagcctgggccccagtccctagtcccaaaggggatgcccagagctcagttgcttgaaggcgatgggaaatctcgtcatccctctagggaagggcagggcaggcagggttgagagtgggcagaggattccacccccagctcccagaccatctgtggagtgcacaggagacgacattgcacttcagatggagaaaatgctctttcctctgaagagccctagtgccacatggctgagccctagctccactccctggatgatggatttcatcctcaccagtgtgtgtggcctagtgctcctcttcctattgctcctctacgtccacagtgacccaccctcacccccgcccgggaggaagaggagcagcagggaggtaaggagtcctcagcccagccccacagagaaagattctctcttcttttcctcccctcatttccacttttcctaagcaatgtgagacccttctgcgatgggaaatctcgtcatccctctagggaagggcaaggcaggcaggggtgagagtgggcagaggattccatcccgagctcatctgtggggtgcacaggaggcgtcagggcaaaaaccaacactggactcagtggcaaggaccgggtcaggagaggggtgaggtctctgtgggaggagaggccccagccctggctcatcacccccttcctggggcaggtgcctgggggcccagcctcctctgtatgatctgggtgtgatctgggagctgtgctgagctcctgagagcctcccagtagagcctggattcgcctgtggctgcaccccggccacatgtgctttttcctccttcaccacagccccatggtaccctggcctcctctccattctcatccaaagcagaatcctactggcagctcagaggcgcctgtgggcctgagcctaggtgttccttgagcggaggagcagggactggggacagccaggttggagtcacacagacaacccttccttgcatttccctaagaaggaaaacagaaaacatttcattcacggtaaacatgagtaaaaagcacacacagagctccctgagctagaggctgagagccgtgtccctcatgagcactgcgtgtgtgcagctggtctggggagaggagactgagaactggtcccagcccctcatcctttcttgcctctcagcctcaaagggagagaagcgggaggtccaggagcaggaagatctcagctctgaaaggtgaggctctgctgccccccgggactccccagaggtaactgagctttgcctgtccctgaggaagtcatttgcagaggcctgagagggaagctcctgggagagaaatcagaacctgcggcctcctcagattccctgcgggaatgaagccacgggcctgggaccggtattgcccataagggggcggtgtggggaagggaccaaggcctgcctggatatggggggaggtcagggaggctccaggtccatgtggacagctgttcacctcagcaatggctgactcctctttgagaccacccatttgctctcccaacaagatggttgtgacaccgatgagggggtggacgtggaagcactttttgcaaatgacaaagtgctgcacagtggaaaccttcctgtcaccattggggccatgtggcctcggacacagatgcgagggcttcagggtctagtcccccatggtgtcccctaaaaagacatccactcagcctccatgaggttcccaggcaccgccctctccaccataaccctgtctcctgatttccagcttgcagaatcctcctgagggagctggaggagactcgggacctgaactaccttctggaaaggtgaggagcttcccccttctgtccctgtcctccttcctaccagggcctctgatgcaaccctacggcctggtggtgatctgggagggggaggtcccgggaaggggacaggaggggactgaagccctggggcaggcttaggcagagctttatgaagtcagcagttggggaggtggaggaaccgggggccccaggtgcccacccgtcccagcttcccggccccatctacccctggctgcagcttgtgcctcttgtctcctgcagccacctgaggaagctcgctggcgaaggcagctcccacctgcccttaggtggagaccccctgggggacgtgtgtaaaccagtgcctgctaaggcccaccagccgcatgggaaatgcatgcaagatccgtctcctgccagcttgtccccaccagctcccccagctcctctggcctccaccctgtcaccaggcccgatgaccttctcagagccttttggaccacactcaaccctgagtgcctccgggccaccagagcccttgcttcccctaaaatgccctgcaacccagccacatgtggtttttcctccttcaccacagccgcatggtcccctggcctcctctccacctccacccgactccagcctggctggacttcagtgtggctccacaacatgccccgtcccccagagctcccctctacacaaccaggtgctgcctcctccaaccagggtgatctctggcctggggtgctccagcgatcccatctgggacctctattgctggagggaggctgccaccacctggggcctctccacctactcacatggcaaatcccagccacggcatcttcccgaccacccctcagaggcttccttctggggagaccccacacccaagcacatggaggtaggtggctgcacattcatccaccctgacgtgcagaagctgctggagaccctcatcgccaagagagcactgatgaagatgtggcaggagaaagaaagaaaacgggccgaccacccgcacatgacatcactggggaaggagtgggacatcacgaccctaaatcccttctggaacrtgtcaacccagccacagcagctgccccgtcctcagcaagtctctgatgccacaaccgtggggaaccacttacagcaraaacgcagccagcttttctgggacctcccctctctcaatagcgagtccctggcgaccacagtctgggtttctaggaacccttcctcacagaatgcacactctgtaccactggataaagcctccacttctcttccaggtgaacctgaggttgaggcatcctcacagctttcccaggcaccgccccagccccaccacatggcccagccccaacatttcactccagcctggccccagtcccagcccccacctttggctgagatccagacccaggcccacctctcaccccctgtcccaagcctggggtgctcttctccaccccagattaggggctgtggggcatcttaccctacatcccaggagaggacacagtctgtcatccccactggaaaggagtatcttgaatggcccttgaagaagcgaccaaagtggaagagggttttgccctctctcctcraaaagtctcaggctgttctgagccagcccactgcccaccttccccaagagaggccggcctcctggagccccaagtcagcccccatccttcccggggttgtcaccagccctgagctcccagagcactggtggcaaggaaggaatgccatccaccaggagcagtcctgtggccctcccagcagattgcaggcatctggggmcctgctacagcctgatggggaattcycagggaggccccagagtcaggcagaagacaygcagcaggccctcttgccctcccagccttctgamtttgcagggaakggcargaaggatgtgcagaagaccgggttcaggagctccrgaaggttctctgasaaggggtgcttagggtccaaactagggccrgacccaagccgggatcaaggctcaggaaggacctcagtgaaggctctggacgaagacaaggaggyagaaggtgacttacggaggtcctggaagtaccaatcagtaagttccacacccagggacccagacaaggagcatctggaaaacaagctgcaaatccatctggccaggaaggtaggggagatcaaagagggctggatccccatgcctgtgcgtcgctcctggctcatggccaaatgtgctgttcccaagtctgacacccacaggaaacctgggaagctggcatcctggaggggtgggaaagcccacgtgaacacctcccaggagctttcyttcctccatccctgcacccagcagatactggaagtacatcttgtaaggttctgtgtgaggcacagctggggtacagacctccagtccctggagcccataaatgtctggtcaggtgaggctcaggccccgcccttcccacaatccacctttaccccctgggcctcctgggtatctcgggttgaatctgtacccaaggttcccattttcctgggaaaacgtcctcagaatggtccaggagacaacagaacaacaagcaagtcagtcccgaccgtgagtggccctctcgctgccccacygcctgagcaggagggagtccagaggcccccgagagggtcccartcagctgatacccatgggcgatcagaggcctttccgactggacacaagggcagggggtgttctcagcccccaacatgcagccttgtgggcagaacctggcagagcaggactgtcctggaatcygggaaacccaaacccagactagaggggagtatgggttcagaaatggctgggaacgaggcatggcttgagagtgagagcatgtccccaggagacccctgtagtagcagagccctgcaagwgctcagcatagggtcccagtgggcaagggctgaagatgccctgcaggcactgaaagtgggggagaagcccccaacttgggaagtcaccttgggagccagtgtgagggcaagttcgggaagtgttcaggaggatctgaggagcacaggggctctggggaccactggtaacccctcagcgtcttcagtctgtgttgctcaggatccagagcagctgcacctgaaagcgcaggtggtcagtgagattgcrctcatagtgcaggtggactcagaggagcagctgccaggccgtgccccgggcatcctcctccaggacggcgccacaggcctgtgccttccaggccgccacatggacatgctcacygccgcagacaggctgcccactcaagcccctctgtccacctcccagagtgtgtctggtaagaacatgacagcttcccaggggccatgtgccctcctatggaagggaggggacagtccagggcagcaggagcctgggagccmaaaagcaaaggccccacagaagagtcagaagaygctgggctgtgcggrcaagggcgaggcccacaggaggcccagaacagggragcagggacacaggtccaagggacccaggacctctgaagccagtgggaggagccaccctgcccamgccagggaaataggagacaaacaagaaaggaaatacaaccagcttcagctggagaagggacagacaccaccagaaagccacttccagagaaagatcagtcaccatccacagggtctacaycccaggaaaggaggcacacggtgggaagatgtcctgcagaaaggcaagcctggggcagatgctttccagagctgggggtctggcccaccaaggcagtttatggactgcatggctgacaaagcctggaccatcagcagagttgtgggacaaatcctggtggacaaactggggcttcagtggggacgaggtccctcagaggtcaatcrccacaaaggtgacttccrcgcccaggagaatgtgccttcctgctgccacaggggtcactgccaccaagaacgtagcagagagatgagagctctggcctgcagccctaaagccacccccaagggccaccactgtcctgtcaaaaacaggggcatcagagacagagacagcagttgggccccacctcccagggagcctgtgtccccagctggtccccaccaccacaggccaagaatggcaagcacctcgggcggcccccatccacagctgcaggaactgatgtctgcacagaggtgtcttgcytcctgaactagaccagtcttcttgcatgtctcctgggggagacagggggttctactcaaataaaactgatgcctacacaataaacctgtcctgcgtgggtgatcacagccgccatgtgttcatgacgttcacggagaagttcccaatatacctgctttccctgcagagggcgtggcttctgtctgtgccatgctagggggcaggaaagggcacagcatctgctccttctgagtgcggcttccagaatggctgggcctggagaaggctggcagggacgtggaggaccccctcttctccctgtccagggagaaaccatgtctggtttccaaactgtatcatgacccagagccttcaggacgtgtaaggacagcaaaccctatggagaccccacccgggctctggctcactgcatcttcgttctcactaaggtaacttctgtgctgctgtcggagctgggtctgcaagggccttatggactgagagggtggcaggctcccctcaggctggaggagtgatggatcccagcagcctccctgccccgtggtagcctgggaatgtgggggtgtcctgtactggccctgggtgagagaagggacagctccttctcagatgtcctggtggggaagaaatgacaccctccccagacccctccctacctgctgagttctgggatggacctgggccccaccagcacttggttcagccttgttaacacccctgggtttgcgtctggtgtcccctgcctcactctccagagcagtctcccagcccactagtgtggggtgtctgtttcaggaggcacccagggctgctgcctgcccctctggtgggactctgtggttaggaaccgcaggaggagaccttaggcccagggtgagaggtcgtgagaagaatcagggaagacgaacgtaagttcgcaagtgcaggacccacaagctgcccacagctgtaaccagggtcctcatagtctggtgaccatgacaagcaaaggtggtcagtgccactcccaggggagagggacccagaaggcaagggctggcctggttacacagcacatctatggctccaagcccaggtgctggcaggggacacattggggctcagaggatctggtcacatggttggcagggacagtccccgcagggcacagtcctgggctcctccgtcctggtgctgggtccctcctgtccatccccaaggaaggcaggagcaaatgcaggagctggttccccagagggctctgcccaggggccttctgcccagggagagctctgcacctgcaggggctgtggaggctgaggacaaggggacaggcctgtacccaggcgtggcgggacccatgctggggacctgtttggaaaaggccctggtgtcactttgggtgcccaggctactgctggagccaagtcctgtctggggtggtgacctgggcagctccagtgtgggcccaacatctatgggacccaggatcctggaacccgccagcagaggagccccacagagacccccatgtacacccccaaactcaaagattcccacagagaccccacattcatagagatttcagagattccccacagtgacccccagagaccccaacagagaatctgaccgagatccccccatgaagaccccccagaaggactccccacagaaacccctgacacagactcacacagagacccttcaaaaccaacagagatccccacggagattttagaggtgactctaacagagacctgcacagagaaaatatatcaaggtcactttgccaccccctaaaatccctagcattgcacttggtgaaaatgagcggcatctacctcattcccagcagcgctttctcctggcagccctctgccctcttctaggtaagattccttgagaaactgaacaatagaaaagcctcctctatcagtcgacatccaacttagagcgaccccccaacccgctggcagacccttccccagatcacccaattacaacccccatgctgatatcaaactgtaatcattcatgatggaaacggtaagagttcctctgacgctgtgcttctgacaccgcccttagcccctcaggccatgctccccctcactgccaagggaataaacccggctggtctagattggtcttgctcacagggctcctcctgtgggccttgtgctggagcacatggaacaggaaggatctcggcttggacacagcttcttcagaaaaccttctctgactcccctatgaggccaggtcccctgtgctgggttccccaacctggcccttcttcccttgtgacagcctctccacacctgggcacgtttctcccagaaccctgaaagcttctggtgggcccggtgaggacggaggcgtgcctgaccacactcccggtactgactgtggcccctgttataaattgtttcataaaatcttcttagttaatgggcacaggaatcaatgcttcctaatctacctcatacataagttgcatcactaaaatcatattttcataaagggtcttaactctttccagtagccaatataatgtgtcaaggaaaatctgtaaaaataaaatggcatcgatacttcaaatttagtggtataaagaaatttccaaattcaaattattccaagttacttattttataggtcaaatatgaatattcttgtaagttttttaattcttcaacgtaaatttctgatgtttagagaatacaaactaaaaacaaattttgcttcaaaacattctaatgtgccacaaattcattttaaaaaactattaccaaagaggatatatttttaagtaatttaaatatacaacttccaaccgacacacatattgtaaatccactcttctaaaaatgaggagcagctatatttttaccttaacatccaaaatgctgaatctataaaacgggttgcttatttacaaccacgtgtaaaatagggtattgataaataattcggcatgcatattcgttctgttggaaatttttttaaattattgaaaataattgaaaatcttacaaaacatcatctgtttgaaagatgttagaaaagagagggtagaaaaataggactgcattcttattgcgtaacggttcaacctcagttataaatacacacatatacacacatatcttgaagcctgagtaactgttctctctccagcagtttctgccaggcctgccagttcttgggtttggaaatttccttcctgctcacctccactggcagcatgtccacctcacctaaggcccctggttccactcctaatgctccaaaaatgtgatgagcgtaaagagagttttcctctcaggaaaacaataatggctcgatcactgatacactatgggttcataaagaaagatgaatctatttcatttgtctattaacctggaaaagcatattgaatatttttcttttttagaataagtagaggtacacattgatcttttactgaaaataaaaaaatcattaaaaggtacatgtaagaaagtactttttatttagctagatcccaatgattttttaatctcttttcctaaaaggtttatggtaaaaccttttatatttaagtttgcaaaccatttcaagttaattagtgtataaagtgtgaagtttacactgagattttgagcctataaatgtttattttctccggtggcatttgattaaaagactatccttcctccttcaattgcttttgtacctttctcaaaaatgagttgggcatatttgcttgggtccatttctgagttctgtattctgttctgctgacctatgtgtccatctctccaccaatatcatgtgccttttcatataaacttaaaataagtttatgtgcataaaaaaatctagctggagttttgatatgaatgtcattaagtctacgcatcaatttaaagagaattgacatctttgctatcttgagtcttccaaaccattagtaaggtatgtttgaatttatttagttcttctctcaattctttcatgcagattttgtaatttttgccatcttgatcctgcatatcttgtcagatttatgcctaagtattttctttagagcaactgtaaaggtattttcagtttccacacattcattgttagtttatagaaatatgatgaattttgtaggatggatcatttatcctgtgaacttgctaagtaacttattatttctacaagacttttttagattcccggagacattacaaagacaatcgtgtaatctgcaatagaggccgttttccttctttctttttttttcaatcagtatgccttacttgtttcttgcccaattgtgctgactagaactttcggtgctctgttaaatagcagaggtgagagcagatgtctctgccttgtttccaccctgaggggaaaaccattcagtctttcaccattatgtatcacatagctgttggtttttgataaatacacttgataaagttcaggaagtttccttctatttgtaggtttctgaaagtttttatcataaaactgtgctatactttggaaatgctttttctacatcaattgacataagtggcatagtatttttgaatcatgtttctttgtccaggttgacattccttgtcttttaatcgacacatgttcacaatttatatttaagataactgtaatatatatgttaaggcctagatgttctactttataatttgttttctgtttgttcattctctttttctttgctcttttttcttaccttcctgtgagttacttaaatagttttaggattacataattatttctttatacagttttctagtacatctctacattattttctatctttaccttatgatcagtattcgtttgtaaccgaccacagtcaactgatattgatgttttaccactttacatctagtgtagaaaccttattttcatgtaactccctttacacccaccttgtttttaaaaatagaattgcactgagtaacacatctaatacacaggatgctgcaacaagcagtgttataatttttgtgaaaacaccaaatatgattttgaaaacttctgagatgatgcataacttattatatctttttacattttcccattctcttattcttttctttctgaagttccaatcattcttctgatatcatttgatttctgtttaggtgacttacttttcacatttttaagaggagttttggtaaaaaacaaattgtgtcagttttccttcacataaggatgcatttatttctccttcctttttgaatgctatttttgctggacatagaatttgctgctaacagttcttttctttcaggacataaaaaatgttggaacacttccttgtgtcctacactatttcagattgggggcaggctttcaagaatttttgtcttctgttttcagaagtttttatatgatatgtttcagtatgaatttatttgggtttatcttatttaggatttactcagctacttgattctgtagatttctgtctctgtcgaaattaagatgttttcagatatcaatttattgactgtttttccagtcccactatttctttctgctttctttctgggtccctgatgatacatatactcagtattgtgatgctgtctgacaggtccctgaggctgttctctgttgttttgttttgttttgtatctattttttctcttttgttcagattagaatcagtaaatcctactgatatgtcctgaagtttactgattctatcttctgtcttctcccctttactattaagcttacccagtaaagttttatttcagttgtattttttaattctataatttccaattggttcattcttataactgctattttttgttttctgagattttcaagatttgcatttggttcaaaggaattcctgttaataactgcctgccggtaccacctcactcagtctcatttcagctgggtcagtatggaggtttaattcaccactgggccctactgacaccgggagtggggggaaattggagtactaattagcctagatgctacaccttgtcagtgtggttgatttaggcggcagcagaggttcagcttcctgctggtctccagtgacatcagggtggggaggatgac

SEQ ID NO: 6770 - DNA, 29534 bp, Homo sapiens
tccagagcatttcctgatccctgaagtctatccgtgaatgcctttgggatccttggtgatacaggagctaaaaagaaatgatttaggtggttagtgaaggtacgggagtccttggtaaggtttccttttaataagaaagcagcctccaagtcatttcttttctaacaaaaagcagcctgaaaaatcaagctgccagtgtagataagtaagctggaagcctgcataggggaatgctggcagctgtgccaatagaaaagggaaacctggaagccaggtatgttcaacatggaggttccctcttcccttttctttgtcgccacgtgtgcggkcgtcatggtgccagccaagtaaagactccatttgcataataaaagattagagtgggatagccagcctcttccgggctatgtaaatggcatatctggtccaaccaatccactacaccctatgtaaatcgacaccgcctcctcaagctcatctatgaaatcaaacacatctcaccccaaacccagaaacccgctgggtccccctccctttacacaaggcagcgctcttctttctttcgcctattaaactttctgctcttaaacctactccttgtgtgtccatgtctttgatttccttagcaggagacaacaaaccccggggatttccccagacaaacgatgctgcttcattgggactaacttacgcgagtgtctcgttcttggttctctgagagcagagcccagtgccaacactcacgtgtgagcagtgctttagagtgtgagtccagggggccaaagtgggggacgggggcaacagacacagaagtggggaagcggcaatgcagggaaatgctaccgtgttgcaaccatgatggttggagggagaaaagcgggtttgtccactggatcctgcacttcatgggctcgagtacctcacgtttctgggtgcttatgcctgaggctgcagggctttcccgggcctcccatctgctgagtcagagaccccagggtggagcatgctctggcttctgagggcatcgccatcaggagcaacgctggtggaagccagtgtgaagctgatcatcctactggtaggtggataagaagtagggcagagaagatttaaagaggtgaatgaaaggggccccgtacacaggccctcttgattatgttgttgactctctccagcctcagcccctgccactttccctacttgtgcctactcttcattgaatatataattaattgtggtttctcaaatctgtgtcactgaccaggactcttaatgaccagggacagaaaccaagctcaaacttgcttgagcctaacataaatttctcggtgcctgtcagggaatgctggctttaggtcttgtaggatccaagggctcagctgacagcatcaggttttctcttgaccctctccaaggctaggcggctagagtctctatgtttgcttgttatcttcagctctgtgtaattcttttctttgttgtgggaaaaatgggcatcaccagccttgattgaagaccattctggattagcaactgcagtggcggagggagtcttttctctcccatggtcaatctattgatcccggggaagacactgattggttctgagtgggtcacatgtacacctttgggccattcacagtgcctgtggtatggaggagctgcaagtgttcccactgggtcacaactcccccgcaacacctgcagcttctgacagtcccgtctgagctcacgggtcggtggaagaaacgtccttcaaaaggaaagccgacaggagccggaggggaggctgggctggtagaaacaacacacgcccatggtccatggcatgctgcatcggagctttagcccattccatagcttctttccagaatgtcccatcccttaaccactcagagaaagaattcttgaactccttcgtgtgactttcacagtgaattcgcccccaggcttctaacaccgttcatttccatgtacgttgtgtgctgcacacccctcctagcacactgcttacgaactgctgctccgccttgcttatctacacaggagtaaacgtgatggacacacaactcttgctgcctctcacaaatatgccggcgtatgggagggtctgagctggagggaggcgcaccttggattggtgtgaatcaggcatcaggaactcctgtgctcacagcttgtccagctctccctcagcatttgggccactccacagaattctttgttcaggcccgatctgtcctcctgggacatctgagctgctcagcaccaggaaacatgctctgttgtgcgcagggcatcagctttgcaaataatccagttacgttcccattggtagctggcgtcacactttatgtccttgtaaaattttgagtggagcctaatcacaatgtaaggtctcatttttaatgtttaattagcatcctcccagtaaagtctgaaatattttaccaaagcgtaacaatgtttttcattctttaagtaaagtacacatgcatgtggcccaaaactatgacttgaatgttgaatgtgaggctgcctgccgggcactccccacccaagcatagaaaaaagaaaatcgggccgggcgcggtggctcacacctgtaatcccagcactttgggaggctgaggtgggcggatcacgaggtcaggagttcgagaccagcctggccaacatggtgaaactccgcctctactaaaaatacaaaaaaattagccgggtgtggtggcgggtgcctgtaatcctggctactcaggaggctgaggcaggagaattgcttgaacctgggagctcagtgaggttgtggtgggctgagatcgtgccactgccctctagcctgggcaacagaatgagactccatctcaaaataaataaataaatacaataaaatcttgggttccttgaaggggaattccagccacctagctagccctgagaaatacatgagcaacttgggaagcaagaagttaatagtggcgagaaacaatagtcaagagagttagagtcaggaattcattgcttccctgtagaaactaaagacaacatcgtaacaaacgacccggagttgtttttcagaacctggacccccaccaaatggatctgttgacttacagacctctgatatgggggagcggagagctgaactccaccaccgttctttgttctttgttttttgagacagagtctcactctgttgcccaggctggagtgcagtggctcaatctcagctcactgcaacctccgcctcctgggttcaagcgattctcttgcctcagcctcccaagtatcctcctgagtacaggtatgcaccaccacacccggctaatttttgtatttttagtagagacggggtttcgccatgttggccaggctggtctcgaacccctgacctcaggtgatccacctgcctcagcctcccaaagtgttgggatccacccctccgggcccaccactgttctttgttctaaatttcttcctgaggggcctggaggaggtcatgcccacaggccagagctaacattcttttttgctgatctcaaattttttgacaaagccttgccttcttaaccaatcacaaatcagaaaacctctgaatctactacctatatgacctgtgggcccccagttcaagatgtcctagctttttaggtcaaaccaatgtgcagcctccaggtattattcatgtgggacttagcctgtaacctctgcctctccaccttgaaaaaccctcccccatcagccatcggggagttcaggtctgaagtgtgagctgccaggttctgctcgcctggtgccctgctctaaatgcctcacttcctctcactgcaatcccgacgtccatgtttggctttgctgcgggagggcagagccaggctgggtttggtgacaaacgctgagtgctcaccaagtaccaagccctgttctcggggctggggtgcagagcgaacaggcagaaagaaggtctctgctctcatggggcctacgcctcggtggggagagactgacaataaatgaaataaacgtctaagatatgaagtacattggatcgtggttagtgggatcgagaaaatacagcaggggagggctttagggggagggagacctgctgtcaaggtgatgtttgggtgccgaacaccccgacgtttgggtgatggaatgagatgctcagagacatcagagttgcttggttccaggcccatggaccactcaaggccctgtctcaaatctccaggcttcaggacacgctgctttacatggaggcgggctcttcatctgggcctctgaacaaggcctgagacaggacgcaggcaaatagcatgaggcacgagactgtagtccgggatggagagtcagagtgagtctgaggatgagtgcagatgcctgcagggcaagctctgctgaattgctttgctatctagtttttattacagtcattgaatcggggtgtctcccattatctgatgacaattttatgatgaaaagaaaccatgctggctttgttcggtcatggagatgggaaaggtccgcatattcagcaatctgttgaattcttccaggttaaaactggagctgagaaaaacctgcagctgcctgtccctcccttcacctcttccagcgagaggcagtgggggactggagagctgatgaaatggcagagataaaggttgtaaattagttttccctgaagccgaccagcctgagcaacaggataaaggtcgttattacagacagcccccggcctttggagttcacagtttctccattgctaggagatggaactctctggaacccttctccagctccacagagaggctcaggctatcagaggatctgagcggttgtaggctgcaggcacaagttaaaaataatcacctaacgttttgacagcactttctttttttctgtcccacagagattggaagtcattttcttatcctctttaggaagtatgttggattcaggattcttaattcccatttaaagtcaggacaattgagataactgtatcagctaacatttactgggtgttatgttatacttgctaataataatcatagctaacatttactgagtgataatttttcttaatagaaaatagcagcatttactgagtgccacatattttccaagtactgcctgaagagccttggatctgtcctctaatttattgttacagccctgaggaggaggaactattaacccccattttgtggatgaggaattcgaaaactaagagagatcaagtaatttgcctaggagcacagctggtgaatgttggagaaagtatgaagcggtaaatattacttaaatcacatagcaaatatagctgtgactgcaattctagggtgtgtgtctctgtgtgtccacgtgtatttggagtagatcggataaactttggtcttgggtaaactgaggcatgtctggcgaaggggctgactcttttctatcccattgagaacatcctcctggtgctggggtgggggtatatgtgggatggtgtaattgcgcagcgtaccttgtaattaactccgtagctttcactgacgtccgaaaggattagagagaaaaatgtggtcagcgcttaatatggagggcacagtgggtgtgctgctttctcttttccatccctctgtcaacttcattctcttttgggggcaaacaagactcagatctaaacagagtttatggtttgttttgcattttgtatttattaatatttatgccgactttgaaggtgctgaccagaaggcatcagtaacacacacacgcacacgcacacacaccacacaccatgtctgtttggtttgattctgagcctgagatcctggaaatatttcagctgttgttaagaggctggagttaggacccaggaaggacacagcagtggggatataaatagaaaaggagaacagaacaaagtttgaggagagagacttacatcactcactccccctccacccagagagcaggacggaggtgtgaacttgagccagaccagaaggagctcgagagcggccgcaggacaagcccgaggagcaggcgggcgctccaggggaaaaccacgcacaaaaccttcttcagagaaaagggaagctccaaacctgactgagacaaacggaggctcttgaaataaaaagaaaataccgcaggacaaacagcctcccgtccccgggcgcaggtcgcggtcacagtggtgacctgggattgctttcccaggactgcgagtcgggtttgggtttctcctccctgcattccacagctgctctggtcatcgcaacgtgtttattgatcactgaagaatctcaagttttgagacgaggaagaaacacccattaggtctccaagacagctgtgtttcacaaactttaaggagacagaaattttctcccctggaacctgtgaaaatgtcccttttccaaggaagtgaaggttaagaggtcccgttctcacagaccctcagkaatttcacttggctccgagctttgacctccgagagagccatggaaaagctgctgcggctgtgctgctggtactcctggctgctgctattttattacaactttcaggtaatgtccccaagtggccaggatggcgacaggcttggtttctccggaggctttccctgagtgtgtctcacactgtggtcttttgtgcgcaggtgcgtggcgtctactccagatcgcaggaccatccaggtaagagtgtttccttctcactctgagcaccrcyctccccctgcctagtgcaggtatctcaggaacagcccacttgttcatctctgaggcatcagcgaatggcccttgttgggctcctggtccccgacctcactgcctcaccacacactgtgaccctgggcagctctgctacccctcaccggctgagcggtggatggagaagtggttctgggccccttgagctgggtcatatgaaacaytgtgattaaggaaatatgatctccttcatttgaatgccttctgcctctttctttctctctttctctctttcttcctttcttcctttttttctttttgagatggagtcttgctctgttgcccaggctggagtgcagtggccgcaacctctgcctcccgggttcaagcaattctcctgcctcagccacctgagtagctgggatcacaggtgtgcaccactacacccagctttttttttttttttttgtatttttagtagagacagggtttcactatgttggccaggctggtctcgaactcctgatttcaggtgatccgcccgccktggcctcccagagtgctgggattacagatgtgagccaccacacccatctcatrtcttcagggcagattcactggtggggagttggagctctggcccatagcagggtctcgggacctccagcctcagagtgctgaccagcttagcctggagcagccgatgagtgggactcgggatagagggccacccttgctccagccccagagccacattccattggccattgtgacacccaaccaggaagcatcaggacggggcttctctcgggaagacagggaggcacacacccttygctgttaagagtgtgggcacacgttctggtcagccaggggcagggatgggaagacgaggctttctgggagcagcaggcagtcactgggctgttgctccctgctggaagttgcaggaggtggggaggagaccctgctagtgcytgaacccctgctgggaagcctgttgtgagcacagcctctgcccccgccccaccagagcttggctgggcayccccccgagcgctattgtatggccctgcctgtctctgatgggaaatcagcctttttwaaaaaattatttttgtttttattttttgagacaaagtctcactctgtcacccaggctggagttgagtggtgagatctcagtctcggctctctgctacctctgcctcccgggttcaagcgattcttgtgcctcagcctyccaagcagctgggattacaggcccatgccaccacgcctggctaatttytgtatttttagtagacacaaggttttgccatgttggccaggctggtctcgatctcctgacctcgggtgatccaaccacctcggcctcccaaagtgttgggattacagatgtgagccactgggcctggctgggaaccagcctttaatgatcarccacaaatggactcaggccagcactgtgggcagatcccagggcgatacccaggcctccagggagagcccctttcctggatggagcaccaggagcctgctggggtctagggccaggggctgtgccctcagcctctgtctcctttccggctgcccggcagccccatgccaggatgttccaggcatcgtcgcctcgccaccacctccattcaccaactcgggggtggggacgctgccacttctgtttcgtccacatgcatagggagctccttttaaaaaggygtggaagctgtgagtttccacacattcccctctcctcagccaaatcgctgaatgaaacaagggctcctgtggcttgggaacgaataaacatgcccagcgctgcgttaaagagaggacgtgtccaccttggacaccttgcttctcgtgaatgcaggcctcatggcttgggctgggctccagtaggggagaggactgagaggaggagaggggtagcccctcgaactgcagggcggtcaggcagagctgtgcacccggctcctgcagcaggcaggtggcccccgaggccccagcatggccctcactgctgctcagtgttggagaaaagctgtgcgggttctccccggacttctgcttatgatacagagcccacacgcattctcacacatgcacatgtgtccacatgccccccatgctacatgtctacatgtgtcaacatatgcccamatgcaccaacacaaatcacacacatccacacatggtgacacatatgcayacacacacacaccagatgtctacatgtgtcaacatatggccacatgtgccaacacacatcacatgtccacacaccactcacatccatacacatcagacatgttgacacacatrcatacacatgcaaaagcatccacacatatgcacacacctgcatgcatcaacatgtgtccacatgcatccacacatgtgtccacacaattcacatgtgtagacacacatgcacayayatacacatccatgcacacacccacacccacatgtgccaacacatgtctacgtgcatcaacatacatgtatttacacatgttcacacatgtccacacatatccacgtgtctacacacatgaccacacagtcacagactacacacatccacatgcatccacacacatccatacatttctacacacatgcatacacgtrcacacattcacaaaagtccacgtgtctacacacatctgcacatgctcgcacatctctacacacatgcacatacatacacacatgctcacacacgtacaccccacacacgtccacacacactcatatgcatgcacgtgtccacacacatcttcacatactcacatgtgtgcacacacatgcacacacaccctcacacattcacacacatcccacatccacacacatgtacacctatttacacagctcacatatccacacacgtacacatatgtacacacacatgcacaygtgcacttgcatttttgtatctaaacttgaaggagcagtttgaactcagtctttgttccatatagaagctttgttcttccaagtctggatttagggtagaaatcaacatttcctgatcaaggcactgtcttagagaaacgacggccatgctgatgacagtagaaagggacggaagggtgtggtgacccctagtctgtgtggaaaagcacagtgaaggcggccatgcctcctgagctcttgaaaccgcaaggtttctctctcctcagctttccaggttctagcagtccctctttttctcctcgtccttcctcgtcctcctctcactgcaaattgtttttgaacttttccttttttctcttccttcctccttccttcctttttagaataatggtgaaggtggacacatttgctgaatatttaggtgccctccatgaacaamacatcctgctgcctgccttccttcccttcctcctcactgttcccctcctccccttctccccttctcctgccttctctctcactttgtttcctgtctcattttcttttttccatttccctccctcatttccttccctccctcccccctccctccatcctatccaatcctttctttttttttttgagacagactctttctctgtcgcccaggctggagtgcaatggcrtgatctcagctccctgcaacctctgcccsctgggttctagtgaytctcctgcctcagtcaccygagcagctgggactacaggcgcccgtgaccaaggctggctaatttttgtatttttagtagagacggggtttcaccatgttgaccaggctggtctcaaactcctgacctcaggtgatccgcctgcctcggcctcccaaagtgctgggattacaggtgtgagccaccgcrcccagccccagtccttcctttttgtcttctcttccgacatctcagrctctgctcacctcgtttcctgctgaaaagccgcatccctggctgtctgtgtgaagcagaatctaggggcctccttcatgctccagcttccatccttgaggctcgcctgcccccgggcagctctggcagaggaagcctggccctggcgcgtctcctcaggagcgctcatgacgggcacgggcgtcacaaacacaccaacagaaacaacctgtttccatcgcaagagaacagctccttaacacgtagcatttcattctaaagagtgctaaacagctatgaaaagcggccagtttgtctgcacgttgggcctttcaatgattttacatcatccttgcgagagccctgcggtggtgtcacgccctcgcaccgcrggtggagaagcgtgtctttcagacagaccaagcgatttgctcaaggtcacagggctcagaggacacaatattaagcccaagargctcacagcgtgaggggaattaggggagacagacacagacagagattcttggaaaacagcagccgagtggtcagtaccgggacataggttcgctcaggtgctgggggagccttaaggaggagtctccagtatagagcgagagcctgatcttccaaacgccagcctactttccaccacggccacaccaaactgtagtattttgttaaaggttctcagaactattaagcatttcttgttttctgattctggcactcagcactgtgccttatgcataggagacacgcaataaatatttgttgggctggcgcagtggctcattcctggaatcccagcactttgggagcctgagccaggaggatcacttgagcccaggaattcaagaccagcctgggcaacatagtgagwccccacctttataaaaaataaacattcagctgagcatggtggtgcatgcctctagtcccagctacttgggaggctgaggtgggaggatcacttgagtccagaagtttaaggctgcagtgaaccgtgatcacaccactgcactccagccttggtgacagagtgagaccctgtctcaaaaaatatctatatatttattgacttgtctgtgcacagtcactgaagatttgctagtcatctggtaaaccgcgtcaataaagctagccaaccagcatgcattcggctcacaggtggctgttttggcttgtattacctggtttgcctgtctacactggcagaggtagccagatatttgccagatctttaccatgtagagaggtgtttcattttgtaagtaattgccaaacaacttgaaatcattttaagcctttgcatactctgtgcttatctgtgaccatagatggtcattctggaggcattatagaatgtygtagttgagggaccgtggggactattgagccacttctcactttacagggaagccaggaggtaggtttggagagggaaatccagggtcggcagagtccgggcccctccccacatctggaagcttttccagggmctcaggcggcccaatttcttgcctctgctccccaggggacagccttatgaagctgtgatggttgattaatctgaatccataaatggcactggccaataaattgcaggccattcttaaaaagtttataagcatgccattttatacatgacatttgtaatgaggaaaagagaacttaaaacaaacccaaagcatgtcattacccagcagtttcctggtcctggggcacatggcacagctggctccagccgtttccagaagtttggggcggctcacttcacccgctctatttaggggtctgggaggccaagcagataattacagtaattatcattccttagatctccatcatgccttagagtttctaaagaactgtcagaactgctaggccatggcagaaactggattcttcatcttcrtagtatttataatagaattttaaaaaaacaatgtttatatccgattgaagaaatggaaatttggcaaatagagattttctaaatactagaattatacagataattataytctatgtttattgatttatttatttatttttgcattttatcattcattctacctgtatagttagtttttaaattgctaacattaaaaatttgggagatttcaaatgcaaaaatctctctctcacacacacacacatacacacacacctcctgggccccttgtcttagacatggaggatacaatgtaaatagaacattcaaggaacagagtctgatataggagacaacacacaaatatactaacaaaaaaatcccaaacaatagtaaatgccatgagaaaaccaaataaggacctgaaagaaagagtggatggtggtggcgacgaaggggtggcatgaggggaggggtcctgtgaactgagacctgaatcaggatgagctacacaaaacgyggggatcagcattccaggcagtgggaacagcaggcaaagttatgcaggaaaaatgagctccatgtgttggaggccaaggaggatggagccacgaagccagcccgaccatcggcaggggccggcattcctctgtgtgrtatagattccagctggaccaagtcagtgcaacactgaagattatttccctgcaggaaaccaagggataaaggtttccctgracgcacacaaggagtaagtaacagggaaggaagaagaatagggaaatctggaagaaaaatggaaaaggaaaaattaaaggttttattaagttgttttgagtattaatactctgtctttcatctctctcctatgtctgtctctgacacacgcacacaccaaacttaataaaacattacatatggatgataaattatttctgaagaactgtggtgatgtgggctgaaaatacccctttttctctctgccctttcctctctctctctctcgttctttctcttcctccccaccccwcctccattttctctctggctctgtcccctgctacttgttttgcaggctggggttgttttggagtcctcaaatgggccatggttttgcttggctggctgacctgcctaagaagacgtttagtctttagaagagtttggtgaaaatcaaggtggttgcagagttaggtggtctcatgccaccttctcaatgggaaaaatgccacagagtgcctttttcccgaaagaatgagactttcttgctctgatgaaacttgtaggactatgagttattttactccttgagttggaaaaggaacctgtgggctgaattcagcccatcccattagcaccacacaatgttttattttaaaaaattgctaacattaaaattttgatagattttgctttaaaaaaaaatctgaatttctgactctgctttaaaaaatgaagacctgacaatcctgggcaaagcttcctgcagagccgcaatgcttcgttcggcatcaggaggcactacttaatttagacagggcacagttttccrcgtcgcctccgcctctcctgccctacgactgcagtggtgccagctgatggtttccagcatctgctctgatgagtctggcctgtgccttccagcttgttaactaccttggatgccatccctggactctgtccagtcacttctcaggactcgccgtcccctgcgggtgtcacagcttgcagccccttcattgcttgtttccagtcagtgttgctagttgcaaaacatctgtggcaactgaggtgttttacacttgtctgaagtgcagtggtgtggagagaaggcagtgttctggcctcaaccctgctcttctcatcactggccacctatgaactctggctggctttggggtgaacgagacaccatcactttactctgtcagcctttctgccrggactgattgtggccatttgtaaatggaaagaatgggaagggctttatcgtccacagggtttattttataaagatgaggattctgaagacacatctgttctttgtataacagatgttatttccttttacaattttttttcccagatgacttgaataacaagtcaatgaggttttgtcctcttcaaaatgaatatcctagactttagggggaaaaaaagcacagtgggaatgaaaatgaatctttttgatttttgcatttcagattcttcatattgcattacaatagtagaactatccccactggaaatcaactgaagtcaggccttactttctaatgtgctactttatctagatagggctattttatttagagagtaacaagacacttaagttattgtttagatacttctctttagctcatattacagagttaactttgttcctggcttacattttgagcttgtgtacataaaactggagggacagatgcaaattgaaaagtggaaccaaggaacaggacacgtgtggatgttgggcgccctgtgaacaaaaattcagatattacatggggtgcgtcagttatctgaaaatgatggtatgttcataactacctatggcacttcaattgtgaaagcaagccttaaaatatttctaaaggaatacagattgaaaaattcaaatagaggcctggcgcggtggctcacgcctgtaatcccagcactttgggaggccgaggcgggcggatcacgaagtcaggagatcgaaaccatgctggctaacacagtgaaaccccatctctactacaaatacaaaaaattagccaggcgtggtggcgggcgcctgtagtcccagctacttgggaagctgaggcaggagaatggcgtgaacccgggaggcggagcttgcagtgagccgagatcgcgccactgcactccagcctgggcgacagagccagactccgtctcamaaaaaaaaaaaaaaaaaaagaaakwmaaattcaaattcaaatagaacagaaagataatgcaatgtaaatcttcttcttacatctcgcactcagcttttcgatttcttcactcccaaaacagcagtattggtttctgcagtatctctccagacatctctctctcttcttctctctccatccctgccctgaaccaactatattttacacaaatagctcatagtgtacacatttttatcatctttttaaaaattagacaatatcaatgaaagaatatgccatctaagttcatttatgaaccttagtattcgtcccagctgtattccagtccagagtgtagatgtgccatatttatttagccagcgctctgtagatgagcatttaggctgttctcaggtttctgatactattaaaaaattctacaacaaacaagccttgcacagaggtctttgatcatatgtatgagtgtatctctagaataaattcctagaggtggaattactagatcaaagggaatgtacacttaaaattgggatagatactgccaaattacccttcagaaggggtgtactgatttgaactcccatcagaaatgtggtggaagttgccagcttagtatagctaactttttgcttgccagtctgatgggtgaactctgataggctcattgttgtttaatatactttttaaacttatgagcaaggttgggcatcacttgatatatttatacgtaatttttatttctttttcattgaactatttgattatctcctttgcctcaatattcggttggttctttttaatagtaggagttgtactaatataatacgtttaatacctctaaaaagaaatcagtacccttctgtaatatgtattatataatacatattatataatatgcacagaaaactttgttttctgattgtgttttgttttattttattacatgtaaattttgatctatctggaaattgttctggtataaagagtgaggttgggatcttaattttttccatgtggtgaactggttccaatgtctttgttgaataatatttctcctctaatttaaaagaccagctttggggccaggcgcgttggctcacgcctgtaatcccagcattttgggaggctgaggcaggtggatcacctgaggtcaggagttcgagacyagcccggccaacatggtgaaaccccgtctctactaaaaatacaaaaattgccgggcrtggtggtcggtgcctgtaatcccagctacttgggaggctgaggcaggagaattgcttgaacccaggaggcggaggttgcagtgagccgagatcgcgccattgcactccagcctgggcaacaacagcgaagctctatctcaaaaaataaataagtaaataaaaaataaaagaccctctttatcacaaactgaatttccatatgtacttaggcatctttgtggatttttctcccgctgaactgtctatccgcgtgtaacaatcagccatctttattgtagtttcatgctgtgccttatcattgagtgtgaatctcctctctttatcctcttctgtttcttctccagattttctttcttattttttatataaactccataatcagatatgtcccccacaaaattctctcagcatttttacaacaaattttctaatactcatagattaaagtatagtttacgacattgagtcggcttttccaagaataggttgaatccttcatgcattcgagggtgctttcacatccctcagaattattattttttattttcttcatgaaaatcttgtacaattcttattcttgttttcataaatattttctttttgttggctgcacttaggagaactcttctttttttgtagcattattgttggaatacagaaaagcaattgacatttgtatattaaatttgtacaagcctccttgctaaattcttttgttgtttgtaatagtgtttcactgacgaaattcttttcttatttgtaatcgttttccactttggttatcaggcatacatcatttgaaaataatgatcttattatctcctctttaaaaagtattttttttaaaaaaacaaggactaacatagagactattagtctgtccttttctatgatctagcagtcgcttggggcagttgattattgtttagtcatctgaaccattatttccacttctgtgaatgaatcccagaggactaatccccgagaagactaaaattgtatgcataaagccactcatgtcagcgccacctgtacgaataaggatggaagctattgattgttcattaacagaagaatggcataacatgttatggggcagccactcaagagactgttacccaaactcaattatgagggttagatagaaacaaagaaataattcatatagcattcaatgagaagagcagaatagaaaataacatacctgcataaagttatgtttactcaaagtataaggatcacgaaggaaatttcaaactgagtaatgcttagtgtggaggaagcatagagggaaaatagaatgaccaggattaaattgagaaagtgagtattgcgtctacaatgagctggcagtgtgattttgtgcaagactttcatttcctgtctttacaaataggctaagaattcaattttcttatagattattgttagcatgaagtgaggaagtgcttgttaaggacctcagtgtctggcataccattcatgttagttttctcctcttttaaaatgattttacccttatttgtttctatagtgtgattgcattgatattaactctaaaataatggtaaataacagcgggatatggaacattcttatcttttcctgacatgaatgggcaagcttctagtgtgtcaccagtaaatgcagtggcttctgttttcatgcaacaagaggcatctattcctatttaccctgttttgtccagttaaggaactatttaccaacttctaatttaagagtttctttttctaaccaagagtgtgtgttgaattttattaaatatgctttcagtatctcccacagacatgggatccttttactcttcccccataatgtgtgtgctaagcggttcttaccctctggttctttcctctctaatgatgatttaaaatttttattcttttttccccaaggatttcaggtgttggcgtctgcttcccattactggccactggagaatgtggatgggatccatgaacttcaggatacaactggaggtagagacgcgggtgctgagagcggctgtgggcgcgggaatcccagggccatcaggaggcgtgggtgctgagagtggctggccttgaaatcccagggccattgggggacgtgggtgctgagagtgactgtgggccggggaatcccagggccatcggggagcagatgtggacacaatctgctttgaagccacggtgatagagatgaacaaatacttgtgtaacttcccgtaatagttatttcaaagctttttttttttgtagagatggggtcttgctatgttgccaggctggtctcaagctcctggcctcagcaatcctctggccttggcctcccaaagtgctggaattacaggcgtgagccactgtgccaggccacgaagcattttactagaatttttatagagagagctattgcgtattgaatgggagaatttctgattcaaaatatgattaaaatgtgcmttttccccaacaatcttgaaacagaagctggcctgaggatgcctctatgtgcaagtcaggcgtctgttttctacgttgaatggactagcgtcatctgcacactgaccacagcaggggcctattgatgaagcagatgtcaaaggtcatgccaactaagaccaactcacatgtttgaagggcccccgtttcattcagcaaacgcatccccatctaccagtcagcttccccacacatcagctccatttgaaaagattaagcatcgcctaagacgtttccagtgaggcccaattccaaatagtctgtttgagttcattcagacatttgctggtaggagaaacctcacatctttctgggtatttttttcccctttctaataaggactttttaaaaaccgtaagctttgtatgacagttttccatttttatttttatttactgattgctcttgatcatgtcagatggctgacatgggcggcgagggtttaccgtacagcaatcctagcacgtgcttcggtcgtccctgttccgtgggaggcgttttatttttaaaaccatgtattgctggtgactgtgatttccacattgacacactggcattttccttactcctgtgatttaatgtgttgctggacatcaccgctgaagcttctgaaatgtttccttaaaatttgcaaactgagacccatcggtgctgcctctgttgctggtgttctcagactggggcgccgttgaggagcacgcgctccgtgaagggcacctgcgtgggtgccacgcgctccctgcccagcatcgctctcatccgcctgcctgtagggcagcaacatggccacatttggaaaccaccctacagccagatgtcttttccaaagggtcggcctggcagggctgagaaagcccttgtgcaagtttgtttcaccactggctcgggttcaaacgaaccacgttcccttgttggcatccagttttcttttttcaaggcctttattttaaagccatggaaagggggtcatttcaccaagtggaaatgccttcttgaaacagctcactgttccargacccagcaactaaaatgctaggagttttttcaaacaaaagcttgaataactgtcagtgtctttctctcttcacccctatacctgaactcattgtggtggcttaaatcagtaactcttggtgctttgaaacctttacctatgaaaaattcttctcctaaggtgatatattcacacagatacagttacacactgtggctgaattttgctccctgaatatattgacttccagtaaagcactaatatatccgtgttagtcctggaacattgcaatgtggaaggtttctctgcacttccctactggatgcattctctaggttgtaatgctatgctggcatatttgaattgattacagccttcttaagggagaaaagaaaagaatagaccccatcagcacattttgctgcggggaacaggtgaatagctttggcaagccttttgaggatgtgcggctttgtcgtttgttgccgaactctccgtcgttttgtccatttgtcatcatctcacgcagtcattttcatgcagagtgtctgtctcatcagttcttgtgacatcataaccattcatccttttgttgagcctgtgttatgagtggccaagttcaatttcatatctctcaactaagtatctgcctatgtgttggagccagaaaattagaactatcgcttgcggccaaattcagcagccatcacgccctggtgtgggaactgagtggggccactggagtggccgagctgctgaccaaagtaaacaagggtggtggaggctgggggaygtgaggtccgaagagaaagtccagggtgctcttggatgaaagagcccctcctggtgcctgctgcaggttgagagatatgttgktcccatttgtcttttgtctcactcacttgctgtgctttttctttttgttgtttcacccagcgtcccgaacccacaagctcactgtgcttccttcccgtaatgctacttttgtgtattccaatgattctgcctactcaaatctctctgcaactgtaggtgagcatttatgtacttttgttcttcgttctgtcaagtttggatctacgatgaattctaaggccaattctgtttggtagtrtctgaattcactatgtcttggctagcaagtgagcaaatgtcccagtcaagacagcagatccaaggtgttaaaaaataaccactagggttaagtctaaaggaagattgcaatacattagaacaggggtccccagtccctgggccacagactggcagcaatccgtagcctgttaggaactgggctgcacagcaggaagtgagtggtgggtgagtgagtgaagcttcacctgtatttacagctgctccctatcgctcacattaccrcccgagctccacctcctgtcagatcagcagcagcattaaattctcttgggagcacaaaccctactgtgaactgcacatgtgagggatctaggttgcatgctccttatgagaatctaatgcccgatgatctgtcactgtctcccatcacccccagaggggaccgtctagttgcaggaaaataagctcagggctcccccgattctacgtgatggtgagttgtacaattatttcattacatattgtaatataataataacagaaataaagtgcacaataaatgtaatgcacttgaatcatcccgaaaccaacctctccaacccatccatggaaaaattgtcttccatgaaaccggtccctggtgccaaaaatgctggggaccactgcactagaaggtatatatattctttcaagttcccaggattgtctaagccagctgcttgttttcagaacaaaacagacccaagatgagaccttttctagacatagagattgtttggatttttaaatgaattgtcttctttgggggaggaaaagcatgccattttaatggaaaattaaagttaatttaaaaatacctcatcaaacatttgatttcttataaacattaaaatcagcatttcgtctgtagctggactttaaaaaaatcrttaaaagctgtttgtgaaacatatacccacaagaatcatagttaaattattgtcttatctgataacctccagagcctacatggctcaacatgaagctcaaagcaaaaggggtagtagcaactgaggcatttattagatcagcatagaagccagttctgaccctgtcaatcttaccctgtgatccttttcaacacaraaactgactgctctttcaactgtaaggtgattggcttccaaaattaatgtttccagtcaagcagtctgacttaggggtttatacagcctagctcaattacgcaaccactagtgatccatttaaccttgcaatatataggtgtccctcagcaaaaatgggataaaatttaaaaatgagtttaaaagcagtaaggaaaaacactgaggtcccttgagtcggttatccatgtgacaryatagctggaaagcctgagctggggttggggtcaggtccacagaccctgttagctctcccgtgtgtcttcagctgggctgacggctgccgggggctcagacattctccctgacccatgtggtagcaaagatctctgagcgattatgaccccagttaacagtaaatcctactcgctcctgatktttacagtcttcacttatytattctgtaaacsatttaccccacacactcaccatcagataccctggccatgggaacgggacacaagatgattggacggggcagtgcccctcgggatttgcggccagctgggcttgtcacccacaggctctcctgggactatgcaaaatgttrctcggggttttcctcctggcgcctgaaaatgggttctgctaaaatcccraatctacctgtccaggttcaggggatttcaattaaaactcaaaaggagaaggagttcagctgtagcttcacgttcacacttgcactgaaacgttccacttggaacactcagcatgaggacgggagtggggagggctcgaaaagcaggtcggcacaaagtccaggacaggaggcggtcgccacgccacgcttggtaacccatctgttggcaaatatcacaattatcacatcatcatacgatatgatatgcaatatgaaatccatatgcaaaggtctgtatgcatttgtatataatacatgcatattatrtacaaatacattaatatcatttmatattaaatttttatctgacatacacattaataatttacaatttaattactaataatattactgatgctatgaatattatcatagaataatatatgatgttataaatatatacttagataaataataatgcatacttacacataagttatttgtaggtctgacacacatcttcagacttttaatctcggaaggttattaacatatgatgttgtcatttttcttccttagatattgtggaagggaaggtcaacaaaggcatttacctgaaagaggaaaagggagtcacgcttctctattacggcaggtacaacagctcctgcatcagcaagccagagcagtgtggccctgaaggtgagtggctgatccctgcggcatctttgtcaagcatttcattctcagggagcacctgctcctctggtgactggaagatgtgaacctgaggttctcatcaattgcagaatgcgtgagaatgtcaacgatggatcggagggcaggggagggaggaatacaggcaaggaggttactaagcagagacttgtcctggtggctggaagttataacatcctcttacagagatgtgagatcaaaatacttaatcttgtaaaggatgaaaaaaaaccttcctaaaaaacagacacagcgatgtcacagtggggactggacagggccgtggcgtttgtgggaaggaaattgatggcatggcacctgcagtgtgatttctggctctgggatgttgacggtgagcgggcagggcatacccaagaacacttgcgcctggttttggttcttttacattcatcgagaggggctgggcagtggctcgaactgtcccggcaagcggtcgcaggcttgtggctaaagtcatgccatggacagagcagagatgcaaaagaaaaactggcaatcgacttgctttcgtttgcttttaccgtgtgaagtgtaacctgctctctcgtatctaggcttcaggcaatgcacgtctggatcacattgcaaattttctgggaaattgttctctgccttccaaaccagcttggagccttcaagttcctttctcctaggcaaaatgaaagttatgatttctagggaggaacaaagcttaatgcagtcctcgtatgaagctctaaggcattttggacatcagatggccttctgtgatgagttcattgtacatgattgtaggacaaaatggactttgttccagtaaaaataaacaacagcttagcaaggcaaaaacatgtgggaggacacatcttgggctttgtggaaaccagaattttgagcaatggttatgaggcccaaaaccacggtcaggtttacaaactcatagtttatgctgttcctgagttcaagcagctccataaacatcccaggcttatttatttttacaaagtaaaaaacaaccatgggctcggcgtgagctcggtggcaggggcgaggaggacgggagagtaatatgtgctccttccttgcattggattcgggaagggcgggggcatatctgtggtggctttttctgggtttctagagaacggcttctctttggagtagaggcatccagaaagctccagcaaccacactggaattgatctcatttgaggacaaggatggtgcaggtgccaggggttccaatgcctgggactatcacagataatgaacccaagaaaggagacagtgatgggaccagcgggaaatcagagctactggacaagttttatctgcacgccgaggtcacacatgagaggcctttgagctgattctggcctgtggctgtgttcggttggacgggcatcgggttaaaattttaaaattagctgtcaacactgaaaaataggaaatttccacagatttccagtttttcttgataaatctctcctgacttctctggctggctggagctaagtcgcggtggccctggacttccgtctccagttcccctcagtccccaccagacttctcgactcttcaataatcttcaggtcgaacagagcctgtccgcagcatgagctctggggccagaaggcgtgggttccacttccggttccgacctgtttgtggggatcttgggcaaccactgcttccctttgaaaagcctcatctgtaaagtgagtgaataaaaggaccttcccatacagttgctgtgaagactggaagaactattacagcatgttcctggcatgtggttggtccagctgtcgggaggccttttgggtttatcgctcatgtgtccatgattccaaacttccccttcgtcactagggtatcttttctaagaacaccactttgcctgcttggagggtgacttctgacagaggggccgttgtggttgaactgatcataatagctgcatacccttgttgagccccgactctgcaccaatccttggtctaatcccaaacatgtattcactcatttcatgcccccaacatgagacacacaagaacatgggtgaagaaagagccatgaactcgggctccatgtcccgctgttgacaatttcttttgtgtcatggttaagcagaacttttaagatactgttcatgtggccactttctttagagcatggccagatataaaccgggggtgcggtggctcacacctgtaatcccagtgttttgggaggcagaggcaggatgattgcatgagcccaggagttcgagaccagcctcggcaacacagtgagatcttgtctctaacttaaagaaaaagaaaagaaaggaaacaaagtcaggaaaccttcaatcaacgctggctcggtgagaggctgctctcgtgaggcctgatgcagacgcagagggtaggtggggcatttctcactgtgcccccctgggtcttgagttcagcctcacaaggtgaccgggccatgagcctgtgcgagggccatggcatgcctttcccgctttcctctgctgtatccttggctcaggcggattctcctggggccctgatgagcttgtacttctgtgtgcgggaaaacaagccgtgaacagggaagacctgcccagcattttccaaattaaagtccctgtagcaggaggcagaggaggccttcttagggggcacctggagcaactaaaacaaaaatcaatggttatgtttttattttaatatactgggcgcatcagaaacgagttttcacatatattatttaagaggagacttcagtgagcattgagctttaaaaatgggtagatttaaaggaaaatattccctaataatcataattcaggtgttattcagatctcataaaaattgtgaatgattagaacgtgggaagcattgaattagccttttcagatgtgttcagcgagtcctccgccacacttattggtgtgggcacaaacttataacctgttattcttataacgaaaaacaacgcttaaatagagaaatgctctccagcccctgcctaacaggcccactgcttttatatttctgatttccaaatcctgatgtggtctctgttcatattttcagcgattttttaacaaataatgttttaggggacagggttgatgctgagaaatgtggctgtcccccgagggtgcccatagaaggcagaggtccctgctccggacccccgctcccggccctccctccacccctgcttcttccagagcctctctgctgcttgtctgcctgccttcattctaggagctactgtgggtcctgtcttttggcaaatggtgccttctggggacatgttcttaaggtcacttgctgctaatggggcaagctttggaggacattggagagaaaaaggctgtttggatccctggccattcttgaatgttaagcttagaaaacacagtctgttccctcaatactcaggattctgtctttcaactcccctgaccagtgagcacacaggtggggaagctgaaaataggaaggggcacttgctggaatgttctggcaccttctttcacctacctggagaccttgaaggctcagctcaagtgtaaactttacggggatgagctccagtccaggtgagttcctctgtctcatgcccttattgctccccctacatttcttcccacaacttgcacggccgacgatggcctgtcacttccgtctcccttacttggtcttcagctcagtgaggacgaggactgagtctgccttggccagtgatgagttctcagtgcctggcacaccatagatactgcacactgaatgcatctccatccagggtttgctgcaccttcacttgaatactgaacaagggccattcacgactcctagagaaatcatttcccctacattgaacctatagtcaatactgactggacactcaagcatgttgctaggaggtagatctcatgtgaagtctgtgaccataataaagttaaatgaaagggaactgattgcataaaatccaaaaaaggtcatttccagcatcaaggtgcagattattaggtaattcttccttgcttactctcatttctacctctgatttattgctgtgtcggttaagatgatgttatttgatataacaagtaaaaacacggacaacggcagaaaaagaagcccattccgctattggactcctctgacttttagtgtgttatttctgatattgggctaaattccgtctcgagtaacttcggcccattgcttctagttccagctctcctgtgaatggctttggcagctcctgggaaaggcagcctccccgattagcccctcagcttcaccttcctccctctgtgaatgtttcctttgctttttcctcacatgcattaagaacttcttctgcttataaaccccagagaggctgctgaggtcccgaggcagcagctggagcatctccgcacggccatttccctcttctcagctttgagttgactttttccccctttgcatttgtttcctaaatttaaaacgctgtcaacaatttgctaagatacttgcaggtggagttttaggatagaaatttccagaggggcctgggggacacgggcctggcagggatctagctactcttactcaggcgatctggggtcagggggcttggaggcctgtggagcagatgatcctcagagaagcattcattcagcacactccttgaacagatggggaaactgaggcccagagaggatgcaagatgagcctgagctgccacgatgctgtggcacagtgtatctccaagtacagctcgtaggccctgggtggcagcaactgcaggttcccaggccccaaccaggacgtgctgattctgagtctcagtggacaaggcctgggaatcggcatttttagccagtctctccaggtgattctcgcaactcatgtgataccacatcccggaatccgcggctgactatacgtgcttggtttggtgggcgccgtgttgatcttctgtttttagagtgagactttctacattgtctcctgccaggtgggtggatccaaataccccagcccacgaggtttccagaaatggaatttctcccggtgctttcagtgtttttcttttaaaattaacattcaattctggcaggacacagtggctcacacctgtaatcccaacactttaggaggccgaggcaggaggattgtttgaacccaagagtttcagaccagcctgggcaccacaggaagaccctgtctcaatgaaaaaaaaaaaaaaaatttagcagggcgaggtggtgtgtacctgtcatcctagctactcaggaggctgaggtgggaggatcacttgggcccaggaggtcaagcctgcagtgagccatgattgcaccactgcactccagcctggaccacagggcaagacactgtctcaaaaaaattcaacctttatatatgggaaaatttcatttaaaaatctacacttctgacttctcttaaaatatgagaactgctcccctgcaccccactggcagcagttggtcaggggtaaggagtgactgccccttaaggcagggccagcattttccagttttcctcagcctgcaggactctctgctgtctgtcgctgtgactgaaggtggtggccattccccaggatggcctgcgtgtggctttgttagaggagcagggaaaggggaaagggaagaatttcttattcccatggggaaagtgggtgtcctacagccccagtcatttcaggaagcgattagagtggggctttggggtgggggtgtggagtgagaattttaaaggctcgatatgcaaacgagtgtctcctcctggccacaccaggcacagggcccatgaggcagccgggaaacgggctctgagtcttgcgtgaaagcgtatggg

SEQ ID NO: 6771 - DNA, 86500 bp, Homo sapiens
cccgccaccacgcccagctaattttttttttggttttttttagtagagacggggtttcaccatgatagccaggatggtctcgatctcctgacctcgtgatctgcccgcctcggcctcccaaagtgctgggattacaggcgtgagccaccacacctggcaagaagcttcttatacttcataggtagcttttctgttgctgcttttaagattctgtttgtctgtgactttcgacagtttgacaacaaaatgtcttgatgtggatctcattagatttatcctatttggaattttttgagattcttaaatttttaggttcattactttcctcagattggaaaaatttggggatgtaatttattcaaataaattctctgcacctttttttttcttctcctctaatactctcataatgcatgtgttgttctgatcaatggtgttccatcattcctttagttcttcacatgtttttttctttttcttctctgccacagtaattttcaaagttttttctttggtttcactgattcttatatttggtcaagtcttttgttaagcctctagtggatttttcaattcagttattttatttttgattccagagtttctgtttggttctttgtagttaccatatctttgttgatattctcattttgtttattggttatttttctaatttcatttagttgtctatatgtgctctcttgtaatttattgagcatacttgacagtaattttgaacttgtcatatggcaatttctgtatcttcatttctttcaggtcattttctgaagatttaatttactcctttgaatttgttgggggggtctctctttatatgccttgttattttttcatgaaaaaagtctgcatttgataaatccaacaacttttcagactttgtagtccagttttccatagggagaactttttccattctacatggctagagagattctggagccctctcaggtttgtctgggtatgcattcctctctctgtgctttggctcatacataatcttctatttgaaaaggtttgctggtttctattcaagaccctctctctggccgggagaggtggctcactcctgtaatcccagcacttctggaggtcgagggtggcagatcacctgaggttaggagttcaagaccagcctggccaatatggtgaaagcccgtctctactaaaaaaacacacacaaaaattagccaggcgtggtggcagacgcctgtagtcccagctactcgggaggctgaggcaggagaatggcgtgaacccgggaggcggagcttgcaatgagccgagatcgcgccactgcactccagcctgggtgacagagcgagactccgtcttaaaaaaacaaaaacaaaaaccaaaaaacaaaacaaaaaaaaccttctctcatctctctgatgtctgtgatactgtgacctctttagtgtcacagtaaattatggtactggctttgcacctagtctttctgtggtagtgcagattctgatgcacatttattgtctttgttctgagagatactcatcgtgcttcttcatttctatcagtacttgaatataggcaagacagagactaggcctctggcagtcaccctaaaggtgaaaacattggacataggaaatttagatgcttcatccccactgcatggaacagtgtgagatgggagggtctctagtgagacagaataatgagaatcatgatgtttctttccatgttgtatttatgcttattggtgcagaaaccttgtaattggtttctggagttcccacaaaggcatttagtttatttgttgttaaatctgtcttatgggagaatgagggtcccaggcttattattctgtcatttggctgaaatcactccctcccacattttttcctttttttttttttcataagttcttttttttaacgtttatactaagtttgtgtgtacatgcacggcttaccttcacgggtaaattgcatgttccgggggtttgatctacaaatgatttcattacccaggtagtgagcacagtactccataggtggtagcttttaaccctcactttcctcccaacttccagcctcaagtaggccctggtgactatggtttccctctttgcatccatgtgtacttaatgtttaggaccacttgtaagtgagggcatgcagcatttgtttttctgttgctgcattaatttgcttaggataatgacctccagttcaatccacattgctgcaaataaaattgttttatttattatggctacatagtatttcatagtatgtctgtaccatattttctttatccagtccacccttgatggacttctaggtcctatatatttgctattgtgaatatagctgcaatgaacatacaaatacatacatcatttgagtagaataattcatatttctctgggtatatatccaatcatgggattgctgagtcaaatgctagttctgttttaagttgtttgagaaatctctaaaccgtattccacagtggaagaactaatttacatactcaccagcagtgtataagtgttcccttttctcgacaacgtagcgagcatccattttatcatcgcatgggttaggaaggagtccctgctcctcaattttttggaataattttagtaggattggtacctgctcttttttatacattcaatagaagttgactgtgaatctctctggtccagtttttattttagattgcaggatttttattaataatttaatatttgccatgttattggtctatttaggatttctcctggttcaatgttgggaggttgtgtatttccaggaatccatccttttttttttttttttttttgattttctagtttgtgtgaaaagaggtgctcataatagtctctgaggcttttttgttcttctctggggttggtgtcatttgtcatttcctattgtgtttatttggatcttccctcttagctttttttattaatctagctagttgcctatcagtcttatttaatatttcagggccaggcgtggtggctcatacctgtaatcccagtactttgggaggccgaggcaggtggatcatgaggtcagaagttcgagaccagcctgcccaataaggtgaaaccccgtctctactaaaaatacaaaaactagacgggcgtggtggcacatgcctataatcccagctactcaggaggctgaggcaggagaattgcttgaacccaggaggtggaggttcaggagctgagatcgtgccattgcactccagcctgggcaacacagcgagaccccatctcaaaaaaaaaaaaaaaaggatttcaatttatttctggtttaatgttgggaggttgtatatttccaggaatccatctgttttgtttttttttttttttttttggttttctagtttgtatgaaaagaggtgcccataatagtctctgaaatgattatgattgaacaattttcattactattctctgacacaaagactgtatgtacttctgtatgtacaagctgtcagaattgactcctctcagatgagaagataggttattcatggtcttgtaggtcattggaaaggcttgatattgctataaggcacatgggaagacactgagtggtagcatgatctatttatttttaaattattttgaaaggatttctttagctactgttttgagaagatgccattgggcagacttgtgcagaactagaaagatgtatcaagaggctattgcagtaattgaggcaagacgtggtggtgcaaaccactgggaatatggaaggtgataagaaagggtctcttaatttagaaaggtggaatagcaaagattggtaactaaagaacagaactttatttctcacatttctgaaggctgggaagtctgagatcagggtgccagcataactgaattctgatgagggcctctttctggtttgcagatggctgtcttctcactgtgtcctcatatggcatagagagagggcgagaatctctcatttctcttattattagggtgttctactcttgtgaccaagtacccctaaaatgctccatctccaattatcaccacactggaaatttgggtttcagcataaaaatttggggggaacacaaacctgaagttcagaagtgggtaatagtttaatagtagggctaaaggaatagggtaaggatgtagatgtgagctttaagagaaaggatgaatcaatacattttgttaaaataaaattggaaatgaaaacatctataaccactacatctcacattgatacagtcacttctgttggtcataaaattcctctttgcctccacaaagttcaatattttagctggctcctggaaatgctacctttgcgaatgtaccaccacccccctcccagttagcctatgctattcacatggaaataaaaaatagctcaccattgtggccatctgagaacagtgtctagcttcctataaatcagttaatgatattaatttaaaaataacaaccctgattatactcctctaacaatcgaatattgtcaccaagttagaaaatcatgctttactagtgtaatgataatactgttataggatattagacatttgtcagatgggtagattgcaaaaatgtacaagaaaaaataacccatcagaaagtgagcaaagaatatgaaagacacttctcaaaagaaaacatttatatggccaagaaacatgataaaaagctcaacatcactgatcattagagaaatgcatatcaaaaccacaatgagataccatttcatgccagtcagaatggcgattattaaaaagtcaagaaacaaaagatgtgaggctgtggggaaataggaacgcttttacactgttgataggaaagtaaattacttcaatcattgtgggagacagtatgacaattcctcaaggatctagaatcagaaataccatttgacccagcaatcccattactgagtatatacccaaagtattataaatcattctactctaaagacacatgcacaagtatgtttattacaacactatttacaatgggaaagtcatggaaccgacccaaatgcccatcaatgttagactggataaagaaaatgtggtacatatacatcatggaatactacagagccataaaaaggaatgagatcatgtcctttgcagggacatgaatgaagctggaagccatcatcctcagcaaactaacacaggaacagaaaaccaaacaccgcatattctcactcgtaagtgggaggtgagcagtgagaacacatagacacagtgaggggaacaacacataccagggcctattgggagttggggggcgaggggagagaactgagaggatgggtcaataggtgcagcaaaccaccatggaacacatatacctatgtaacaaacctgcattttctgcacatgtatcctggaacttaaagtaaaataaaaaataaataataaaaataaaaacaagaaaagaaaatgtggcatatatacaccttggaatactactcagccataaaaaggaatgacataatgtcttttgcagcaacttggatggaactggagaccattattctaaatgaagtaactcaggaatgggaaaccaaatattgtatgttctcagttataagagggagctaagcaatgaggatgcaaaggcataacagtagtataatggactctggggactcgggggaatggttgggaggggaatgagggtgacactacatatggggtacagtgtacactccttgggtgacaagtgtactaaaatctcagaaatcaccactaaagaacctctccatgtaaccaaaaccacctgtacccccaaaactcatgaactaaaaaaaatcactaaaaaaaaagttatagggctgacaagttccaacttgtacaggaaaaaagatgagtatgctttttaagataaaaataatgtttgtaagtaaagaaaaaaactattttaattccacgtacctataaacattatatagttctttaattaatcaattttctcttttctttctgctgtttttcagatcttcttgacactcctgtcattcagctatgttgctaaagcactagctggaatttttatgaaaatatcaaccactcaaatagaaaggagatttgagatatcctcttctcttgttggtttaattgatggaagcttcgaaataggtagctttttattttctattttaataaccatacttgcatatgttaaaaaaaaactgtttttaacacttggctctcagccaggtgtaaatttgtccctcatgagcaatttggcaatatctgaaggcatttttagttgccataaataagctgaggaagggaggatgctactggtacccaggggtagaggccagggatgctgttaaacattgtgcaatgcactggacagacttaccaacaaagaacaatccttcccaaaatgtctatagtgatgatgttgaaaaactctaatcctacacaaactcattgtttgcaaattaatgccttgtgaagctttacctcccttgcctcaaggtgcccctgtgtgaagaaaggctgagggaggactataattcttatggttttaggagggagggactgtataggagcaacctacactagattctagtgtttaacggggtacacaattgaggggttaaagtctttttgggggaacgttgaagatattgctttgttgccttcattttaatttgtatttctgcaacaatagtgaagttttaaataataattgaaatttttttcttatgtattgctagctcacagtctctgctaaatttacctcttcttttcactttctaattatttagagggacctcccaattgtctgttacataaactgcaaatattttatacgatttttgtttctaatgtaactgtatttacaatatgcttaactaaataatattttaaaagtaattgtcaaaggaagacatctctttaaatcagttcaaaatatttgtgattcaaagatattacactttacatgtccttcactctttcacctctcaggctcaatgaaatcatcaaggattttagaattagaatgttattagttttaaagtttaattcactgaatgtctccttttgttaataaattgatccttcatatttttgttaaactttgcacctgtttaacagcacttatttgaacatcaytatcagttttgtttctttgcttacctctgtttcttgaatcttgtgacttcaaatctcatctttagtctttctggaatatagcttcatgtgtagatgaccttctstatacacagttcccacatccatggattcagccaaccgtggatgcaagatatattcaaaaaatataaaaattaaaaagtagcaatacaattgtaaaaataatacaaataaaagcaacacagaataacaactatttacatagtatttacattatattaagtattagacgttatctagatttgatataaagtatacaagagggtatggataggggataggttatatgcagtattacacctttttacttaaggaacttgaacatccacaaatcttggtatctacagagcatcctagaagcaataccccatggacactaagggatgactgtaattatttttttaggaagaatttaaaatgtggcatattatcttggaaaatgtgcttatttgactaccatatttaagtgataaattgtctggatatggaattaaacattcaaaatctctttttcttaaaacgtttaaattatttatctactgttttataacattcagtgttgtatataagaaattaatgccattgtaatttttatgcactgatatgaatctcttatctctaaatctctgaaaatataccagcatatatctgagactgtctctgtctrtattaattctgctggacaaaagcagaaactttcatcttaagtcttcctctaacacagggaatttcttctctttttcttttttctttcttttttttttttgagacagagtctcgctctgtcgcccaggctggagtgcagtggcgcgatctcggctgactgcaagctcgccttcctggttcatgccattctcctgcctcagcctcccgagtagctgggactacaggcgcccgtcaccacgcacggctaattttattgttgttgttgtatttttagtagagacggggtttcaccgtggtctcgacctcctgacctcgtgatccacccgccttggcctcccaatgttttctttcttttcttttttttgcggggggaggaggggaaacagtttttcgctcttgctacccaggctgcagtgcaatggcgtgatctcagctcactacaacctccgcctcccgggttcaagagattctcctgcctcagtctcccaagtagctggaattacaggcatgtgccagcatgcctggttaattttgtatttttagtagagacggggtttcaccatgttgtccaggatgctctcgaactcctgacctcagattatccacccgccttggcctcccaaagtgctgggattataggcgttagccatctcaccagaccagcgagtttattttctgttttctatttgtttttttctattttattctgtaacatatatgatataaataatatattttctgggtatttttgcttttaaatttttttcttctaaatttctacctattttccytatgtttcatcartcttctctgatgccatcttattatatcaagttctaatttgtaaatttttaataatattttaaatttataacaatactttatcattcttttgttacttttagtctgccattctgattttatggatgctacatgcccttgtacctctaaatatgctaacagaatttttaaaaaaatgtttttactgtttttagtttaatcttgtttaagtacttatgcttatgttgctttatctgctggtctgttttgatgctcttctttcatgctactattttcaatcaatgttcaataattattgattgttgtctgttaattgttatatatcaggctacagataaatctgaattggtctgctctgattgctcttcttccacgttttaatctaaataatttatactcaacattaaatctcaaatgacgtctcctccaggagattttcacaaagcccctaatttaagctatttccgtaacctaatagtacctctatttatctgttttattttattactaatgtgtttctagagaacaggtaccatggtttattctttttttatatttctgactctgagcaccatggtaggtatatagtataaatttaaagaatgctggaaataaattttaataatgcctgaatgatgataaaaagatttytcagattaggaagacatttttccatcccaacgcaatgcagtaatctccaaactttcaagaacattttgcttctctcatattgccaaattacctaagtgttttgtttgcatataaaacctattctacttatcattagtactataccaatttcaattagtggtttaatgcaggagagctcatcttcacaattaaattacattgtctttgagggaaggtatgatgtcttgggctttatttgcagtcattctggggcattcagttctatcagatacaaaattgaactaagtcatgtcaacataattttgttctctttctaggaaatttgtttgtgattgtatttgtaagttactttggatctaaactacacagaccgaagttaattggaattggttgttttcttatgggaactggaagtattttgatggctttaccacatttcttcatgggatagtaagtgttaaacagcactgagccattcattatcagcaacttgtaaattagcagtagaattttatttttatcctttaaatagttatcttttgagaatattcaccaagtatgtctagaaatggagtatatttcttttatatgatagtatattgctttattcatcatggctttcatagactttgaaataagaataatattacataaggtgtaaagtttcaaatgaaataaataagctatttattacatgaagtataacacgtgtacttcatgtctttgcctgtaagattttaataatagtaagacttcacagcttcatccactgcatataagtttgcccaacagcattacaccaaagttgttctttctaaggtaactgcatagttatgattagaggaaggtgttcataagagaaaactggaaatagctaaaacttaaataagacagagcttattttttacataaaagttaatgtagttagtccaaggatgatatgrttctattcttttcatcatagtgctatgccttgcatggccttggcctcgtggtacaaattgtggcaatgtattttctggcagcaggatagaagaagggaagaagaacaaggagaagaaccaaaaatgcacacagactgaggcttaaggagcattttcagaagcaaaatgtttccactggcttcacatttaccagaaawtggttacattttacacatagatatatagatactggggggraaaaggctttattccaggacgcggttwccagctaaaaacyccaacttcttttactatggaaggagagaaaaaaggataccgagagacaatgagcagtccctgttagagatgccaattacttactcattgccatatccagcaatcatgccttttggtcatcatattaattctgttcttttcctacatttgacccttataagaactttcttcttaatggtactgctctaatactcatcatagtccatatcttgattcatttttctacctttgtggcctcttcatcatgcccrtcctttttctctacttctgacaccataatttcagtgtcccataattccttctaatcttcttactatcttattcttcatgatttttaaggagaacatgcttagatgcaaccaccacagcttcatcttgcattgctccccacatttgaggaccacattccaggcttacagttctctaaatgtgccagagtatgtcatctctttgcacctgttgtttctacagccttgaatacttttcttcctttgtctaccagttaaacttctatccatcttcaatattcattttwtctgtcactcacattgcgaagtcttctttgatctacccaccacctccaagcaaagctgatcatctcttctgtgtgtgtatgtgacaacttgggaccttgcatattaaacttattgtgtctttgatcatatgcttttatctcagagagtgtgaaatctctaaagtacaaaaattgagctttacttctagctcattgaagctgaacatatctggcacactatgagctgccctcagagctcacagagctccttagtacttttggatatcagcatctgtctctaattcagcaccatctctttkgtccttattaagttcttcctcataaagttaaaataggttagaaatttttaattgagttttgaagagtcaagcattagtgtgtgtgtgttcatgaaagaaaatcagacagacttactatctttggcgataactcaaagggataaatagatayagttaacagactaaaaaaaaaacaggtgaaacaggatattttacatcttgaccagaatataagcactcctaggattatagaaaagtgataacccactttatccatggtgtgttgaattatctgtcttagtagatgctcccattcccgccccacccccacccccwcttatcacctcctcttctgacatacatcctgggaaattgacaaagagaagtccggtaattcaaagacagtgtcaataaaggggaaaatttttctgcatttttgggaaaggtgaaaatattcagcagataagcaaaatgttcaatccagtgttactcttatagttacaggtattctaaagaaaccaatattgatccatcagaaaattcaacatcaaacttaccaaactgtttaattaatcaaatgttatcactcaatagaacacygtctgagataatagaaagaggtaagaattaatactgacagttaaaaagtataaaatttgtatatctaattacatctataaaatgtgattttttagcaaaattcatttaagaacagataggaaaaatatttaaccgttacatacagacaaaatcatactgttaatatacacagttgacccatgaacaacgtagattgtagttgcatctgttcacttatatatggcttttgtccaaccaaacagaaggagaaacccacccatatggagatcttacttctataggtagtttccacgggggcaaccagaggaattaagtatgcatgaatttgggtacacatgagttgtcctggaacaaacatcctactatatatgtcaagggatgactgtaatatatatgaaggatatatttaggtagatgagaaaagagaaaaaatttaatyggtaactggcaaaaaacgtacacatttaaaatttaaaaagcaggaagtggcagaaatatgtgaatagtgtaactttgctcttcataaaaaatgcaaaatattatagcatttgaagattttgtgcctattataacacaaataataaattataattataacccaaaagtttaatgaaaagaaatggaaaggaggaaatataagatttcacattttatatacttctggaagtgtgtaaatttgtaactttttctggagattaatttttaatatatattaaagaacaaaaatatacttgcctactttagtgataaatcttaagaaamtaatcaggaatgtgcacaaggacttatttacaattatagccatgacatctgtgtttaacagaataaaaaatggaaatattttgtaactaaaaaagaagagattgtttaaacaaatgagggaattgttactcaacccactactgtacagtcattaacattttcacatagaagaaatcttaacaacatggggaaattgtgataatatagcgataactatgtatgcagcttaaaaataacctagatatttaattatatattgtacataatgaatattatgcatattttgtgcaccaaaaatgtagaagatctagagtaacatttgcaatgatcttcggtgtgtagtgtgattatagatattttttacttgttttctttgtgcccttccttattttcaaactttgcaaagtgaatatgaatcacttgtaattagaaaaaaatagaatagcaaagggcttaaagtagttaaatttctaataagaatgttaaaaataatgtttaaaataaaacactctcttgtctcgataggttgtgtgaaggaatctgggtcacacatgtggatctatgtcttcatgggtaatatgcttcgtggcataggggaaacccccatagtaccattggggatttcttacattgatgattttgcaaaagaaggacattcttccttgtatttaggtaataaacagaaaatattaaattgcatggttaatccttaggtctacctttggaataatagtatcattaactgtattctttattagaataaatatttggagaaatgtattgtgtaatattacttttaaaaacatgttgaataaaaaccaagtatttgcggtatctgattaaattgttttgtaataccgacaggtactgtgaatgyaatgggaatgactggtctagtttttgcctttatgctgggatctctgtttgctaaaatgtatgtggatatcggatatgtggatctgagtaagtacaatcggaacgaggtaccrtgatagtgctttttaagtgcaggacaccattcttccaaataattaaatttactttttcaatagtactttgcttactactttccaaaagttacaggtaggaaataaatgcgttaataatcagaataaaaatgaaattcagctcctttttatactttgcttataaaactacatgtaaatggagatttttaacaaacttattttagattacttaaaatgtccctctctgaaaactgactgccaagtccagtacattttatttttcagttgatgatgacttggttgatgtgtagaactcagagtttgctttgctaacatctccttgtggctgctttattggcttatggcgtgggtggtttaagagacaacagaatgcactttggttatgatcatttttcctggctttcactgatggcttggctacggcaacatttaatgagtgcttgtagaacaaatgaatgaaggagaggacacgtaaataaaatttatgacttttgtcttcactctcggagcatgctttatttctcctctcatagaagaatgagagcccatgttgtaatatctgccttgacttcatgccctccttcctacagatgtacctgtactatatcaatatttatcttgttttacccatacttatgaaaaagtatctatctttagctaatattaatcaatccaactggggtttagatttcatctttctgcctcttgttcatctgcatcccctctttttctcagcaarcactctcaagtctctcccatctatttacatatatacattttttatatccccaaatgacttcccagttgattaactgtttcctcaattcatcttcaaagccaagtacctagaaaaaaatcatctaagtgcctcatcgtctcatctcccatgtacttctcatctactataacctgcttcttacactaatgaaacacaaaaaaattctatgtaatttactaattgtaatggatatttttctataatttgtttaaatatgtacttctactatttattcatttttttcttagattttttaaaataactacctaaaattcaacctgtcaaatgctggtcttatcatcttatttccaaacccactttgttccctatattccttctcttgctgagtatctgtaccttaattcaatgattgactgaatttctgtaccctgtaatctcacactcycctttatttaaaattggaaaaacttttctctcttttattttcatagttcttaaagtctctttcaacatgtggctttcctcagataacccttacttaatcattttccactggtctcaaattcggtgcccctattaatgaccaagagcatgtctttattgtagcccttctcacaacaatctgtaaatatgtgtgtacttacccaccatctctttgagaacatgacagaatgttgtctgtcttaacaaataataactgattagtgtttgtgaataaacgaatatgattttctatctcaccaggacttaaatagatcactccaatgagaccaaaggattcattctgagaggaatagacatcacagtaggccaacaaatttgaaagtgccttctaatataaaacgaaagcaaacacttgatgatgatttatatcttccgttttagaaatgtgacttactgtagctacacattatatattatatttagtcatttgattccagtttcataattgcttttatcactgagtacaaaataagtggtgaagggctttagatctttagggtaatagttttgcagtctctctactctattcagaaataattacagcattttagaattcatggttattcaatttctactcctggccattcaaatattatcacatcttctctactcagtgagaagcatgaagtgcacttattataaagtatactttggcaaacttcaactcctacacaagccaaagagataacacaaataagtaaagaatgtcaaagaccggaaattagggtttgatggttagaatgggaagggttgttgttggtaaactgctatcgccacacacccaaaagctcaggcgccgcccagctctggcctgtacttttcaagcagaattttggacccagcattgaaaagacctcctgcttggttttctagaacatccagaaactaacattttttttttttggtagaattttccaccttttaacacggtatgttacccaacggaaacactgtcagacaatatctagctaggttatattctttagttcctatacaaagaccagtgaaagaaccaaaaaagtcctcaaaattacatttctggcaggtgataaataaatacttagcatgtatatggagttactgatttaaccaatcatttcctgaattcagtmtgtgttgttgattataaaacaatatgattataaaacaatatgatcacataaatcaattttagagacagattcattatggaaaataatttatttctagatagttttaaatcaagacaatattttcttatgtcaatattttcttatgtcaatgagtttccttatagatcagagtaatggcatcatttaattgtgctctgaagttttatggtgtgtgtttttccgtgtgtgtgttttctcaattcttattactttattattttattgtggtaagaacagctaaattaaaatctaccttcttaacagatttttaaaagtagagttgacctttgaacagcacaggtttgaactgtgcagatccacttatacatagatctttcaataaatgtattggaaatattttttgagatttgtgacaatatgaagaaacctgcagataaactacacagcttagaaattagaaaatgttaagatacagatatatcatgaataaataaaatatatatagatgctaaactattttataatttgctataataaaatatgcacaaatctattattaaaagttaaaatttgtccaactttatacagaaaaactcttataggttttacatgatgccatttgcagtcaagagaaatgcaaccaaatataacgatacagtattaagtcataactgaataaaattaactgtagtgcatattttactgctgtaaaaattatgtaaccatctcctgttgttattgcagttagctcaagtgttgagagtatttacttaaaatgtcacatgtcgttgatcatctccatgtgagtggttttcatcactctccagtaagtgatgaatcactttaaaaagtgaactcctgtggttcctgtgtatttttcattttgtttagtacaataccatcaaccttaaataacactgtgtgagccatatgaagtgctggaagtgctcccagaagcacagaaaagtcatgacattacaagaaaaagtcaagttgtttaatatgtactgtagtttgagctctgcagcyggccactgtttcaatataaatgtatccagtagaaggaccattgtaaacagmcacacacacacacacacagagagagagagagagagagagagacagggagagagagaaagagaaatggagcaacatgaagcctcactgcagctacaccagtgggcacaaaacctgtgcttttagtgaaatagtttttatctaatattgaaaatgcagcttttatgtaggtgcaacactgctattaaattaaagacaaggaatcatcccaaatgcagatcaaggatagactggataaagaaaatgtgctatatatacaccatggaatactatgcagccataaaaaggaaagagatcatgtcctttgcagggatgtggatgaagctagaagccattatcctcaacaaactaacaggaagagaaaaccaaacactacatgttctcactcataagtgggtaccgaaaaatgagaatatgtggacacagggaggggaacaacacatactgaggcctgtcagggagtgggcacagcaggagggagagcatcaggaaaaatagctgatgcatgttgggagtaatacctaggtgatgggttgataggtgcagcaaaccaccctggcacacgtttacctatgtaacaaatctgcacaccctgcccatgtatcctggaacttaaattaaataaaaaatttttaaaaagcgtacctgtaagactcaaacatgatttgagaaaaagtgaagtcattatatgacaacttaaagcaaaaggaaaatgaaggatttaaagctggagaatttaatgtcactaaaggataatttgaaaattttagaaagagatttgcctcagaaaagtgtcaagataactggagaagcagcttctgctaatcaggaggcaacagaaatagtgttctagatagcattaagaaaatcactgagaagaaaggacatctacccgaacaggtttttaattagatgaaagttccctattctggaaaaaaatgccacaaagtacacttattaataaggaagacatgtgagcaccaggatttaaggcaggaagggataggctaactctgatgttctacgcaaatgcagtggggtttaggatcagaactgttcttacctatacaactgctaatccctaagccttaaaggggaaagataaaaaacactttttagtgttttggttgtacaacaagaaggactgaacaataagaacaattttttactaaaaagttctgacagtttccattgatagtttgttccccaagacaaggaatatggcggcagaaagggtttgcttttttaaagttcttttggtaatagacaatgctcttggtcatccagaactccatgaattgaatactgaaggtgctgaagtggtctgctttatcccaaacacaatgtctctaattcagcctatagatctgaggttataaggacatttaaggctcattgcatgttacgctatagaaaggattgtcattaaagtataataataataaaataaaataaaaaaataaagtttgttttatgtaaaccacaaaaaaaaaggattgtcaatactgtagaagagaacccctatagagagaacattataaaagtmtgaaaggattacaccgttgaagttgccatcatctttatagaaaaagccacaaaaagccgtcaagcaggaaacaaatttctactggagaaaactgtcctgatgtagtgcataacttcataggattcacaacatggtcattcaaggaaattacaaagagattgtggatatggcaaacaaagatgtgaagaatttcaaaatatggatcttggagacattcaagagctaaktggcaccacrtcagaggagtcggcagaagacaacttgatgaagataagtgctgaaccagtctcagatgatgaggaaaaaacatagaagaatcagtgtcagaaacaaattgacattagacaatctrgcagaagtgttctgattattcaagactgttttggtatattttacaacgtggaaccttctgtaatgtgggcactgaaacaaaagcaaacagtggaagaaggattggtatcatatagaaacatttttagagaaatgattaaacatcaaagtcaaatagcaattttgatgtatttctgtaaaggtgcactgtgtgtacctgcctttcctgtcttcctttttaccccatccactgcctccacctctactaccctacagaaagcaagaacaatgccttccctccctcstccacctactcaatgtgaagagatgaggatgaaaaactttatgagacccacttctatttaatgaatagtaaatatatttcctcgtgattttctaaacatcattttctctagcttactttatagtaagaatacagtctataatacatataacatggaaaatatatgttgaccgtttatgctattggtaaggtttctggtcaacagtaggctatcagtagttatgttttgggggaaccaaaagttatacacagattgtcaactgtgtgaggggtcagccaccctaaatctcatgttattcaaaggtcaactgtacaatacagtattattaactataggcacaatgttgtacagcagatctctagaacttattcattttgtataactgaaactttatacccattgactagcaactccctatttcccctgttacccaaccactgtaaatcaccattctactttctgctttcatgagtttgactcttttatatgcctcacataaatataatcagtcagtatttattcttctgtaatgggcttatttcacttagcataatgtcagcaaagttcatacatgttatcacatgttgcagaatttcttttctttttaagactgaatagtattccattgttcatatttatcatattttcttaattcgtctttcagtagtcattaggttgttttcacatcaaggctatcgtgaagagagttgcaatgaacatgcaagtgcaaatatctctgagatcctgattttgattcttttgaattaattctacacccagaagtgaggttgctgcatcatgtggtagttctatatttaattttttcaggaatcttcatactgttttttatactaggtgcrtcattttgcattctactaacagtttgtaagtgttcagatatttccacatccatgccaacatttttcttattcttttttttgataacacctatcctaacgggtgtatggggatatttaattgtgtttttgattttcattaccatgataataagtgatgttgaacatcttttcatatacctgttgttatttctgtgtcttcttgggagaaatttctattcaggtctttagcctattcttaaagcagattattttaatttttttgctatggagttataagcatgtcttgtatcttttagaaattaaccccttatcacataaatgctttacaaataaattttcatgtattctgtatgccttttcactctattgattgtttcttttgctgggcagaagctttttagtttgatggagttccattagtttaattttgcctctgttgcctgtgcttttggtgttatatccatgaaattattgtcatgaccaatttaatgaagcactttccctagattttattctaggagttttaaagtttctggttttaaattttggtcttcaaaacagtctgagttaatttttttgttatatgtaagataatactataaattcatgtaaatatccaattttctcaacaccatttgttggagaaacaatcatttcaccattgtagccccttgacaaagatcagatgactgtatatatttatgtgagctctctcttctattctactggtttctatatccagctttgtgccagtaccatagtgtattaattactttagctttggaaaatatttataatcaggaagtgtgagctatcagctttcttccttctcaaggttgcttggctatttgatgtcattttttggtttatatgaactttaggattattttttatatttttgtaaaagtgtcattgggattttgataggtattgcattgaatctgtagatgtatttaggtagtatggacatttaacattattagattcattaatccatggacacaggatatatctttctaactgtttgtggctttttcgatttgtttcatcagtgttttgaagtattcagtgtacaagtctttcacctgcttaaatttatcatgttttatttctttttatttaattgtgaatgggattgttttcccaattgccttttcagatagttatttgttagtgaatagaaaggcaaacatttcttatgaattttttatcctgcaactttccagaacttgttcatttaatttaacagatgtgtatgtgtgtgygygtgtgtgtgtgtgtgtgtgtgtgtgtgtgtgaagtctagggttttctatgtataaggtcatatcatctgcaaatggagataattttacttcttcctttctagtttgatgcattttattatttttttttcttgactaatagctctggcatacaattccagggctatattgaatataattggtgagaatagtcatcctttcccttttcctaaaagctttccttttttcactcttgaatttgatgttcgctatgggtttctcatgtatggccrtgattatgttgagcaaatttccctttatttgtagcttgttggaagtttttgtcatgagagtgttgaattttatcaagtgcttttttgaattttactgatatgattgtgtaattttgtcttttattttgttaatgtgttttattacactgattgatttttgtatgttgaactttgcatttcaggtataaatcccacttggttatggcataatatccttttaatgtgctcttaaattatgtttggtagtattttgttgaggattcgttgcatctgtattcatcagggatattggcttgtaggtttcttttgatgattttgtctggctttgatatcagggtaatgctggtctcataaaatgagtttgaagctgttccttcctcttcaatttttggcaagaggttgagaaggattgtcattaattttttctttaaaagttttctaacaccagtaaagccatctgatcctcagctctttgttgtttagaggttgttgattagtgatttcatctttttactgttagtaggtctattcagactttcttcatgaattagtcacggtggattttttttttgtatctaggaatttattcattccttcccagttatttaattttttatgtataattgtgcatagtaatctcttatgattactttatttctgtggtrttagttataatttctctgctttcttttctkactttagttgaaacttctctcttagtctagattaaagttcatcaattttgttcacttttcgaaaaacatctcaactcttagttgtgttgatttttttctattctttactttgttttctaaccttttctttctgctaactttgggctcaatttggtttgctttttatattttcttgaagtgtaaagttgtgtttatttgacatcattcttttcttactgctataattatgtaaaatttattggtgtttattgacaataaacaatttctcagatgcttctagtgaccagaaattcgagaagttaacctctgattatagtctacaggaataaaactcaccctattaacgtaggatttatcattataaacttccctcttactgctactcttgttgcatctcatgttttctaatgctctgttttcagtctcgtttgtctcaaaatattttctaaatacacttttggttgatttgaacaatcaatttttcaaagatgtgttgtttaatatgcacattcatgtgaactttccagttttgcttctgctattgatttctagttttattccattgtggttgcaaaagataattagtatgattttaatctgaaatttgttaatacttgttgtgtgttgtaacatgtgatctatcttaaaaattgttccatttctgtttgagaagaatatatattctactgttaatgaataaagkgctcactgacaattgggtccagttgatctgtaatgttctccatttcctcattgatattctctctggttgttctattataactaaaagtggacatattaaggtcctctactattacaatcagcctattatggagggccactgcatgtcaccattttatataagggacgtgagcgtctttgtgttttggtatccatggaaggtactggaaccaatccctcgcaggtaccaagagatgactgtattttattcctctatattttttccttcagttctgtctatgtttgcttcatatatttatattctctgaggttgagtctataatatatccataattgtatcttgttggtgaatgaacttttaaaaatcattttataatgtcatttttttgtctcttgagacagttttgatgtaaagtttattttgtctaatatatgtatacctacccttgttttattttggttaccatttgtattgaatacctttttccaactcttcattttcagcctatgtgtgttattagatctaaagtgagtctcttatagacagcaggtagttttatccaatcagcaactctgtatcttttgtttggagatttaatccatttatatttagggtagttattgacaaagaaggattaactttgctatttttaagctgtttttctatgtcttgcagtgattttcccctcttttcctgtggtgctgtctttctttatggtttgttgatttttgtaatatgtttatttatttttccttttttgctacttctataaacattttctgggtatcatgggacttacataaaatataaaagtctcttttaagctgataataaattaacttccattacatagaaaaattctacattgattagcctgctcacactttatcttaatgaagtcacagtttacatctgtttatattgtatatccataaatatattttagatatacttattttaatgcttttgtcacttaaatttttataatttaattaaaataacttacccacaaatgatatactaatatattaatctgtagttgtctatgtatttgcatttaccaatgacttttgtccttttaatgccattatattgctatttggcatcattttgtattaagtagaaaattttcctttattttatttatttatttttacacaggtttatgggtttagtattccctcaacttttgtttgtctggggcttttatgtctctttttttttattgcacaggtatgtattgtttttattttttaaattttaaattcttaattttcatgggtacatagtaggtgtacatattttgggcacatgagatattttgataaagacatgtaatgtgtaataatcacatcatataaaatggggtatccatcccctcaagcattttatctttgtgtcataaacaattcagttatattattttagttattttaatatgtacaatttattgttaactgtagtcacccagctgtgccatcaataaatcttattcatccattctaaatactatttttgtacccattaaccatccccactttccccccaaacccctactgcacttaccaccctgtggtaaccattcttctactctctatctccatgaattgaattgttttgatgttgagatcccacaaataagtgagaaaatgtgatatttgactttctgtccctggcgtattttacttaatgtaatgacctctagttccatccattgtgttgcaaatgactggatctcattcatatttatggctgaatagccctccattgtgtatatgtataatattttcacttcatctggtgttagacgcaggttgcttccaaatcttgggtattgtaaatagtgctaaatcaaatgtaggagtgcagatatctctccaatatattgattcttttctttggggtatattctaagcaactgaattgctggattgtatggtagctttatttttagttttttgaggaacctccaaacacttctccagcatggttatactaatttacattcccaccaacagtgtgccttttttccacatgctcatcagcagttgttattgcctttctttggatataagccattttaacttctgtgagatatcttactgtagttttaattttcatttatctgatgatcagtgatgttgagtaccttttcgtatgtttgtttaycatttgtatgccttcttttgagaaatgtccattcaaacatttaaaaattggcccatttttaaatggattattaaattttttcctatagcattgtttgaacttcttatatattctggtgattaatcttttgccagatgggtagtgtacaaatattttttcttattctgtgggttgtctctttactttattgatagttttctttgctttacagatgcttttaactagatagaatcccatttggccatttttgcttgtatttcctgtgcttgtgaagtattactcaaaaatgttttgcccagcctaatgttctgaagattgtccttaagattttcttgtaatagtttcacagtttgaggtcttagatttacatctttaatgcattttgatttgattttttaatatggcaagaaatagggtttagtttcattcttccgcatatagatatgcagttttcctagcaccattattgaagagcctgtctttttcccagtgtgtgttctttggcacctttgtcaaaaatgagtttgctctatgtgtctggatttgtttctgggttatctattcttttccattggtctatgtatctgtttttatggccagtaccatgctgttttggttagtgtagctctgtagaataatttgaagtgagataatgtgattccttcagttttgttcttttctgctcaagacagctttgcctattctgtgtcttttgtgattccatgcaaattttaagatttttttttctgtttctgtgaagaatgtcatcggcattataatagagattgcattgaatctgtagattgttttgggtagtatggacattttaaccacattgaatcttccaatccatgaacatggaatataattccatttttgtgtcttgatttcaatttctatcctcagtgttttaaagttttcattattgagatctttcccttctttagttaagttgacctccacacatttaatttttttgtggccattgtaaatgggatttaattattttattcagattgttcactattgacatatagaaatggtactaatttttatatgttgattttgtatcctgcaatttgactaaatttgtttaacagttctaatagttttcttttttttggtggggtcttaggtttttctgaatatgtgattatatcacctgtaaacaaggataatttgacttcctttccttttggatgccctttatatctttcacttgtctaattgctctagctaggtcttccactactatgttgaataacagtggtgaaactgggtgtcctggwcatattccagatattagaagaaagatttcagtttttgcccactcrgtatgctactagctctgtgggcctgttataagtggcttttattacatttggrtatattccttgtatacccagcttttttatggtttttaccatgaagcattgttgaattttatcaaatgattttttagctttaatcgaaatgattatatggattttatccttcattctgttgatatctgtgtcatgattgatttgcatgtgttaaaccattcttacatccctgggataaatccaacttggttatgatgagtgatctttttaatgtattatttaatttggtttgctagtactacgttgaggacttctgaatcaatattcatcagagatactggcttgtagttttctttttttgatgtatgtttgtctggtttgcayagcaggataattccgaccttgtcttaggttggttttgccattaaaaccaatggcaaatactgcarttacttttgcaccaacctaatagaatgagtttagaaatattttctccttatctacattttagaatagtttgagcaggattgatattaattcttctttaaatgtttggtagawttcagcagtgaacccagcaggtccttggcttttctttcctgggagacttttaattacagcttcaatttcattacttgttattggtctgttcaggtcttggatctcagttcaatcttaataggttttatatatttaggaattyattcatttcctcttgattttccaatttattgacatatgtttgctcatagtagcctctagtggacctttaaatttcagcaatatcattcgtaatgtattctttttcatctctgattttacatatctgggtcttttctcttcacattagtctggataaatttctgtcagttgtatttatgttttcaaaaaacagattgtattattcatcttttgcactgttttatctcagatttatttatttcttctttcatctttattatttattctactaattttgggtttagtttgttcttgtttctctagttctttaaagtgtatcattagattacttatttgaagtttttcttcttttcgatgtgagcacttaaagctatgaatttccctcttggtactacttttactgtatcttatctcataggttttggtatgtgcttccattttcattcatttcaggaaaattttcaatttgctttctaatttgttcattgacccactggtcattcacgggcatattgtttaatttccatgtgtttggatagtttccaaaattcctctattattgatttctagttttattccattgtggccagagaagatgcttgatatgatttctttttttttttcttaatgttttaagacttcttttgtgacctaatatatcatctgtctttaagaatgattcatatgctgatgagagaaaatgtttattctggagcccttgaataaaatattctgtaaatatgtattaggtccacttgttccatagctcaggttaagtctttctctttcttgattttctgtctaataggttttttcaatgctgaaagtgagttgttgatatttccagctattattgtattgaagtctgtctctctttttcactctaataatatttgctttatatttcttggtgcttcagtgttgggtgcaaatgtattcacaatccttttattcccttgccgaattgaaccatttgttattacataatgacattatttgtctcttctttcagtttttgtcttgaaatctattttgtctgatgtaagtatagtaactccttttggtttcattggcatgtaataatatcttttgctgtcccttcattttcagcctgtgtttatytttatggggaattgcgtttcttgtaggcaacagatcattaggtcttgttttatcacccattcagacactctatttcttttgattggagactgtagttgatttacattcaatgttattaataggtagggacttactcctgccatcttgttatttgttttcttgtggttttgggtcttctcttctcccttcttgtctgtcttttagtgaaggtcattttctctaatggaataatttaatttcttccttttattttttagtttttggtctgtcatatgtattttgacttgagattaccatgaggcttgcacatacttacttataacccactattttaaactggtaacaacttaaaatgattgcataaaaaaataaatatgcaaaaagaaaactaacaggctgggcacagtggctcatgcctgtaatcctagcactttgggaggcagaggcaggcgggtgaccagaggtcaaaarttcaagaccagccttgccaacatggtgaaatctcatctctactaaaactaccaaaattagccaagtgtgggggcaggcgcctgtagtcccagctactcgggaggctgagtcaggagaatctcatgaaggtggaggttacagtgagctgagattgtgccactgtactctagccttggtgataagagcaagactatgtctcaaaaaaaaaaaaaaagaaaaaagaaaagaaaactgataaaacctctatactgcaacatcaacttcttatgtttaaatattttttcccttttatcttatttactgtgtatgtctcaaaaagttattgcagttattattttttattatttcatcatttagtctttctacttaagagtagtttgcacaccacaattacagtattataatatttggtatttttctgtgtgcctactattgacactgagttttttttaactttggatgatttcttcttgctcagtaacattattttctttcagattttagaactccccttagcatttcttacaggacagtcctggtgtaaatamaatcccccagttttttttttttttttaatctgggaaggtctttatttcttatttatctttkaattatatttttgctggacataatattctagggaaaaagtttttttctttctttatccttcacctttgagtgttgggttattaagtgccttgaggtactcttctttgggttatattttcttggttttcattaacattcttgtacttgaatgttgatattttctctaggtttgaaaagttctgtaatattatccctttgaataaactttctaccctttctccatctcccttttaaggcaaataactcttagttttgcccttttgaggttattttctgtatcttttaggtgtgcattgttctttattcttttgtctcttgtgactgtgcagtttcaaacagcctatcttcaagcacattattctttctttkgcttgatcagttctgctcgtaagagactctgaagcattctttagtatgtcagctgaatttttcaactcttaaatttctgcttsatggattttaataattttagtctctttgtttttaagatttttttatttttaatttttatgagtatataataggtgtatgtatttatggggtacataagatgttttgatacaggcatgcaatatgaaataaacacatcatggataatggggtattaacccctcaagcatttattctttgagatacaaataatctaattacattctttaaggtattttaaaatatacgattaatttattgtttactatagtcaccctattgcactatcaaatagtaggtcttattctttctattttttttgtgtgcattaactgtccccacctcccacctccaatcctctgctacccttcccagcctctggcaacgtccttcttctcattatgcctacaagttcaattgatttgatttttagatcccccaaataagtgagaacatgtgatgtttgtctttctgtacctggcttacttcacttaacataataatctccagttctctccatgttggatctggatctcattctttgagaatgactggatctcattcttttttatggctgtatagtattccatatgtaccaaatcttttttatgaattcatctattgatggacacttaggttccttcccaatcacagctattgtaaacagtgctacaacaaacatagaagtgcagatatgtcttaaatagactgattccgtttcttttgggtatatacccagcagtgggattgttaaatcatatggtaactcaattttgagtattttgaggaaactccaaactgttatccgtagtggttgcactagtttacattcacaccaacagtgtatgaaggttctcaccagtgtttgttattgcttgtctttgggataaaagccattttaacaggggtgagatatatcattcatcagatatctcattgtagttttgaattgcatttmtctaatgattaacaatgttgagcaccttttcatttgcatgtttgtcatttatttgtctccttttgggaaatgtctattcaagtgttttgcccttgttttgatcagattattagatttttttctatagagttgtttgagctctttgtatattcaggttattaatctgttgtcagagggggagtttggaaatactttctcccattgcataagttgtctcctcactttgctgattgtattttttgctgtgtgaagctttttaacttgatgtgatcccatttgtgtatttttactttggttgcttgtgtttgtcaggtattgctcaatatttttttttcacccagactaatgtcctgatgattttcaccaatattttcttgtagtagtttcatagtttgaagtcttagatgtatgtctttaatcacttttgatttgatttttgcatayggtgagagacaggggcctggttttattcttctgcatatggatatcctgttttctcagcaccatktattaaacagactgtcttttcctcagtgcatgcttttggcacctttgtctaaaatgagttcactgtagttgtatggattctgggttctctattttgttccattggtctatgtgtctgtttctatgcccgtagcatactgcatgttgttttggtctctatggctctgtagtaaaatttgaagtcaggtaataggattcctccagctttttttttttttttccttaggatagctttggctattctgtgtcgttgtgttacatatgaacttctggtttgatttttctatttctatgaagaatattattgttattttgatagagattgyattgaatcagtagattgctttgggtagtatggacattgaaacaacattaatcttccaatccatggacatagaatattttttcaatttttgttgccctcctcaatttctttcatcaatgttttaaaattttcactatagagatctttcacttcttttgttaattccaaggtatttgcggctattgtaaatgggattacttttttatttctttttcaaattgttcactgttagcatatagaaatggtactggtttctatgttgtttttgtactgtgcaacttaactaaatttgtttatcaggttgagtagcttycttgtagcatctttaggtttttctacatattagatcatatcatatacaaacaactataatttgacttcttcctttccaatttggatgccttttgtatctttgttgtctgattgctccagctaggacttccagtactacgttgaataaaaatggtgacaatgtccatcctggtagtattacagattatagaggaaaggctttcagttttcgcctttcagtatgatactagctgtaggtctgtcatatatggcttttatttaaagccatatatggctgtaggtctgtcatatatggcttttatataaagaggataatgaagatacaaaaatggtacaatagtaacattgtctatgttgggctatgtttcttctatccccagttttttaaagttttttttttattatggaggaatgttaaattttatcaaatgtttttycatcaattgaaatgacyacatgatttttatattttattccattgatacaatgtgctcagttgatttatttccatatattgaaccatccttgccttcctgggataaatcccacttgatcatggtgaatgattattctaatatattgttgaatttggtttgttaggattttgttgaggatttttgcataattactcatcagagatattggcctgtagttttcctttcttgatgtgtgtttgtctggtcatggtatgagggtgatactggcctcatagaatgaatttcgaagtattccctcttcctctattttttggaatagtttgagtagtgttggtattcattattttattctctttgttaaatttatctgatagaattctgaattcattctgtgtcatcttgaatttctttcagtttcctcagaacagctatgttgaaatctgtctgaaagaacacatatgtctgtttcaccaggattggttcctagtgccttatttaatttatttgatgaggtcatgtttttctggctgaccttgatgccaataaatattcattgttgtctgggccttgatgagttagatatttattgtagtttttgcagtctgggtttgcttctacccatcaatcttgaatatgcttcctagttgtttgaagtgacttatgccccatgatgattaataytgtggtttgtgcagtgttatagaggtactgtcttggtggcctcagataagatccagaagaattttctcgattactagacaaagactcttgttcttttgccctacattctccaaaacaatggaatctctctctttctgtactgagctacctagaatttgaggttcagtgatgcaagcacccttgtgcccascacattttcagacaacaatgaggattcatattttttccatgagtagttattaaatggtccttggggttaagactccaatgatgacagctgtcctgtcatgaaacctgaraaaacaccaagtgcacacaagctccagaaatgagaacaacgtcatgactgatttctggcctacagcaactgcaagatgtcatcaaatgttagactgattctagtttcaaagataacaaaatatgaaaagaagaaaatagtgtcttagaatttatgacatatattttactttattcatctgtggaggactgcaatcattatcattatttcccagaacctactgtatttcaaaatgatttttgactggcttcttttatttattctaggcactatcaggataactcctaaggactctcgttgggttggagcttggtggcttggtttccttgtgtctggaatagtatccattatttcttctataccattctttttcttgcctctaaatccaaataaaccacagaaagaaaggaaagtttcactatwtttgcatgtgctaaaaactaatgataaaaggaatcaaatagctaatttgaccaaccgaagaaaatatattaccaaaaatgtgactggtaagtattttacattcattgtcaacttggagttgttaatttcaatgaaagggagtgatgagtattccgaaatataaaccatactcaactcatcaagagttagctttcttctgcactaaatgtagctgaattatttttctaaaagtcatactaaagttaacaaatatttcttgagcacataacaagcagaagtggattaggattttgctctttagcaggcagaaaccaatcaaaggctacaaataaaacatttgttccttataagccaaagagtatgtattcattttaatattatatagtgtaaactgtgaaggttaaaaagattataatatttcattcattcacttattcaacagaaggtaccagccaccacactatgccctggtgacagaacatcacttttatttttcaaaaacctagtggataatattgagaagtatatagatcattgtagtaaagtatcttaaatagtggtaaggttatacttaactattctcaagtgtagagatagaataaggagaaggaattcaggagaggtttctctgtaggtaattggagtaagattatttttcttggtaattaaaattatatatattttaataagattatatataattttaataagattatatataattttaattagattatatataattttaatatatatataattatagcttacctaagtattcaaaaatgaagtggaaacaatagctgttattaaagtaattgaagtcagtaatgtgaattaggatcctttaccacttgatagtgactcttcttttgaatataagccctggagggctaatggagaaccatggagaagcagtaattgagagaatgatctgacagcagtcagagcaaaatatttgaaatggtaaggtattgacagcagttttcagattgggacaaaatggtgaaatcrtaaaacctgaagtagtgcaaccaacacctaaactcagcaaatgtttcaagtttttattgaagtaaggttacaaatttcccagggtaacctatgctctcctcatcaattctttcacttcccatttgttgttgttattattttctcctctccaccacactaacccaagagcaatgggatggatgatggagccttgtgtattcacttatgagagtggattgttcaatttcaactgcattggtagcttgaaattgtccatggtaggagaatttaccaccatacgttaccaykgaaattgagaaatcctacaaatcwggtttcccaaccaacaaatcagttgttaaacatttaccagcacaccactgttttaaaagttttttaataagcattctaaaaatagcatatcaaggaatttttgttttgtgtgtgccatgtttctgctttatctaatcaaatccataataattaatggattttcaaacctataagagtcagagttgactgtgaatccagaaataataaagaggataatgaagatacaaaaatggtacaatagtaacattgtctatattatgagctggttttcgggggggttagtgacgtgaatagtaaagagaatcttaattattaataagtgcctgttaagaatggataacatacctaaatacctatagtcaggagaaaagacatattggatttattctctatgttcttgttgaaaactaagactaattggttagaaagaaaggaaaatttcagttcattacaaagacaatttttaaacaatgagaactgttcaaaagttgagcaaattgctctcaggtagtcagcttcatgtcacttgagttgtttattgatctgtttattaaaaataagtaatacgtcacaattgtatagaagttcagaccagatgacatccaaattgctgtctgccacaaaaatttaacagtttkgttaatctacacgtttcattccttttgaccaaagatcacgactctcttagaaggcctcacaaatcagtggtgattcttactcacaggggagaccaatagagggaagtttagcactttgrcctaacaattttaaatattgtttattcttactatacattttcttacctcttttctgttctgtgccatttctcaaaatgtattttgttttattataatcagaggaaactattttttaaagaaactactgttagtactgttcatatctaatgaaaatctttagaggcctatagagaacaagatctttcaaagcccatatcatccatctctcaataactatttccgggcctgtcttgctgtactctaaaacttccttttgttctaagtagttccttccacttttaacttctattatagttgattgacctggcaatcacagacccagaatataaaatttctgccatggacagaagttagaaatttgttatcacacctatttgtaggcataggttgttgtactattactgtcataatgtcccttgggaccaacatttttatcccctgcctctccttcttgcgtcttaacacaggtgatttataatactgccagatttactgaggcagtattttatggtacaaaagctgtataccagggaaaaaagaagtctgagccctcatactaattttgtctttaaaatttttgaacatcagagattttatttctgtatctcagattatgctgyctttaatttaaatttatatttaacaattttattttaatgtaataattatattattaagtgctgatacataagggacatcacatttcttttcttttcttcttcttcccctcctcctccttatccttcttgcttcttctccttctccttttccttcttcctcttcctcctactcttcctcttcttyttcactgtgacagggtctggctccgtcccctaggctaaaacgcagtggcatgtattatgacttgctgcagcctcratttcccaggctcaagttattctccctcatcagccctccaagtagctgaagtgatgggagcatgccamcatgccagtctaatttttgtatattttgtagaggggtgattttgccrtgtttcccagtctggtctctaacttctgggctcaagcaatctgcgtgcctctgccacccaaagtgtagggattacagacattagccactgcaccctgtgaacatcacmtttctgattcagttttttttctttctgggacgcttagtgtattgcctagtacccaattgaaaaccaaacatttgtggaatgaataaataattaatctgtatgtaatagtrtggtagagtgccaaggataataaaatgttaagtgaacaaagtaagtcacaaaacagcatttatgcatgatcctatttggaagtaaaatgaactaaaccaataataatatgcatatgaaaaatattgaaggaatgtagttaaactgttaatagtaggattgaagggtgctctttctgtgttatgtagttttgtaattttaaatcttataaaacttatattttcaaaattcagatattaatgtattttaattacattgaaatattttgtttacttttataattctgcaggctttttccagtctttgaaaagcatccttaccaatcccctgtatgttatatttgtaatttttacattgttacacatgagcagctacattgcttctcttacttrtatcattaaaatggtggagcaacagtatggttggtctgcatctaagactaactttttgttgggtaagacatactttttacgtgtttacttgataaatgcaacattactgggtatttgtgttaaaagacagattttattgtgaaggttatttcacattttactaaatatacttttattatctctctaactttgtaacatttgtcaatattgtgatataaccattgttctgcatttgaagttgcatctcatgttaggtgagttctaaaaccaaagttgcttttgaataaaacatttagaggtagtatctgcataattggatcttatagtggtgagatcctgagactagcccttttgtaatataaccattataaacctataattcatggactgaaataaggcttcagccactgacaaaacatatgatattgacgttttttaaaaaagaatcaatttaaatgcctcacaaaatatgcatgattcaaaaaaaatcatrgaatttttttctacastatctattttcagtgtcatattgagacctgcccattaagaagttataacactttgtagtaactattctacaaatctatctattgtacaaaactatctatcaatttgtagaaagatggtagaaatttgataaatatgtgatgagttaaaaaatttatcaagtggtatgtgactaggtcatgagtacatgagaaaataataattagaaaatgaatgtacagaagcactagaccaggcacctggatgatctccctgttgaacctaaaagtttaaacttaaargttaaattttggctcccaataacttgatctgaagtttttgttagaggaaacttcatctttaataactcttacaggacaawgaaatggtaaaattgtaggaggaattaaccatttttaatcctgtatattgatctttttttattatagcagggtatatatgttttgatgaataaggatgagatattacttcaggaattcaattctaaatctctgggaaaatttgaagtaagctactgaggtttggaactctactgtgagagatgtaaaggattttagatggcaggctcaaaatctcataggaaaaaagattttgttttattgttgttgatttccagaaaaaaagaacgtgcttcatagaaataatctgttcagayatacaaatattcttagccattgccttttgctcttgaagaaaccaaaccctcataactgggaggaagaaattatttttgtctctcttacatggtacactggtcccctacctctaccttagtctgccaccctccttttaaagaagtgataagatgggatgaatttggttcacccagcctcatactgtgtttcatataaaaacacatatccaaaaawatatatatatatttttatatatatatttatttaaatatatatttaaatatgcatatatatttttatatatttaaatgtgtatatatatttaaatatacatatttaartgtgtgtgtgtgtgtgtgtgtgtgtgtgtgtgtgtgtgtgtatatatttacagcttttttctcttatttctaggagtcctcgccctacctrctgttgcaattggcatgttttcaggaggatatatcattaaaaaattcaaattgtctttagttggacttgccaaattggcattttgttctgcaacagtgcatctcttatctcaagttttatatttctttctaatctgtgaaagcaaatcagttgccggcctaaccttgacctatgatgggtttgtatatataattggataatatgttaaccatccaatcaaaagactatgtgtaaggaaaatagggtagaaaacaattgtaattaaattttcttttcactgagagaaatttcatttttgaaattcttaaaatgttcactccttaagaccttaaagttattttattccttcattaaagaaaagcaacatatgttgaagtaataatacctataatttatgggtaattataatgagtggtgggtacttttacccacattttataaatgagaaagtaaaatttagagaaatagataaattatatggctagcaatattaagattctgactcaaattttggggttttgactctaaaactcttagtcttaaccattaacattttagatggatcataatagtaatataaattaccttctccaaaagtgactgaataaccttcatctacagttctttttgatattaacaactgtctttatgaaataatactttttcacattgtacttaattctccttttttgcaagctaatatttttttcttctggtagtctacaatggaaatagcattaagatatattctgyttataattgtatgttagaccttgggatatctttacttttccattattatcatgttttgtcaagtatttttagtactacagtctctaccccaaatcgagagcaagattcttacacagacttttaataatcacttcaatatagccaacaatgtaagtttaggaaggttcacagtcaagcaacaggcaaagatgctcagattacagttcaataaccatgatctttagtgctgttactattggctcggagctttcaaaatctggattctatgaggtgttgattttaatttgtcaaatattctcattttcttatctaagtaacatcctgttcttggaggcttgttaaactaatcatgaattattttcctgcatgcttctaaatctaaactgtttttgatctttcctatcaactgtcacctactttggtaagtcaatacacattgtacctagaacattggattttagagataagagaaccttagagatcatgcagcccaactttcatatatcgcttcctttattatatgagacctacagaattatgacttgcttaaagacacacaacgactccctcttgatcttatatcacaccattagtttcaaaggcttcctgtttttcagggcaggctttttagcataaagctagtttcctgaaaacaagtatagtaactgtgccatctactgaaaagatggaagcaagagttatacaggagttgttcaatttaattaaatttactgagtccttcctgaaaggtgattatttgtgggaaacatcaattccctcatggaactcgtaatctaatgatagcaaataataaaatcaatgtattcaacatttatgaaatcttagtcactaggacttgttttataagtmaaattagtgcaggggtctccgaattatccctgattatctctaagggtccttgagactttatcaaggggtccacaaattctaacctatttttataatgatacaaagactttgccttttttattcacattatctcatgaaggtatagtgatatttttaagattatatgatatgtgttgatgccaccagtcttacagctaaaaatatgtgtgcttatgtattaaaatgtattaatattaatttctaatagagtgtctatagatataactaattaaaacaaaaaacttgggtccttcaatgctttttaagactctgaaggactcctaagaaaaaatatgtttgaaaactgtcccaaaattatttttccccaaaagtctctatgaggttgacattttttacaaagagtagtcacattggtaagctatggcagaactaatccgaacacaggaggaactaattgcaatttctggactgggtcattatcttagtccatttgagctgctgtaacaaaatattgtgtagtttgtagatacacagaaatgtatctctcacagttctggaggctggaacatacaagatcaaggtgctgagagatttggtatctggtaaaggcacacttgctagttcatagattgtgycttctagctgtgtttagtcatggtggaatatgcaaggggtcattaactccattcaggagggttcgtcctcatgaccagatcacatcctgacagccctatctcttaataccttcacataggagattagatttcaatctatgaatttgggggkgcacaaatatttagaccatagtaatcataaaccattctccataactactcccagtaggatgtcctcaagcakaataattagatgactttaaataaaattattaataatgtgttttctaaattaccgatctacttttttcttaatttaaatgcatactcattcaaaggtacttcatcaatcctcaatcataaacaaatttttgcaaaacaaagtagcttttaaaatcttgaagsagaaaatgtatacaaataatatgctttataattttagccatgattaaaattatatttaacaatttatagccatattgtaaagtaaatcagtttaaaaacattgtattgtcacttaaaaaatatacagaacttttctagcccttttcaactgattctattattttttgcttttcattcttcagaggttcagctctaatcacaatgaattcttattttatgtagttaagatacagattttaaacttcaaccacattaactagcatccatagattcacagaactttatagtgacctgagaggaacttcaatctaacgccattacctcaccaaaaaaaaaactgagtctagaaaaataaaattacttttctaatgtgaaccttcttgatggaatcataacaacctcttgtctaagtcttatctaatctcttatttcttttttaagttttactttttctaagtaacaaatcatgttttggtaaagaaggagagttacaagcattaaaaaawttaaaagcatttttaaaaacctattttggcatcatcagatcaaatttcttgatctaattgaagaaaatcctttatttcatttctcttttctttccctcaccttccctcctcctttatttcccttctacttcccccttgtctctctcctcctcttccttcttttcttcctctctcttctctttctctctttttgatatatgtctatcatatattttcagaaatagtccagtaagatctcatgtagatgtaccactttcttattgcaactcagagtgcaattgtgatgaaagtcaatgggaacccgtctgtggaaacaatggaataacttacctgtcaccttgtctagcaggatgcaaatcttcaagtggtaataaagagcccatagtgagtatttgtttttgtttttccttctctccttaatcaaaatctcagatttgattttttaataattgtttatcacatcttcctatagctaaggtatccagtataaagataaaagattccggtattatctgtcattgtgatggctgtgaagtataaacaaagcttcatataaagtcctgcttaggacacaaccaagtttttctgttatttgaattttaatttgagattaccccacttttttcttgagagtgtagaaatatgacctattagaatttaatccacttaggatttctgagaagcatctgatttgactgaagcacaagatttcaattaatttggaattaatttatccatcagaagttaggrgaaagtcctgattaacctgttgtcagaactacctactttactaggacaacaatctatgtgcattttcatatatatacctcctgatgagtttagctagggactcactggggcttttgactttccaataaattaatcaaggattcatgctcacttgactgccaaattctcaatttcctatgttgatttcctcacagatggcgcttctcttacccaggataatttagtatcctgcccacttaytcccaacatatccatttgaaattccattgttttcttcactcaaatgggtttttttccatgtgagccatgggtttttcctaatatcctgggtaactcccaatagttggaaactgggtatgctattccccatacctaccattcactcaacatctcgcaaagttgtgtattcatctttcagaccattttcctattaccaacattagcaacatagtcagctatgatgattactctctaccacactcttctatgtttcatttttaaacatttttcatctttcccttgcccattgtcataccgatatattatggaaaggcatggagaaatttgatgaacaaagcatcctaggttccttgaagataggccataactttaataaacttgcacaacatatatggcccacagactatacttaaaagcccacatctcatattcatctgctataatatccttcagtaagggtgccctcatttaatccctggtttcactttgcccagtagtgaagatctgaaagaaacgtaatattagaatcctaaaaagagctctgtctacatggagacgtcttcttaatgtgaacaatggctataccatctgggggctactgcaaaattcctttactaaatcctcagtaaaaaagaaatctctttttaaaataatgttctctgtatcaaagtttggttttattggccagtgtgctttctccataaaagattgttccatattattcttagtgaaaaaaggaggattaaaggaagcttggtggaaccataaaagtatagatttaaattcttttaaaattcttccttcaataattagtctttagcactagtaggttaaaggmaaacttcccttaaacttttgtttagcctagaatcagaatagattttttttaaagccacctacctacaaacactgcctgattaaatctctcaaatcatttgatcctaatgttcgccttctgtrctcttaccattagtcaggacattctgttgtgttggacctctctggtaataatattatctatkttattatctgycattatggtcttgaatgctgctttcgcctgcttaaatagaattctggcatccatgcccatctctatttcttctgtactctgtcctattttcaagagtggctctagttccagattttggcccctttcaaactgctgtattttctgaagatttggggtaatccttccccagggcatgtccctaatacttagtagagattgtcaaagtgagtaaaaatgcatattttaggaagtaagtgtgggtgaaagagcaatattgaaaacaatttatattaatkagaaaattatatacactttcatacactaatttcttaaattatttcccaattttaaaattaagaatttattaaatgttaatattcaataacattatcttatacagaaagtaattcaggaagcaattttgcctttcattattaagcaactgtattttcataatatttttaaaactgtaaatattttagtttgagacttctttaaatataatggaatgtattcatagcccagttgcatgyggcaaatgtatttggtaatatttcaaaaattatttttaggtgytttataactgtagctgtgtggaagtaattggtctccagaacaaaaattactcagcgcacttgggtgaatgcccaagagatgatgcttgtacaaggaaatcttacgtttattttgtaattcaagtcttagatgctttcctctgtgcagttggacttacctcatattccgtgctggtgattaggtaagtatgatgttttaaaacattatcatgtatattaaactaaaaacacacccaatgatatacatattttccgtatttagctcaaattcatattttgttacattttaattttctgggaattcattttcttagaattattatgatatttcaatgctatcattaataatataattttgtctctaatacttccattgtgaaatctaggctctatatattcttcttttattaagaatcttaagacacacactgattgacaattgcctcaattgtaaaagaatctctatatgattcaaaaagaacttttaattttcarttgccttggatcctaatgggccagttagagaaaatcatctgttgatttcattgaaagaaaacgttttgcaacaagatataaatataaacttcagtgtgtaatgaaattctaatgctgtaaattcacccacagcatggcttctgacctagtatcccttaataccattgtagacagaagaaaagtatatgtaaagaattcattcctttcttcactcattaaacagatatttagacagcatgtgatgcttaatgaagaatatttcttggtaaataaaaccaataaggtacttgttgtctcatagctttgaaaaacgacgagtgacgtgagacaaataagtttaaaaatgaacacataattacaaattgctgttagtcttaataaggaaaaagactgctaataaagggaataaaaagagaaacgaaatttgggagtgaaatgagggtatatgagggaaaggacttacaaagtgcatcttaaaagaagtgatattttatctaagggcatacagaaaaagccaaatgaagggctttcagggagagggtctaagtgctgcttccttaagacaggaaagcgctggtgtgtttgaagaccaaaaagaatccagttcattggaacatrctgagtgagaggggtgtggtataagagaagtttggaaaattagggaggaagcagataatgtgtgccctactggccaatataataattcaatcacctaaaactgtaaacatgtaaagacaggcaagtagatgttaaaaatatacatgataagtagaatgacctgggttaacatctaattatacttttaaaacatactacctgatcacagtcatggtcagccaacagcatgacgtggtagaaaaaaaaatgtgtttttaaattttgttaacatgaaaataaacctgtaaactaaatttacagttgttaaattttgactctgactgcaagttttatcaaattatttatagtaaatattccacaaatatatcttcatcttcaatataaaatgtctactcagagggagaagcatatatttgctaaattacagattcattaacataaaaattcacctcaaaatatcataccagtttacatctcaacgtgtttcagcttcttaattgaaactttttcataaggagagttttaaaaatactgtttcatccttgatgatagttatgatttatctaattaagaaagttatgaaatcaacattaccacttgtcaaaagcatttattaatctctcaccagcctttttctttgaagaaaagttttgtgaagctgacaagagaatacaaatataaaatatgaacttcattctattcatgattttctaaagtttatatcataaggctattgctaaaactagactaagcaggagtgtaggcatttactcatccagtacatattcattatgtgtgtcagccacaggtccacacaatgaagatgcagatgtgaatgaaagtgataaaacttcattggcatccagtggggatgggaaatggggggtggattggcataggagaagaactaataaacaaataagtaagtaaatatgtaaaatagggtaagtgtgcaacactagaaagaagaatctgagtaagaaaatagaaaaagtagggataggtaagagacactagttcagacattgtgcactggaaatcatatgataagagacctaaatgaagagatgaagagtgaaactacaagccatgctaaatggggacagggaaggaacaatcgaggcaaggtagagcaaaggtaaaggccctggtgtggaacatacttaacatatacatggtcagaaaaaagtgtgtgaggaacagagaggtatgaagtacaatgacagagctagcatgatccagattatattgttccgggaaagtctttggaacttattctaaatgcgttcagatgccctagagggtttaagcgttagtattacctaaagcttatggcttacctaacgaaaagaacactctaactgtgcatggagatggagtgtgtttttggaagacaagaatgaaatcatggaaaacataaggctatgatcattcttcacaagatggagtcttgattgagcatggttatgataaaggaagtgggaagcgacttgagtctcagtctttgttttgtttttaaggcaaagccaatatgatttgctgctcaactgaatacagcaggtgagagagagaatttaaggatgatctgaaagttctggtctgagttctagaaaaatgatagtactatcgaacaatatgggaaagactaaggaagagtagttttgggaaagtggacaagtaagacttcttgtgtctctaaaactgagctgcctgttagatatctaccaacaatgtcatatgcagaatccactattcaggagaaacactaaagttagaaacataaattttagagttagcaacatacagatgctatttaaattcaacgtactgttgagatattctagggactcagtatagatagaaactagatcctaggaccaacacctagcactctaactttagagatcaataatagaagaagccagtgaaggaaattgaggaagtcccatragttatgagaaaaactgagaaaagatcatgttcttgaagcataatgaagaatatatgaagtagtgagtaaagcaactatgtcaagggccgctgagagttcacaggagttagggactagaaagtgaccattggatttcattatatgctgatcactgttagcccaaacaaaactggtgcatgaagaaggaagggaaaaataaggctgttttggttattaaaaagtgtttcatttttatggatttaggggtacaagtgcagttgtgaaacatggatatattgtgcagtgaagtatggggttttgtgttctcatcatccgaatagtgtacattgtatccgatagatagtatttcatccctcccaccctcccatcccatcccatccctgccaccctctcccaacctcccacactttagtctctaattgtctattatttcactctgtatgtccttgtgtactcactatttagctctcacatcaaagtgagtacatgcattttttaactttctgtttctgcctcatttcactaaggataatggcctgcagtgctacccaaaatgctgcaaatgacttgacttcatttttttatggctgactagtattccatggtatatacatatatatcaaattcttaatctaactatcagttaatggacatttagattaattctacgactttgcttttgtcattagagctgtgataagcatagaagtgcaggtattttttgcttgtttgtttgtttttgttttgagacagagtctcactttttttgccaagactggagtgcagtggcaggatcttgtctcactgcaacctccgcctcccaggttcaagcaattctcctgcctcagccttctgagtagctgggatttcagtcacccaccaccatacctggctgatttttttttgtaatgttatgttatgttatgttatgttatgttacgttacgttacgttacgttacgttacgttacgttacgttatgttatgttatgttatttttttagtggagatggggtttcaccatgtcagccaaactggtctcaaactcttaactgcaggtgatctgcctgccttggcctcctgaagtgctgggattgcaggcgtgagccacttcacccagccacagattgtctttttaataaaatcatttctttttctttaggtagacatccagtactgggattactggattgaatggtagttcaatttttagaaaacagtaaatctctatactgttttccatagaggttgtactaatttacattcccaccaacggtgtataagcattctcttttctcctcatcttcaccaacatctcttgtttttttgactttgtaataatagctatcataaggatataagatgatactatgattttaattttaatatctctgatgattagtgatgttggggattttttatatgtttattgaacacttgtatgtcttcctttgaaaaatgtctgttcatgtcctttgcccactttttaatgaggttctttctttttttttcattgagttgagttcctcatatattatggatattagcactttatcagagccattgtttacaaatattttctcccattcggtgggttgtctgtgtcctctgttgattatttcttttacttagcagaagtttttaagtttaattaagttccattggtgtatatttgttgttgctgttgtatttccttttgaggacgtaatcataaatcctttgcctagaccaacatccaggagagtttttcattttcccctaagattttttatagtttcaggccctacatttaagtctttaatcaattttgagttaatttttatatatggtgagagatagagattcaattttatgtctgcatatatgactctccaattttcccagtaccatttattgaatagggtgtcctttcctcagtgtatatatttttttgcctttgtcaaagatcagtatgttgtaggtatgtggttttatctctagcttctgtagtctgttgcattaatctatgcatttatttttatgctattactatttatactggcttatagacttgaagtataatataaagtcaggtaaggtaataacttcagcttattttttgcttaggatgaatttgctcttcgggatcttttttggttccatatgaattttaggatttttttttctaattctataaaaaatgatattgataatttaatggaaattgcattgaatataggttgctttgggcaggatggtcattttacataatattaattatttcaatttatgagtgtgggaagtttttccattcaattttgtcatatatgactttttcatcagttctttttgtagagattttttacctcttaggttaaatgtattcctatttattttattttttatctattatatatatcagtaaraaaatcttgttatagacaactatattatctatcagttatctatcagatagataactgtattgggattcatttgttgatttggttctcagctagatcattattggtgtatggaaattatactggtttttgaacattggttttatatcctgaaactttactggagtagtttatcaagtctaggagactttcagaggagtctttaggattttctaggtataagattatatcataaataaacagaaataatttgaacacttgttttacaatttggataccttttattcctttttttcatctgattgctctagatagaacttccaatactatgttgaacaggagtgctgaaagtaggcatcctcactttgttctcattcttagaagtaatgcttacaattttccctccctcagtatgttgttggctgtgctttgcattttatggctttcattattttgaggtatatttcttctatgcctagtttagtaatggtttttatcataaaggaatgcttgattttatgaagtgctttttttgtatcagttgattttrtatgctttttggttttaattatgttaatttgatgaatcacatatattgatttgcatatgttgaaccatctttgcatttcaggaataaagaccacttcatccttgtgatgaaccttttgatgcgctactaattttttgatgtgcttttaattttctactgttttgttgaggatattttgatctatgttcatcaggaatattgatctgtagttttttttatttattgtttacttgcctagttttggtgtcagggtgatgctgacttcatagaatgagttagggaggattccttccttcctgattttttggaacagttttggtagaattggtatcatttcttccttgtttctttggtagaatttggctgtgatgccaactgttcttgcactttttatagttgttaggagatttcttttttattactgattcaawttcattactcattatttgttcagtatttctattttttcttggttcaaattcgggaggttgtatgtttccaggaatttatcaattttctctaggttttctagtttgtgtatgcagagaggtacatagyagtctctggtgatcttttgtatttctgtggtaatagttttaatgtcacctttatcatttctgattgtgcttatttgaatcttcttccttttaatggttaacctactagcagtctagcaatcttgtttatattttcagataaccaactttttttttcactgatcctttgtaaacttttttgcccacatttcatttaattttgttctttgttattactttattctgccagtttagggtatgggttgttcttgactttctagttccatagggcataatattagccatttaatgctacaaacttcccttttagcrctgatttgctgcatctcagaggttttgacatgctgtctttattttcattcattttgatttttaaaaataattctgccttgatttcatcattgacccaataattgttcaggaacaagttatttaatttccatgtatttgtatagtgttgagaattcctctatgtgctaatttctatttttatttcactgtgttctgaaaaggtacttgatgtaactttgatttttaaaaaaatgtattcactcttgcctgtggcatggcatatggtcaattttttagcatgtttcacatgcagctgtgaagaatctatattctgtggtagtaatataagatgttctgcaaatatttgttaggttcattcggtctagtgttcaacttaccagctttctttgttgatttttagcctccatgatcttcctgttgctgtcagtgggttatttatggaccctactaatgttgtattggcatttctctcttttcttcagtcaagtagtatttgttttatgaatctgagtgctacaatgttcgatgcatacttttagaattgttatatcttcttgttgaattgagcctttataaaatrtaataacctttttcattttttgactgtttttgattggaagtttgatctaacacaagtatagctatagttggtttatgttatcatgggatatctttttgcacccctttactttgacgctgaaagtgtctataccagttagttcagttaggtgggtttcttgtaagtagcataaagttgtatcttttttttaaacattctgccagcctatattttttaagtggaggatttagtctgtttacatttaaggtcagtattgatttttgaggttttgtttccataatattgttaattagttcttaattgctttggggcatcaattgggtaatttctttataagatctgtgtgttttatgcttttgtgtgtttccataatgattagtattgctctttcatttctgtgtttagaacacctttgagtatttcttgtaatgccagtctgtgacaaatatgtttagtgtttgcttattatctaggaaataccttatttctctttgaattatgaatcttagttaagggggataaaaaaaattcttgtctggccttattttgtaagaagactcaaaataggaccccagtttcttttggcttgttaaggttcctgcttacaaggttcctgcaaactctggtatgagtttgatgagatttctttttagacacttctctcttgcctcttttatgttgactttggatagtctgagtactatatgtttttcttaggttattcttgaaatacatatcccaggaatcatctcagatttttatatctggatgtctaggtctgcagcaagacccgggaagttttcctgagttacttattcaaacaagttacccacactttttactttctcttcttcccccactggaatacctataattcataagtttggatgctttacatgataacctttacatgataacaaagtgcttgaaggcatcgttaagtttcgcaatttaattttctatatttgtcttactgggtttacttaaaagacctgttttccagctcttaaatggtttatgctgcttgttcagcccattgttaaagctttcaaaaccattttgcaattccaccaaaatatttttcattttcagaagtcatgtctgtttttctcaataaaatctatattttcttttatatgctacatcatttttctcrtgtatttgtgatggctttcaactttggatctcaaccttaaataatcctgtatttcttaaaggccttatttctgggaggcttctttagaattctttagaatcaatattttggattttttttttttttttttgagttggagtctcactctgtcaccaggctggagtgcagtggcgcaatctcggctcactgcaacctccacctcctggcttcaagygattctcctgcctcagcctcctgagtagctgagactacaggtgtgcgttcttcattgactatataaaagattttattgtgtttagaatccaccgctggaggttagtgtggtcctttggagatgttgtaacactctttcttctttatacttccagaattgtttatctggttcttcctcatttggataagctatctctccttattttgaatttattttgttttaacaggatttttctccctttgaaactgtgactrtaatgtgtgctgcatagaatctgaaaggctgtattgaagaggatcaagaaaaaatgctagaaaggaaagtgtarcagtcagtatggaaagttcttttcaggagaagtgttagaagaagmagcagagaaaagatgtggtagttagcatgattgtgtcatcaagagttctgtttatgttcaatgctagaaatcataccatgcttgcatactaatgagaattagcagtacagrtgaaggaaactgataatgcaggagagagggaaagtaattacagaggaagatgaaaagagatgttaacaaggacacagagtttttctctgtagaagggaaaattgtctatgtgggtaaaaagccggtaaatgtgtacctgtagtgataaagagtattaaactttttttatctaattgcttctactttctctgttataaaaaagcaatgtaatcagatgagaaggacgataaagaaaagaaagagtgttcatatcagaaaawgttacctaktaatcttgaagattggagaaatatactgactggcaaaatggactagtaaaatattggacaattgcactggaggtcccctgaatattttggcttatgaatttaaagtgagcccaaccagcatggttgaattatttcctccagccgtgcagcacactacataggtgtagagaaggcagaggtttagataaaagcatttttgcttgtccaatacaataaaggatgagatagacaaaatgttcaagatatatgcaaaggattgattataacaaaagatcatgatgagataggacatgaagaggtgaaactagggatggcctgtgaagaggtcagaggagtcataagcctaaagagctagggctggggtatattgcagcagacgtatgaaacggagtaattttaaaatttgagakgtggtcatgaggagtgggatgctcaaaatagagaattttaaaagtgggtactgatgaactgattgtgggtgaaagaaatacgactttccagagaaaaggccaagaaactggaagggcagagcattgggagcataatctatatgaatattaaaataactaagaaaaggggcagaaatcattttgacaaaaacgacagagagcctagaatgaaaattgtcaagaaatgatragagttgtggtgtgccagtctacagctaacttcaacaaggaggttagagaatagtatattagkgtggtgcacctcttactgggatctagaggtctttcagaggagagactcaggtatggaagtggtaaaaacaaaagatcaataaggacttccacatttcaggcccactgatatggaggcggtggaaggaaaacttgatagagttgcaaggaaagagtgttaatgggagttagatttcatttagaacaagaaagtaaaagagctaaaaagaatgtaggaagttggccaggcacggtggctcatgcctrtaattctaacactttgggaagccgaggcaagcggatcacttgaggtcaggagttcaaaaccagcctggccaacatggtgaagccccatctctactaaaaatacaaacaaattagctagtcgtggtggtgggcacctgtaatcccagctactggggaggctgaggcaggagaattgcttgaacccaggaggcggaggttgcagtgagctgaggtcacagcactgcactccagcctgggccacagaatgagaatccatctggaaaaaaaaaaagtaaacattttgctggtaagaaacaagagtttccatgggcaaaataacagggtttgagtgatgggaaaagagtaggagagtgagttggattaaggaatgtgtattaaaccatgtagaatgagagtctttgtacccagagaagatctaaaaatcttggcattctgctggtgacaacggtgtgaggcatgatgtaagctgatgacaaacaaagcatcaatctacagtgaaaaatrtctttcatgataacagtgtgtgtgtgcatgcaagtgagcatgtgagtgtgagcatgcaaggagtagtgtgaatgtgcatgcatgtaaatgtaggagtgagtgtgtatgattgttattgtatgtgtatgttactatatcacacacatccatcatttccactgaattgaagatttcaggcccactcttaggaaaatatttaccctatctgcaagtcccccaattctcctgcatgctaaccctttccctggtaaaatacaagttgataacaaatgtcagtttgccttgtgcgtatagtatacaaactgcaactttcgaaaacgaattacagtgaaaaatgcctgtcaggcaattgtcagagaactcaaccaggggtgaagtgcaatctctcccttccccaaatctcctttgagaaatctgatatttgagagtaacatctccatagaaaagctaacctacccttcctggtgattttctcctgaccatctctttatgaaataaatttcctccttatatagcagacatggattcattgtcctcagtgtggttgttgtgccctcaactgggctaacaaagtactgctgtacttggtgaaaggagagccaaaacacactttccatttattgtctctcctaatatataactatcttatgtttagcttttaatatattatgtttaatttaacttttgccttttaaaagtttataaattctgttgaattcttttcagaatctcaataaatggtagctgttttgtaaagtatacaggtgattatgtgtaaattaaattgaagtttagagtgctagctcattttattggattcttataacatgagataagcattattatcctcacttaaccaacaaggaaactaaggctaagagaaattaagtgatatacttctccaagtcacttagatgagaagaagcataatttgtctatttactcccaagaatattaactagcatagtatctcttattaggtgctcagtgaatgtttgttgattgatgacagctacatagctctctgaaagaataaccatccaagagttcaagaaaaaaacaactttttcatcagttaatttactctttcagtaaaactgggttttttgagccgcagtcatcctcccttatcccaatccaccccctccactaatgcaaaataattttatttcacttgatatatactaagttatcacagggttggtagtgtaatcagtttattgaacacagaaaaatggaattggggaaatgyaagagtgagttagtttctaagtgaggatacaagtatagtcttaccttcagtatgacagttaaatacacaagacactagaatacagaaaagttttttgacccttctggttgtattatataatttatgaatcatattagtaaactaccgtgttaacactgatgacagaaataagatggaaaaaagaggactgctaagaattacttttggataatggtatataatattttcatatgagctacctaaatagtccacacaaaatcattttcttcataaacgtggcaagtctgttcatcacctttttataggattttcataaggatcaaatatgaaaatatttgttaaactgtcctgaaatcataaagcatagaataaataagaaataaaaataattattactaccatccaggtgtttgccttttaaaacaattgaaaatataactatatttaatgtgggccattcacttaagggttctcattcaatcatgaagaaaaatgatactgataaatgttttgatattaactcagtttgatattttaatgatgtgtattgtttctttgctttaatcatattacaggattgttcaacctgaattgaaagcacttgcaatcggcttccattcaatgattatgcgatcgctaggtatgataaatatacagattagaaatttaacwtgtaaatattcatgttaaggcttaaagacaatgtaattaattttcaactatgagaatgtataaaaaaggaataagtaagaatcatttccattgttgtgataaatgaaaataataagaggaaaacttgagtggcctagcagagaatttgattgttaattcttgttaaagccaatctgttaagagcaaggaatcatcatatttatattatactttttctaacagaaagataggtagtatttgaaattttccttctttcagaaaaataagaatatttcttccaggtataggcagagtggagagtcttccttctaaatggaggcattatttaggacaggcctcaattagcttaggagccctaggaatctggtcaggctgaagttgtataaaacaacaggagataacatgtaactgggccacttctcactacctggtcctgtaaggctgaccaactaaccactagcagaagttaatgcaaaagggaatgagaattcagactctagaactggacatcttagattaagagcgtgtactgaataaaagaaagatcagaaaattgtggtttattattggtgaagagtaagattatagactccagaggctaaaggcctttttaaattgtttttaaatttattttttgttatttcagtaggtttttgggaaataggtgatgtttggttacatgaataaattctcagtagtgatttctgagattttggtgcacccatcaaccaaacagcgtgcaccgtacccaatgtgtagtcatttatctgttacccacctcccaccctttcccgagtcccctaagtctactgtatcattcttatgcctttacatcctcatatctcccaattatgagtgtgaacctgtggtgtttggttttccattcctgagttacttctcttagcgtagtagtgtccaattccatccaggttgctgtgaataccattatttcattcatttttatggctgggtagtgttccatgatatacacagaccacatttcctttaaccacttattgattgatgggcatttgggctggctccatatttttgcaattgcaaattgtgctactataaacatgcatgtgcaagtatctttttcatataattacttctttttctctggctatatacctagtatgggattgctggatcaaatggtagakctacttttatttctttargaaatctccacattgttttccatagtggttgtactagtgtaccttccctcaagcagtgtaaaagtgttcccttttcaccatatccacatcaacatttattatgttataattttttgattatggccattcttggaggagtgaggtggtatcgcattgtggttttgatttgcacttccctgataattagtgatgttgagcattttttcatatgcttgttggccatttgtgtatcttcttttgagaattgtctatgcatgtccttagcccactttttgatgagattgtttggtttttgtcttgctgatttgtttgagttgtttgtaggttcagaatattagtcctttgtcagatgtatagattgtgaagattttctgctgttgtgtggattggctattaactctgctgattatttcttttgctgtgcaaaagcttttaagtttaattaactcccatctgtttatctttgtttttgttgtatttgcttttgggttcttggtcacgaagtctttgccgaagccaatgtctagaatggtttttctgatgttatcttctagaacttttatgatttcaggtcttgtatttaagtctttgattcatcttgagttgattttcatataaggtgggagatgaggatccagtttcattcttctacatgtgacttgccaattatcccagcacaatttgttgactagggtattctttctccactttatatttttgtttgctttgtcaaagatcagttggctgttagtatttggctttatatctgggttctctcttttgttctattgatctatgtgcctatttttataccagtaccatgctgttttagtgactatggccttatagtatagtttgaagtcaggtaatgtgatgcctccagattttttcattttgcttagtcttgctttggctatgcaggctcttacgtggttccacttgaattttaagattattttttctagttctatgaagaatgatggtggtattttgacaggaattgcattgaatttgtagcttgcttgtggcagtatggtcattttcacaatattgattctacmcatccctgagcatgggatgtgtttccatttgtttttgtcatctatratttctttcagcagtgttttgtagtttttcttttagaggtctttcacctcctttgttaggtatattcctaagaattattttatatttttgcagctattgtgaaaggggttgagttcttcatttgattctccacttagtcactgctggtgtatagcagagctactgatttgtatacatagatttttgtatcctgaaactttgctgaattcattcaccagctctaggggctttttggatgartccttagggctttctatgtttacaatcatatcatcaccagtgacagtttggcttcctttttaccaatttggatgcccttgatttttttctcttgtctgattgctctggctaggacttccagtactatgtttaatggaagtggtgaaaggaggcatccttatcttgtttcagttttcagggggaatgctttcaacttttcctcattcagtaaaatattagctgtgggtttgccatagatggcttttgttgccttaaggcgtgtctcttctatgccagttttactgagggttttaatcataaaatgatgcctgattttgtcaaatgctttttctgcatctattgagatgatcatgtgatttttgtttttaattctgtttttgtggtgtatcgtggtgtattgactggtggatgttaaatcatcgctacatccctggtatgaaacccacttgatcacggtgtattatctgtttgatcttctgttagattgagttagctagtattttgctgagggtttttgcttctatgttcatcagggatatcggtctatagttttcttttttgttatgtcctttcttggtttgggtattagggtgatactggctctaaagaaaatttaggaggaatacattccttctctatcctgtggaatagtgtcaataggattgataacaattcttttttgaattcctgatagaattcagctgtgaatctgtctggttctggactttttttgttgttgttgttggcagtttttagattaccatttcratctcactggtttttattggtctgttcagagtttctatttattcctggttgtttatttccaggaatttatccatcacctttagattttctagtttatgcacttaaaggtgttcatagtagcctcgaataatcttttgtatttctgtggtatcagtagtaatatctcccatttagtttctaattgagcttattttgatctgctctcttttcttggttaagcttgctaatggtctatcaatttcatttatcatttcaaagaaccagatttttgtttcatttatattttgtattttgttgttgctgttgtttcaatttcacttagttctgccctgatctttgttatttcttttcttcaattggctttgggtttggattgttcttgtttctctagttccataagatgtgaccttatgttgtctatttgtgctctttcagactttttgatataggcatttaaagctatgaactttcctcttagcaccacttttgctgtatcccagaagttttgataagttttgtcacatttttgttcctttcaaaacttttttaaatttccattttgatttcattgttgacccaacaatcattcaggagacagttatgtaatttccatgtattttcatggtttttggtgttcctttttctgctaatttccaattttctttcactgtgagagagtacttgatgtaatttccactttcttaaatttactgaaacatgttttgtggcctatcatatggtctatcttggacaatgttccatgtgctgatgaatagaatgtatattctacagtcattgggtagaatgttcagtaagtatctgttaagctcatttattctaggctgtagtttaagtctattgtttctttgctaactttctctcttgatgacctatctagcactgtgagtggagtattaaagtcccccactattattgagttgctgtctatctcatttcttaggtctagtagtaagttttttatataaatttgggagctccagtgttaggtgcatatatatttaagactctgatatgttcctataggactagttcttttatcattatataatgtgcccctttgtctttttaaactgctgttgctttaaagtttgttttgtctaagaatagctactcttgctcacttctagtgtccatttatgtggaatatctatttccactcctttaagtttatgtgaatccttatgtgttaggtgagtctctcctgaagacagcagaaacttcgttagtgaattcttatccattctgccattctatatattttaagtggggcatttaggtcagttacattcaacgttagtattgagatgtgaggtactattctattcatcgtgctagctgccagaataccttgggttgtgtgtgtgtgtstgtgtgtgtgtgtgtgtgtgttattgttatacaggtcctgtgagatttatgcttcaaggaagttccattttggtgtcttttgaggatttgtttcaagatttaaagctcttttagcagttcttgtagtgctggcttgatagyggcaaattctctcagcatttgtttgtctggaaaatactktatctttccttcatttatgaagcttagttttgctggggacaaaattcttgccgataactttcttgtttaaggaggctaaaaataggaactcaatccctcctggcttgtacagtttctgctgagaaatctgctgggattctgataggttttcctttataggttacctgatgctgatgtttttgcctcacagctcctaagattctttccttcatcgtgactttaaataacttgatgaatacgtgcctaggtgataatctttttgtgatgaatttcccaggtgttctttgagcttcttgtatttggatgtctggatctgtagcaaggctgggaaagttttccttgattattcccttaaatacgctttccagatttttagatttctcttcttccttaggaacaccaattattcttaggtttggatgcttaacctagtctcaaactttctggaggctttgtttattttttaaaattcttctttctttctctttgatgaattgatttggtttgaaagccttgtcttccagctctgaaggtctttcttctgctagtttgattctattgctgagactttccagtgcattttgcatttctctaagtgtgtccttgacttccagaagttgcgattgtttttgatttagcttatctatttcactgagaaattttcctttcatatcttgtatcatgttttttatttccttaagttggacttcacctttctgtggcgcctcattgactagcttaataatggaccttctgaattattttcctggcaattcagaggttttgtctggtttagatccattgctagtgaactggtgtgactcttgagggtgttaaagaactttgttttgttatattatcagaattgtttttattgttcctgctcattttgtagattatgacagagggaagatctggagctcaagggctgctgttcagatttttttgtcccatagggtgctcctttgatgtggcawtctacccattcccctaggggtggggcttcctgatagttgaactgcagttgttgtttttactcttttgggtctagccacccagtggagctactgggctctggattggtactagggagtgtctgcaaagagtccctgtgatgtgatccatcttcaggtctttcagccatagataccagcatttgctctggcggaggtagcaggaggttgaagtggactgtgatagggtccttggttgtatttttgtttagttcaccggttttgtgtgggttggcctccagccaggcagtggtgctttcaagagtacatcagccgcagtactatagagaggaagcaaacttgccctaggatcacctggttaagtattcaggtttctcagttggtgggcaaggccatagagctcctaagagattatgttcttgtcatcggcagccagagcaggtagagaaagatcatcaggtgggggcagaggtaggcatgtctgagctcagactctctttgggtagggcttgctgtggctgctgtgggggatgagggtgtggttcccaggccaatgaagttatgttcccaagggaattatggctgcctctgctgagtcacacaaatttcaaaagaagtagtgggggaccaggtgagcggcaggggggcgtggaaggaccggcagtaacaggccttaccctactcctatctagcatgcagtcctacaggctgatctcactgccactgtgacccccaacagcactgagtctattaccaggtatttggtgacgaaggctaaaaacttgcccctaaccaccagcctccctgctgagaaaggaagctgactccgttttttggcatctcagggagcctgcagctggtgatacagtttcttcaaagggtttgtggattctctcagctttcccactatgttgctatggtagttcttggagaaaaagttcgcgatgtgagtctccacatgctgctctgtttgtccaagtgagagctgcaagctagtcctgcctcctatcggccaccttttagaggcctatattttaaatattcaaagttgattagaaaagatttagaaaattaccctttctcccttgttgccatttgccctctttactgcacagctgcctgttgttaaacaatgtctagcctaacccctgtgagtgctccttcgtaagaactgtaaaccttatatgcttattcctgggaagtagcaaaagggcatcatccatctagggattggtgcagaggactgattatggcccataggtaaccactgatggcagaaggaaaaggaagtgggaggggtcagtttctgggacccttgcaagcaaaggaaaaagtatggccaagttacaatggagttgtcatgaagtgtagttggtgagaaggtcacagatcctgaaaggtaaaaagaagtgcaaagggaataggagagagaagatggagatgctgcagggttacatcggttctcttcccagtattccctttctgtgtccctaatcttccagcctctgtaatcttggcagttctctaccttcagattcagtgaagatacctcactcctggaacttgaacacagaggctgaaaatagttctgggtagttagtatttcttctgatatgttgaaatgagactgaaaatagaaattattttagcaacataaaatagaaaaaaataaatctggccatcctaattgtgaacatccaatttcgatgtgtccaccatatgccacaatgaagctcaaatgcctctatgggaaaaatgcacacttagtaccaaacttccaattcacaaacaatcatcttaaatatggtatgtctgtaaattgtggaaggcctattataatatatagtgtattaaattgaaaaagttatttagaaaataggtcatcagaggtttctaattccagtaattaagtgttagttaacacatttacttcataaagtttgtttaaaccagtggcataatgtgaagaaaataaattgttgacatctattttttatttttcaaaggtgctcctgagtttttgaaatctgcaaatttctcacccattttgtcagcactagattgcttcagatacattggcctcagacaccattcccttgtcattctaatatttcttactgtcagaaattgagaatgattaaaaataagcagaatcagtaaagtgccatatataaatcactgtcatgttttgtgacaaaatctgaaaagtatgagtcacaaaaaagaacaagaacaaactaaaatcttgtatgcttcagttctaacatctgaaggatagctctctactacgatgtccttcaaaattttgaccaaattacctatgcttaaaactaggagttaatctcagaatgtatacttctcctataaacaatgtatgtattcctggaatgctgtaccttccgtgaaaccatgcactacagataaaaattgacttagggacagaccactgaaatgtatgcaccgttgtgataagaccactaacagaaacaaaatttagcagcgaacctgacctgtacagcctaggctgctttaggagatattaagaaaagcattaaatcaatggaaagaaaatgctggactgtggtctttaagagcaccaagaaggaggaaatggggttctgagcccagaaagaagtaaaactggccaatagctgagcactctttgaaaccaggcctgaacatctctgggggagggaatcctgatgtaagcattcactttttaattttcttaaaatagtattaaaaatctttgactttacagcagttgaggtgagagctttttccttttcccataaggttgtaatttgactcccagtaatccagtctttcttgcctaagaaaaattgtatatgaatcaatatgatttccatgttttactaataacgttccccttttaccaatcaggtttaagttaatcgatgttataggaagaacagagtatataggtatatagtcctccttcttccctatgaatatagggagggaagagtagatcaaatatgtctatgacattaccatatgacttaagcctttgagcttcctaataattgtgattcttgggtagatgtaggccaaaacaatggaataattttccaaaattgtaaacttttttaactcaaaatatatcaatgttgaatatcacccagttatatctgaaacattttccttggattgatatcttcttatctcatgttgcaggaggtattctagttccaatatattttggggctctgattgatacaacgtgtatgaagtggtccaccaacagctgtggagcacgaggggcttgtaggatatataattccacatatttggggtaagttgtcataaatatattttattaatagattttttctttgactatgttaattcctaagtctatcattttagtgtgattataatattaataatgatagctaccatatagtgaacccttgctttgtatttagtattgtttcaggcattctggtatctcattttaataatcatagaaactgtagaaaatcactattttctccttctttaaatatgaagaaaataggtttcaagaataatgaataacttgtccaaaatagcataactaaaagaaatacagctgggatctgtacttgaatctctttttattacaaaattctcctcctctggcttctccaggaagatgtagaatgaccagctgggctctggttatatggtcattgaggaaaatatgggaaaaaatgtttccatactcttcataggcaaaggtattctcttagtgacattaagataackggatgatcatctggaggaaaacaagctgctgcaagtgtrccttactaattatagaaacattagtttgaaatttatatattgaccaaatacacaaattttacatgtgaaattataagtattagaactactcacataggatttcttttaattatctaggaagaaaaaaatgtgtttctaagtgtattagtcgattctcacactgctaataaagacatacccaagactgggtaatttataaatgaaagaggtttaattgactgacagttcttcaggtctggggaggcctcaggaaacttacaattatggcagaaagggaagccaacacatctttctttacrtggcagcagcaaggagaagtgcagagtgaaggaaaagaagagccccttataaaaccatctgatctcgtgagaactcattcactttcatgagaagagcatggaggtaaccatctccatgattcaattacctcccaatgggtccctgccatgacacatggggattatgggaactgcagttcaagatgagatttgggtgaggacacagccaaacaatatcattctgtccctggcccctctcaaatctcatgtcctcacatttcaaaacacaattatgccttcccaccaggcccctaaagtcttaactcatttcagcattaactcaaaagtccaagtccaaagtctcatttgagacaaagcaagtaccttctgcctatgagctggtaaaatcaaagcagataagttgcttcctaggtacaatggggagtacaggcattgggttaatacacccattccaaatgggagaaattggccaaaacaaaggggctacaggccccatgcaagccgaaaatctaatagggcagtctttaaaccttattgttccaaaatgacctcctttggctccatgtctcacgtccagtttacacagatgcaagaggtgggctcccatggtcttgggcagctctaccactgtggctttgcaggatacagcttcccttcaggctgcttttaagggctggcattgtgtctgcagctttttcaggcacacaaagcaaggtgttggtaggtctaccattctggggtatagaggatggtgggcatcttctaacagccacactagggagtgccccagtggggactctgtgtgggggttccaaccctacatttcccttccacactgtcccagcagaggttctgcataagggccccatccctgcagcaagcttctgcctagaaagttccatacatgttctgaaatcttagcggaggttcccaaacctcaattctttacttctgtgcatctacaggttcaacaccacatggaagctgccaaggctcgcggcttgcaacctctaaagccatggggcaagctgtaccatggcgtcttttaaaaatggctggagtgtctgggacttgtagcaccaagtttctgggctacacacagcaggggtccctgggcccagcccacaaaaccagtacttctcttaggcctcttgttttgtgatgggaggggctgccacaaaggtctctgacattccctggagacattctctccattatcttggcaattaacatttgtcttctcattacttatgtaaatttctgcagctggcttgaatttctccgcagaatatgggtttcttttctactgtatcatcaggctgcaaatttttcaaacttttatgcaccacttcttcttgaacactttgccacttagaaatttcttccaccagataccctaaattatctttctcaagttcaaagttccacagatctccagggtaggggcaaaatgtcacccaactctttgtatagcaacagtgacctttactccagctcccaacaagttcctcatctccatctgagaccacgtcagcctggactttatcatccatatcactatcagcattttgttcaaagctattcaacaagactcttgaaagtttcaaactttcccacatcttcctattttctgagccctccaagtctctaggaagttccaaagtttcccacatttttctgtcttcttctgagccatccaaacaattccaacctctgcctgttaccaaattccaaggttgcttccccattttgggatatctttacagcagtgcccccttacctggtacctatttactgtagtagtccagtctcacactgctaataaagacatactcaagactggtaatttataaaggaaagaggtttaattgacttgcagttctggagggctggggaggcctgggtaaacttaaaatcacagcagaagggaaagcaaacacatccttctgcacatggcagcagcaagaagaagtgccaagcaaagagggagaaaagcaccttataaaaccatcaggtctcatgagaactcactcactacgagaacagtgtggagataaccatccccataattcagttacctctcactgggtcccttccacgacatttggggatgatgggaactatagtttaagatgagatttgggtggggacacaaccaacccataacaccaagtatgacccaaatgccccaaatgataattaaaaaaaaaaaatggtggaaggatttttattgctttgggtttatacccagtaatacaattaatgggctgaatggtaattttgttttacattctctgataaaccaccagactgctttctacaatggcagaactaatttacaatcccaccagtaatgtatgagtgttccctttttttcaccaccttgtcagtatctgttatttttttacttgttaacaatagccattctaactggtgtgagatggtatctcattgtagttttgatttgtatttctctaataattagtgatgttgaatcataagtgagcctatggaacagaaaatcaaataccacatgttctctcttttaagtgggagctaaacattgagtacatatggacacaaataagggaacaagagrcactggggtctgcttgtgggtggagggtgagaggagggtgaagatacaaagctacctataagtgactatgattattacctgggtgacaataagtctgtacaccaaacctgcatagcatacaatttacctacataacaaacctgcacatgtacccgtgaacctaaaataaatgttaaaacaaagaagataaagaaaaggaacaaataataaaatattttaaaaactgcatcaccaaaacttattttaagtgaaattcaacagcaaaagataaattagaagaatttytaagtcagacacagacataggcaaatgtcctatgtatataaaaagctcttaaaaattaacaaaaacaccaccaaatgctggcaagaatgagataacaggaattttctttcattgctggaggtaatataaaatggtacagccatgttggaagacagagtcaaagttttttaaaagcaaaagatagatttactgtatgattaagcaatcatgctcccagatatttacctaaattaattggaaacrtgtccacamaaaaaaaccctgcatttgaatgttaaaaagtggaagcatttaagatgtcctttaataggtaaacaaataattgaactgtggtacattcatacaatggaatattagtcatcaatgtattagtccattctcaggatgctataaagaactacctgagactgggtaatttatgaagaaaacaggattaattcattcacagttcaacaggctttacaggtagcatgactgggaggcctcaggaaacttacagtcatggcacaaggcgaaggggaaacaaagcatatcttctcatggcaacaggagagagagagagagagcgcaaaagtggaagtaccacacacttctaaaccatcagatctcataactcactcactatcttgagaccagaaagggggaaatccaccccccataatccagtcatctcccaccaggcccctcctccaatttggcatgatatttgggcagagacacaaatccaaatcacatcaatcaattaaaaaaaaatgagctatcaatctacaaaaagaaagaaaggaaaattaaatgtgtaaataaaagaaggcagcctacaaagcttcagattgtataattttaactgtataactttgtagaaaaggcaaaacaatgggcaatgaaaagatcagttgtttcttggggctcagtggggaaaaggaatggatgaataggtctgaataggtctgacacaagacattttttgggctagtgaaactattctatatgatattataatgttgcatcataatatgcatttgccaaacctttggaaatttacaacatagaaagtgaactctaatgtaaaatatggacttaataatgtatcggtattctttcatcatttggaacaaatgtgctgtactaatacaaggggttaatgataggagaaactgtgcgtatgttgggcagggagccctccatactttctgtacagttttctgtaaaactaaaattgctataagatataggaactagtaaagaaaaaaaatcatcaaacattttccaaaaaagtcactagaggttatgaaacatgaaaatatgaacatcatttttttattcattgacaataagagaattgcaattaaaagtcacccagattgtcaacaaaggtgttgattggagattgtgtttgcaaagtaaatgactttgagccagtgggagtacttctaggaatttatcctctagcaagctatattcccaaaatactgaaaacaatgtaaatatcaatcaataagttatcaaatagtgacacatgcaggcaaatgaatattctgagttcttaaaaaaagaagaaacgagatatgtattttctaatatggaccctattcacaatatattgttacattaaaaaaaaggacaaagcmggaagaatacgtggagcatgctattgtttatgtaaagtggggaatgtttcttagttcaggtgaaatccctggagaaaactccctgggtcaaatttactagaaccttctctyacttaatatgtaaattcactatcaaacattcccaacaagtaatgatccagcttttcctggaattgtagtaaagcagcattcactaccccacattctcctaactttaagtcttattatataaaatgtcttcctaaatggtagattttatttccacgaataaaagtatggaaagaaataaaaaagcaacacttactaaatttactttaatgacattatgttaagaaagtgtttatttctgtctgtttgtttgctttttgagactgagtctcgctctgttggccaggctggagtgcagtggcgcaatctcggctcactgcaagctctgcctccaggattcacaccattctcctgcctcagcctcccaagtagctgggactacaggcgcctgccaccaggcccggctaatattttgtatttttagtagagacggggtttcaccgtgttagccaggatggtctcaatctcctgacctcatgatacacccgcctaggcctcccagagtgctgggattacaggtgtgagccactgtgcccggccgaaagtgtttatttttatttggaattataactcattttaggacaactgtcaagatgctcctcagaatctccccaaagcaatgatcaccaagtccaagcattaacatcacattttaggatagcattactttagttactttagtttcagtatgaaaagacttctaaaacaattttttaaaaaacccatattagtttcttttcctttagtgaaggttttggtagaactaaaaggaaatgtgtgtgtgtgtgtgtgtgtgtgtgtgtgtgttgtgtacacccacacatatatatgtatgtgtgtatgtaagtgggaagcaacagaagaggtcagagggatgtgatgtgagaacgactatgcatattgttgccggttttgaagttgaaggaaacggcccagaagccaaggaatgtaggtcgcctctagaagtgggaaaagacaaggaaacaggttgtagagcttacagaaaaaaaatgcagggctaggcgcggtggcttatacctgtaatctcagcactttgggaggccaaggaaggtggatcacttgaggtcaggagttagagaccagcttggccaacatggtgagaccccgtctctactaaaaaatacaaaaattagcctggcatggtggcaggtgcctgtaatcccaactactcaggatgctgaggtaggagaatcacgggaacctgggaggtggacgtagcagtgagccaagatcttgccactgtagtctagcatgggcaacagagtgagactccatctcaaaaataaataaataataaaataaaataaaaagatgcagctctatcaataccttgattttagccaattaaggcaagtgttaggcttctgacatccagtgcatgcttcaagcttatctcatacaccctttcttcaaaagtttgcaccacttcagccagctagaaataaccatccctctttacaactctcctggcatattgtagctgacacatggcccttactacttttattttagtcacctgtgttcactgctggattggttaaagtggacatttttaaaagagcagttatttgccaattaatacaacagttaaatggttatcttatgattattaaaggactttattttttagaatagttttagaatcgcagtacaattgaggagaaagcacagagatttcccatatcctgcctgctcccacacatgcatagccttgcccgttatcaacatctcccatcagggtggtagatttgttacaattgacaacccatattgacatatctttatcactcatgrtctgttccattggtctatatctctgttttggtaccagtaccatgctgttttggttactgtagccttgtagtatagtttgaagtcaggtagggtgatgcctccagctttgttcttttggcttaggattgacttggtatgcaggctcttttttggttccatatgaactttaaagtagttttttccaattctgtgaagaaagtcattggtagcttgatggggatggcattgaatctgtaaattacctggggcagtatggccattttcacgatattgattcttcctacccataagcagggaatgttcttccatttgtttgtatccacttgtatttccttgaggagtggtttgtagttctccttgaagaggtccttcacatcccttgtaagttggattcctaggtattttattctctttgaagcaattgtgaatgggagttcactcatgatttggctctctgtttgtctgttattggtgtataagaatgcttgtgatttttgtacattgattttgtatcctgagactttgctgaagttgcttatcagcttgaggagattttgggctgagacaatggggttttctagatatacaatcatgtcttctgcaaacagagacaatttgacttcctcttttcctaattgaataccctttattaccttctcctgcctgattgccctggccagaacttccaacactctgttgaataggagtggtgagagagggcatccctgtcttgtgccagttttcaaaaggaatgcttccagtttttgcccattcagtatgatattggctgtgggtttgtcatagatagctcttattattttgagatatgtcccatcaatacctaatttattgagagtttttagcatgaagggttgttgaattttgtcaaaggctttttctgcatctattgagataatcatgtggtttttgtctttggttctgtttatatgctggattacatttattgatttgcgtatattgaaccagccttgcatcccagggatgaagcccacttgatcatgttggataagctttttgatgtgctgctggattcagtttgccattattttattgaggatttttgcatcaatgttcatcaaggatattggtctaaaattatcttttttggttgtgtctctgcctggctttggtatcaggatgatgctgacgtcataaaatgagttagggaggattccctgtttttctattgattggaatagtttcagaaggaatggtaccagttcctccttgtacctctggtagaattcagctgtgaatccatctggtcctggactctttttggttgctaagctattgattattgccacaatttcagagcctgttattggtctattcagagattcaacttcttcctggtttagttttgggagagagtacgtgtcgaggaatttatccatttcttctagatcttctagtttatttgcgtagaggtgtttgtagtattctctgatggtagtttgtatttctgtgggatcggtggtgatatcccctttatcattttttattgtgtctatttgattcttctctctttttttctttattagtcttgctagcggtctatcaattttgttgatgctttcaaaaaaccagctcctggattcattaattttttgaagggttttttgtgtctctatttccttcagttctgctctgattttagttatttcttgccttctgctagcttttgaatgtgtttgctcttgcttttctagttcttttaattgtgatgttagggtgtcaattttggatctttcctgctttctcttgtgggcatttagtgctataaatttccctctacacactgctttgaatgcgtcccagagattctggtatgttgtgtctttgttctcgttggtttcaaagaacatctttatttctgccttcatttcgttatgtaccccgtagtcattcaggagcaggttgttcagtttccatgtagctgagcggttttgagtgagattattaatcctgagttctagcttgattgcactgtggtctgagagatagtttgttataatttctgttcttttacatttgctgaggagagttttacttcccagtatgtggtcaattttggaataggtgtggtgtggtgctgaaaaaaatgtatattctgttgatttggggtggagagttctgtagatgtctattaggttcgcttggtgcagagctgagttcaattcctgggtatccttgttaactttctgtctcattgatctgtctaatgttgacagtggggtgttaaagtctcccatcagtattgtgtgggagtctaagtctctttgtaggtcactcaggacttgctttatgaatctgggtgctcatgtattgggtgcatatatatttaagatagttagctcttcttgttgaattgatccctttaccattatgtaatggccttctttgtctcttttgatctgtgttgatttaaagtctgttttatcagagactaggattgcaacccctgcctttttttgttttccatttgcttggtagatcttcctccatccctttattttgagcctttgtgtgtctctgcatgtgagatgggtttcctgaataccgcacactgattggtcttgactctttatccaatttgccagtctgtgtcttttaattggagcatttagtccatttacatttaaagttaatattgttatgtgtgaatttgatcctgtcattgtgatgttagctggttattttgctcattagttgatgcagtttcttcctagcctcgatggcctttacaatttggcatgatttttcagtggctggtactggttgttcctttccatgtttagtgcttccttcaggagctcttttagggcaggcctggtggtgacaaaatctctcagcatttgcttatctgtaaagtattttatttctccttcacttatgaagcttagtttggctggatatgaaattctgggttgaaaattcttttctttaagaatgttgaatattggcccccatgctcttctggcttgtagagtttctgctgagagatcagctgttagtctgatgggcttccctttgtgggtaacctgaccttcctctctggctgcccttaacattttttccttcatttcacctttggtgaatctgacaattatgtgtcttggagttgctcttctcgaggagtatctttgtggcgttctctgtatttcctgaatctgaatgttggcctgccttgctagattggggaagttctcctggacaacatcttgcagagtgttttccaacttggttccattcgccctgtcactttcaggtataccaatcagacgtagatttggtcttttcacatagtcccatatttcttggaggctttgttcgtttctttttattcttttttctctaaacttcccttctcgcttcatttcattcatttcatcttccatcactgatacccttttttccagttgatcgcatcggctcctgaggcttctgcattcttcacgtagttctcgagccttggctttcagctccatcagctcctttaagcacttctctgtattggttattctagttatacattcgtctaaatttttttcaaaattttcaacttctttgcctttggtttgaatttcctcctgtagctcagagtagtttgatcgtctgaagccttcttctctcaactcgttgaagtcattctccatccagctttgttccgttgctggtgaggaactgcgttcctttggaggaggattggcgctctgctttttagagtttccagtttttctgctctgttttttccccatctttgtggttttatctacttttggtctttgatgatggtgatgtacagatgggtttttggtgtggatgtcctttctgtttgttagttttccttctaacagacaggaccctcagctgcaggtctgttggagtttgctagaggtccactccagaccctgtttacctgggtatcagcagcggtggctgcagaagagcagattttcgtgaaccgagagtgctgctgtctgatcattcctctggaagttttgtctcagaggagtacccggctgtgtgaagtgtcagtcttcccctacagggggtgcctcccagttaggctgctcaggggtcaggggtcagggacccagttgaggaggcagtctgcccgttctcagatctccagctgcgtgctgggagaaccactgctctcttcaaagctgtcagacagggacatttaagtctgcagaggttactgctgtctttttgtttgtctgtgccctgcccccagaggtggagcctacagaggcaggcaggcctccttgagctgtggtgggctccacccagttcgagcttcccagctggtttgtttacctaagcaatcctgggcaatggcgggcgcccctcctccagcctcgctgccaccttgcagtttgatctcagactgctgtgctagcaatcagggagactccgtgggtgtaggaccctccgagccaggtgcgggatataatctcctggtgcgccgttttttaagcccgtcagaaaagcgcagtattagggtgggagtgacccgattttccaggtgccgtctgtcacccctttctttgactaggaaagggagctccctgatccattgcccttcccgagtgaggcaatgcctcaccctgctttggctcaygcacggtgtgctgcacccactgtcctgtgcccactgtctggcactccctagtgagatgaacccggtacctcagatggaaatgcagaaatcaccagtcttctgcgtcgctcatgctaggagctgtagcccggagctsttcctattcggccatcttggctgctctccgatgatgtctttatttcaacttgacttttgagagataattgcacagggtacataattgtaagttggaggtgtttttctctcaacactttgaatatttcagtccactctcttctggagtgcatggtttctgaagagaagtctgatgtaatcttttgctcctctatacataaggtttgttttttttctggcttcttacaggatgttttcttcatctttgattttctacagtctgaaaataacaaamctatgcataatttttctggcaattttccttcttggtgttttctgagcttcctgggtctgtagtttagtgtctgacattcattcaagaaaaattttcagtgctttttagttcaaatatttattttgttcctttctttctccctttcaagtatttccattatacacacgtagttatcacaaagttcttggctatcctttttttttttcctctagtcttacttttctttgcttttaattttggaggtttgtattgggatatacttagagatagtttcctcagctgtaatctacctaacaataaaaaaattaaggtatttgtcatatctgttacagtattttttaatctttagtgattctttttggctcttagaatttttatctccttgcttayattgctcccctgttcttgcatgctctctacattattcattagagcccttagcaaattaataatagttgttttaaatttccattttgataattccaacgtccgttatatacctggatctggctttaagtcttattcttttcagactgtgtttattgccttttagtatgagacttgcaattttttcttgacagccagacaaaatgtactgggtaaaaggaatggctgtatttaagggtttattaatgtggtgtaaggtgctggagaaaaagtagcattcaacagttctatgataaggtctcaatcttttaccgagcctgtacctgtggattgtgaacttcgaacttccttctcagtttctgtctcctgcccttatgtagaatgagagggtttgagaggtctggagatgtatatttttctccatcccagaggaaggctagagaaagccggagtttagtttctgtagctttgcatttaaaaaaaaaaaaaacaataggaaagttttttattccccaatgaaaagaataaacagaattgctttcttaatatttgtatgtataacttctgttttttttttcttttaaggtctgcatactggggagaaaaaaatgtaaaatattttacacaatttaataatctattttctttattctcttttcacagaagagccttcttcggcttgaaggtagccctaatatttccagtacttgttttacttactgkatttatttttgttgtaaggaaaaaatcccatggaaaggataccaaagtattagaaaatgaaagacaagtaatggatgaagcaaacttagaattcttaaacgacagtgaacattttgtaccttctgctgaagaacagtaaagcatgtaattaagaggaggaaaaaaataattttgctgctgtttccaactaatgtattgattccataagacgttatttttgtggtgttctgagtcttttcactgagaattcccacattcttcacttatgatgcaacaatgaataagcctatgaatttataatgaaacaaactataaaaaatggtacccatggttaggacatagctacacaagcatttgtagtttagaatatataattcataaaaatttgaagtgagaggaatagttaatatgtaatagaagaaaaagtacttgctcaggtagttgtaactcttaataaaaccaatgactagaatacaagtggaagtaaaaaggtggagatagattaatagcctaaataacgagagaaccttatgccttttttaaaacaaaacaaaaccattgagacattttacttagtcctaaaatctagcctggatttatgctataatgatatctatttttcatgttaaattgtacattactcagaaattataaatattattactttataatttgaaattgtgtttgctagccaccttgatgtattttcttccaaactcccattaagatactattgaaaaaatagaaatagtcaaatatttgcaaggtataattgttaggcaacatattatagcatgtgttaagtttctgctaggcctatggaaatttttttttttatttttgttccatttttattcactttgaggaagtgttgcctttttttttgatgtacttaaatggctaaaataaaaaagacaatcacaagaaaaaaaaagaagaaaaaataaaaatgaaaataaaaataaaatatccatcaattttaatttcactccagttagagaaagtaaaagctctggtcttagatacatctcttgtatttcatctgtagtgagaagaaagaacactcttcattggcaattatcaaattatttgtttgaagagcatttttccacattcagctccccatcttcttgcataaggaaatggtttaagaaaagctgactttgacttgagaaacaaaatccattgataagatgtgtcttcattgcatctgtctgttctctgggagaaataaaatctgtgtcactctcttgcatacttgtttgttggttcatcatgcacaaaaagatatcttccagatctctacaagccaggcaagaaatagggaaaatgagatcaaatattgaaatattgcattttctagtaggaacaactctactgtaatgaatgctagaggttgtagtttcttattcttaattgatttaaattttttttgtatcagagtcaagtgtaaaaatatattttcaacaaatataattatagacctactttagagattctgaattcaagcatttgtgatatagcttggacatctttaaaaaattccacatgatgttagtattccttgatagacagaaagccatgtgataagacaaggtatgcctgagtatagcaaagtcacacaaaataaatattactagaatctgggaaatggcctgaaagttatatatatacatacacaaatacctatatatgtaatttcctatatatatacacacacacacataaatgtaacttcatatatatacacacacatatatatacacacacacatatatatgtaacttctggtgtgtgtgtctatgtatatatacacacacacatatacatacacacttatataaaaaagtattaatttatataattaatatatgtattaatgtttccccagtctgtaaactggagaaaagatacattaattacacaaacagaaacttgaggaaaaccacacatttgctaggtttgtaggtgtcatataaaaaatctgatgggatcatacacacgcacacataaacacacatacacatataattgtacatatttatggaatacaatttgatgtttcagtacatgtatacactgtgtaatgatcaaataatggttattagcatattgattaccttacacatttatcatttctttatcgtgagtacattcaaaatcctctcttctagctttttgaaagatacattattgtcagctatagtcaccctactatacagcaacttattcctcctacctaactttaacattttaccattaaaaaacctctccccatcttccacttcccgtttttcccatctttgataaccactattccattctcaatgccgttgagatcaatttgtttagattcttcacatgaatgataccatgcagtatttttctttctatacctagcttatttcccttgacacaatgttctccaggctcaactattttattgaaaatgacaggatttcatctttttttgtggccgaatggagttcattatgcatatctacctcacattttctttattcttttctctgttgatgacatttaggttgattccatgccttggataatatgaatacatgccttggataatatgaacagtgctgcaataaacatgaaagtgcagaatgactcttcaacatatttatttcattttctttggccatatacccagtagtgggattgctggatcatatgatagatctatttttaaatttttgaggagcttccatactgtttttcataacccctgtactaatttacattaacaactgtgtataaaactttcccattctccacagtattgccagcattttttttttttttttttttttttgcctttttgatgctatccattctgtctgggatgaggtgatatctcattttggcttctatttgcatttcgctgattgttagtgatattgagcatttttttcatataactgttggccgtttctatatcttccttggaaaaatgtctttgcccatttttaaattaggtttttcctattgaattgtttgagttccttataaattctttatattaatctcttgtcagatgtaaaatttgcaaatattttctcccattctgtaggttttctccttagtctgttgattgcttcctttgccatgcagaaattttttagtttgatgtaattactctatttttgcttttgttgcctgtgtttttgagatctcgcctaataaatccttgccaagactgaagttatgtagcatttcttcttgtattattctagtactttcatagtttcagatcttacatttaactctttagtctattttgaatggaattttgtatgtggtgagaaatagaggtctagctttattctattgtatgtggatattcagttttcctaacaccatttgttgaagagaccgagctttcttcaatttgtgtttttggcatcttttttgaatcttttggttgtcaatgcattaatttatttctgggatctctgtttggttacactgaactttttgtcttttctaattttttttggccaatacaatgctgttttcattactatagctttgtagtatatttttaaggcaattagtgtgaggtctctagctttatccttttgctcagaattactttagttattcagagtcttttgtggacctccagtaatatgttgagtaggtccagtaagagtggggagcttcacattgttcccgatcttagaggaaaagctttcaacaactcctcattcagcattacgctgcctgtggatttgtcatatatggcctctgttatgttgaagtatgttatttctgtacctaattggttgagagtttttattatgaagaggtgttaaattttgtcaaatgcatctgcatttattgaaatgatcatataatttttatctgattctattgatgtaatgtatcatgcttattgattcacatatgttgaaatatcatggcatctctgatatgaatcccagtgaatttttttaatatgttgttaaacttggtttactagtattttgttgacaatttctacatttaaattcatcagggatattgacctcaagtatttgtattgctgttatgtctttctctggttttggaatcagtgtaattatggcttcatataataagtttgaaagagttcccgccttttcaatttttttggaacagtttgtgaaaaattgtattagttcttttaaaaatattttctagaatttagcaatgacaccatcatgtcctggactttcttttcatggaagagtttattcctgcttcaaatctcattactcattatttgtttgttcatattttctacttcttagtgcaatcttggcaggtttgataaattgcttgtatttctatagtttttgggttacaggcagattttggttacatgaataatttctttagtgatgatttctgagattttcatgtacctggcacctgagttgtgtatactgtacccaatatgtagtctttatctctcacccgtcctcccaacctgccccacccttggtaggtttttgtgattaggaacttattcatttcttctagatttttcatattgttggcatatcatagtagtttcttatgatcttttgtatttctgtggtatcagatgtaatgccttcttttttatctctgcttttatttattttactcctctctttttttcttggttagtcttgctaaaagtttgtcgatttcatttatcttttcataaaatcagctttctattttgtttatcttttctattgtttttaagtctcgattgtactctgatctttattatatcttttcttctcctaattgtgagtgtagtctattcttgcttttctatccttgagatccctcatttggtggttcatttgagagcttttttctttttttgatgtagatatctattgctatagacctccttctaatgactggttttgctgtatttcataagttttatttagtattttgtgtttttattttcttttgtctctagaaattttttaaatttttctttcaatttgttcatcaatttattggttgtttagaagcatgttgtttaatttccatgtatatgtagcatttcagatctcctcctattgttgattcctcgtttacttcattttcatgaaaaatgatatttgatatgattttaatttcttgaatttgttaagacttttttagtagactaacatatgatctgtcctgtagaaaataccacgtccagtgtagaagaatgtgtattattcagctgttggatggaatgttcttttaatgtctgttaggtccatttggtctagagtgcagtttaaatctgatgttttctccttggttttctgtaaataatctgtccactgcagaaagcagggtgttgaaattccctactgttattgtattactgtgtatctctccctttagattgattaatgtatccttcatgtatttaaatgctttgatggatgttggttgtgtatgtattcatgattgttatatgcttttattaatccttttatcattatatagtagccttgtttatctctttatatattttttacttgagatttattttatctgttataagtatagctactcttgctttgttttggtttttatttgtatgagtatctttttttcactcattcactttcagtatatgcatgtctgtacaggtgaaatgagtgtcttgtagggaaaatatagttgagccttgttatttttatccactccatcaaatttatgtctttcaactgcagaattcagtctatatatattcaatgtgattattgaaagtaagaccttactactgccagtttgctgctcctttttgagctgtaattttgtacattttaataaatctcctcctattcctcctttctccttaccctttccagtctagtatcctcttttttactttttacttttatgagatcaacttttttaagcttttacatatgagtgaaaacatgtggtgcaaaacattctgctcctggcttacttcatttaatacaatgttgtccaattccatttgtgttgctgtgaatgacaagatttcattctttattatagctaaatagtattctctacatctctctaaatatgcagattttttctttctttctttcttccttccttctttcttt

SEQ ID NO: 6772 - DNA, 101507 bp, Homo sapiens
catctttttatgtgcttatttgctatccatatatcttctttagtgaaatatctgttcaaattcttcactcatttttagaaattttcttattattgacttttgagggttcttcaggtattctgaatataaatcatcagatacaggatttgcaaaaattttcttccagtcggtggcttctcttgtattctgttaacaatgccttttgaagagcagaagtttgtaatttggtgaagtccaatttatcaattttttctttcattgattgtgcttttggtgtcatgtctaaaaaaacctttgcctattctagggtcacaaagaatttcttctgtgttttcttttttgcatatggatacccaattgttctagcacaacttgttgaaaagacgagttatgcttatttttgaacttcctataaatggaatcatgcaatatgtctggcttctcttgctcaaaattatgtctttgaaatttattgattttcctgtgtgtaccagtagtttatttttattcacttgctaaatattatttcattgtatgaacatagcaccatctatttatccattctattgttgatggacatttccaatcgattgttgacgaatctgtagattacttccagtttcttgctcttatgaataaggctgttatgaacattcttgccttctggtgatataagtaataatttcagctgggcacatacttaggaatggaatttctgagtcatagggtatgaaaatgtttagctttagtagatattgccaaaaatatttccagtggatataccaatttcatctttcactgacaaggtatgaaagttccacttactttccaatatttgacaatatcagtctttattgtagtctttttagggggcatatagtgatgtctaattttagtttaatgtgtacttccctaaggaataacaatgttgagcatattgcatatgtttgtaggccatttggatatccttttttctgaagtagctatttaagtctttctacatttaaaaaatggtttgtctagcttttttaaaaaattgaagttctttatatattttagatatgagttctttgttgaatatatagaaatttttaattttagtaacatgaacctttttcatcttttcatatatgacttgtgttctaatgccccatttaagaaatcttaagcataagtttataaagattatctcttatgttttcctgtagaacttctgttttcatttgaaatttagatctatgatgaatctgaaattaattttggtgtatggtatgaaaaatcatttaaagttcatccttttaaatgtaggtaagttgacacaacattatttattgaaaagaccgtctttttcccactgaattgcagtgacacctttgccatatatcagttgattgcatatgtgtgggtctgttccctggctttctattttgttccagtgttctagtgttgtacagtgtcctaattactttagatacatagaagtcttgtgatctcgtagagcaagatttattcttcttcttcaagactactgtcattttccatgtaaatcgtagaatcagcttagcaatttctgcaaaatctcactggaattttgattgtgattacattcaatctgtagatcaatttgaaaagaattgtcatatttaaaatattgattcctctaatccatgaacatggtatattcttcattatttgggtcttgaatttatctcagcattgttttatagctttcaatgtaaatggcttgcacaacttttattacatttattcttacatagttgactttttttgcaattttaaacaatactgttttaagaatttttattttccaatttttgctacaagtatataaacataattaattatgtgccttgacttttaatgtagtaaacttgctacattgacttagtagttttaatattttgtatgtagtcttttagtttatgctacacagaattgtattccctgtgaatgatagctttacttttattttacaatctttatgtactttatttcttttacattccttatttcacaggatagaatatctagtacaatttttaattgaagtgataataatgtactcccttgttttcttataaatattttttatttatccagctaatagctatgcatacgttatactctctatattattttccttctgacttgtcctttaagtcaagtaaggaatttccttccaggcagtatcgcaaatttcttttccacatcacatagtcatctggactatgggcatctcctcctggctcatattgaatattgttgattatatatcttatagttctggttacaagatgctatattctgattataagatgttataagtagctaggtaattttctgtctctcaactagacaaaatttctggagtgcagggattatgccagttatccattattcctggcatcaagcacagtgcctggctcataaaaagcatctgataaatatttaataaatatttactgaatgaaagaatgatgcacaaaccctgacctttcaccagtcttctatagctagttattagctagatgttttcatttagttatactttcagtgggacacttatgctctgaatttaatgaaataaactttttccttctatattccatttccaatgactcaactgtccggttaattctctgggacattaatctggtagttaattttttcctacttctttttttttcttatttggcttcccgtatcaaatcagttctcataagtcattaattctttcttgctgggttttttggatttcaaccacttttttccatttctgtagtcattatcctagtctgatgctgtatcacttcattccttgactatgttaagtagctcttggttatattatttgtttctaatttctatattctttaggctactcaccacacaactaacaaaacagacttctttaaacattacttgaatcaactatttcccttaaggagtaagtagatgccttttatctatcctaatggtatctcaacttgcatttattaaacatcacgtacatacaacttcatttatctccaatggagttatccattccacctcacaaaatgcagtcttcctcactgtatgtactctttgtcattgctcttctagaaccatggaatgtcttccctttttctctgtcatcctgctgccgtatatataactttcttcaagatctggcttcatatttacctctttcaaaaagatgtcaataattgtatcatctcaaataaaatgttccctttatatcctcctaatacttacagtttataagtgttactctgaagaccatttatcaaggaagcaaaatttggtggttcaaaaatgatattttaatacacaaagctttgtgataacatgtgctttttaccatgatggcaaatattttcctgctatagagttaatggatttggcctatctggtgatgaaatgcaagaattggtacattcagatgtgtgaaaggtgttgagcataagcaacaaggtcaactattctttttctctggaattataaaccaacaatgactcatttactcttttcaagtattagatggaatgtagtaataagttatggcatatgaactcaggcaagaaattgtgtgatatataattcatcaggatgattatgggatttgtgaggactgaaaggaatctgaatattatccagcccactttcttcggttcacaactgagagaaatagagtcccaggaaagttgtgacttagccaaggtctcacatcttatcttattaatagcatcattgtgattttaacctaggtcccctcatgtaaagtacaaatttttttttcatattacctagagtctcctttgttgttttaaaactgccatcgaagggttcagctgcacggtaagcccccagaagtcaggagccatgcctttgctttctattacttttcccaaagtatcttccttggggcaggacccagtttcagcatttactagatacccttttccgcaggttgtactctccacctggaagaccctcagtgtttgcagaatcagaatagaagggagactgtctccccaaggccctttttgttatctttcgaatataagtttcaagacttgcaaatgatcaggactcctaaaatttgtcttagctatgagctaagaagatggatttcctaagcagaatcaacttctacttttattttctaaaatgtcccttttaggatctgatcagagctagaagaatctgcagaagttcatgctcatcatgtgccagtggtagcatccttgcctgctctggggctgctgatcgagaatgagctacagcaaccatgtgtttccatgggtctgtctcttccacagtcgtccttcctttcaggaaccaagtcagatgttgggctgaggatggttcccctaccaggcaactgacagaaaagccagaatattaaattctttttttttttttttttttgagacggagtctcacttttgtcacccaggctgcagtgcagtggcgcgatcttggctcactgtaacctctgcctcctgggttcaagcaattctctgcctcagcctcccgagttgctgggtttacaggcgcccaccaccactcctggctaatttttgtatttttattaaagacagggtttcaccatcttggccagtctggtcttgaactcctgaccttgtgatccaaccaccttggcctcccaaagtgctgggattacaggcgtgagccaccgtgcctggcccaggatattaaactcttgacctgcagtaggagccaacaaacctcaaacaaagatttcaagcaaatatagtaagtcactcttcctaaatgtgaaagttgaaagaattgccggaagaatttgaggaaagcaaaccattttcctcaaaatgtagacagactgctgcccacctcctcaggttagaatccttctaagttcacttactacccagggggcacattataaacaggagttttattttttaaatactagatcaaatttcccaaaatgaagtcagctgtttacaagagaggaaagtgttgcttatttgtatgtaggggtccaggtaaacagcctgatcaggaactgacgagcagttaaaagtgtgatccagagattgatgcggacaggcatttaccttaaatgtgaagtcttataatagccatttaaattgagaaagaaagaatgtttttatgcagcaatatttctaaaatgttacccataagctcagaaagttctttcatcctgggagtttgaacactgttaatttgttttaagtaacatctattataccactgaagtcctcttattacataacagcaggacttgagtcatctatttacttagttacttacttcattcaattatgggtactataacttttaaactttatagtctttccccatttctcttttacttaaagaaaatcagcaaaacaagaattatccccatattttcctttgtgcggaaggtcccatctgagcaacggtattccagccgccgcagttcagttttctccttaccaagagcacagaaatggtctttttttccccttgaatgtgcatattcctgatggagcttaaaaacttccataaatcaataaagtaattgctacataatgacctattgttggtgttcgtgcccagaatgatgtcacaagggggtaatggagctactgaatcaaaaaatggcagctgtttccaatttatttgagagtcagttggacagaaaattaaataaacacatagacaagaaggacaagggcaagtccttgtattattcttatgatagttttaattcaattgcagaagtcagcaggcagctgatactgtggcccagagtttcattaattgcctgtcttgcatgtcagtgagacagcacgtgctcacttcatcgttttcagcttttgctatttgcattttaaaacacacacaccagtgaagcacagatcaaactttgtgtgtgtgtgtgtgtgtgtgtgtctgtggtttttttgttttttttttttcttagtacagccctccaactctcagaaataatctgattggaagaggtgactggctttatccctacctgcattgatggtgtctctctcctccctcagggcaggcagcctagaattttaaaaaattactctcttctccttgggggaaggcctgaagacttgtatttgttgtgaagcctgaagaaaaaagcgccaccagttctcagggctcctctccactgtgactgggagctttgatgtgcccttttgatgttcctgccttgaggcagctggagaagattatcaaaagtagccttaacagttcagggtggagttgggggtgcagcaccataacacgtgggactgcacatccctcacagtaactcactgagatggggttgccgtagtgcaggtgggattgccaggtgccaggtgcccctactgcagcctgcacggaggggaccgtcattttcagactgtccttttagcaggacttcaatgtcaggtaataaytgactcatttgctattttcttttggtatcataaccactattattttttttttaaatcatgagatgtaattgtaagtagaaaatgacttcaattcaccttccaaagggattgtagttttctcctaagaatcagaaagctcaattttgaaaagattctcttgtggcaaaagggtctttgaaatgtaaacmaacaatccccttttattttagggacaagaaaacagagatctggtatgtcagtttaagattcttagcatatgctgattgattgtggttagactatgactaacttaagaagaaaggaatttactacaagsatatcctggggctccttgaggctcagaggccagctttgcaaggatacttggtaagggtcagaaatgaggatgccccagcagaccaagaagcaggaagcaggaagaacagtgtggtatgggaatggagggttcaaagagacaataagcaagtgaagaagagaggttttagagagtgataaataccacaaaggacaatgcagcaaggtagggagtaaagaagctccggtgtaggggctgatcattgatggaataggtcaaaaagaggcttctctgataacatatcaagagagacacccactagaactgagggagtgcaccaagcaggtagacagcaggaggaagaaagagtattccacgcaaaggaactaatcagggcaaaggccctgccttgggatgcactttctgtgtttgtttagtaaggagaccagtgttactgcagagaaataagagagaagggtagtttgaaatgaggccagaaatttgggtggggtggaaaggggcagatcatatrgtgacttgtaagccatttaagagctttggatgttactttaattgcagtaatggttcccaggaattagtagagaatatgaccagcatgacgggacgctgaagctgggaggttggcaggactcagttatgagttaggcaaaacagcttaccctgactgaaatgctgcctcaacagaaagcacaaatgattacatattatgaggcctttgggaatactcatgaatactcagaatcatgaatggcaaatctccacaggcaaggatcttctgcatctaaaatttttacttttgggagatgccaacaaaaaactatgttccaaaagagccatggtkgcctacatgtatattgytgtgactcgcatgtttcacatgcaaatttcacatcttgaaactcaccttcatggtagttatttggagaggagctgatgataaccttcagcagctccaaatattcaggctattacaaatgtatagtttttgtgtgtgtgtgttttaaagaagttttattgaatgaccttcaggagaaaagtttaagtttacagatacaaaactggttaaaaacatgttgaatttcagttcaaagttttaaccttatttctttaaaacaatgccttcaaatggtaacctaaggcacctctaaaacaatrtaatgagtaygtcatgtatacaggtgatygcagagggaagcagattcctttacttcatttctaaagagtaggggaaaaatcttctgcaattgggcagatatagtggaaggacgaacatcacagtcaagagttggtgccctgcttttyctttcccccatgttcctcatggatagctgagtgcctcttgcagggagatgggaggaaaggcatgggcatcattaacaaggagagaaagccaggtagataaaaatcatgcttttcttcttgttcagctaaaaagatttcagggatcagattattgtcaaggaggcrtctgcttttgagagttgagaacaagctgctggaaggtttctgacatgaagctgatttacaatgggttaaacctagagaagcagacagcctcatagcaaaataaatgagagttttaaaaattgagtctcttcttcatgtttgtctttacaatgttttaattgtcacgtggtaagttatgctcaatttaataaataattcaattactcaaacttggaagagcagttaaaaagaggaattttagaataaaatgtatgtgagttcaaattgcagctcactcactataaaagttatgaccttagaatgtaatttaacctcttagtttttggctccttgtctgcaaaatggagaatgtagtggtgcctacctaatttaaatgccttataaatcttaaacattattatgactattaagaacaatttgcatagctgtgggcttcaacaatctgtgatagtgcaatggtgcatcttcacaattgctggcagtttgtataaacaaccaagacagttattaagacataagctacttccttaaatgatgaaatggaactttcttgtcacagatgatcactgtgagagtctatagtatacaatatgggggtaggaaaatggcctgagaattctgaggaagcctctcaggcctgcatccttctcaccatagattttattttattttatttttcgactggttaatcttggccagaggcttgggtgtggaatgatgatagtggcatttccataatggtggaggcataaaaatcactgataaattcttactgaccatttatttgtcacattggcctataatcttagccttctaggttacaaccttccctttctcttattaattaaaacagatccccaaatacctctcactttgtgacttctcactctataaaaagtagaatttyaaaacattatttgtaatgaaaaatgtaatgtgtttttattttttatatatgtattttatttatttaacagaagagaaacacatctgtcaaaggacctagccctttttctttcataacagggcttccagagggttatgttttgatgacactaacatggaacactaacattgaagcctagcttttagataatagtttcagcaactgctgctattagtgatttcaattacatatccatggaatcatgggatgccttttattacagtgtattcttttaaagaaaaaaaaggagactagactaatgaagtactaataaggagaagataatggagaagatagaattgcatatagtcaccaagttttcattcgatcttgctactaaaatgcacttccccttctaactcatctgttctccaaatgcacaaaatacttatacatggaaggtttgttttacttctggtttttcagtattccattaatatagcatcaaaacataacatgaattgctttgatgatgtaaaaaaamggtattgtctgcatctaagcaaccatgttgtctttccatctgaaytcttttaaagctgcttagttttgtgggagatttgctcgtaagtcaggttttatgaatcaagaaaactctgtatggtcttgctaaagcagcttgagctgctaatttctttttacacttctgctctctgagacacatgcacacacttgtggatataagcacataccctattagctttttacacttaatagggcccttggcrtttttgagtcttcaactaatttgttttattctgcctcccttctgttgtagtcaggaaagtgagttgtcttaaagttaaacgtcttgtgatcagcctacatgaagggcactgcacaagtcccatcrtctgattgatgagatactctcctccctggtctgttttcctagccactggaacttagaggaatgggactcgaattgcagtacacaatttgttttgattatgactttatcctccccagctccttcagctcatggatcttatgtttttcatacaaatatttaaaaccaatgagacagtaattcrttcatcaagggggtcttgtcaaagttctctgttctgtattttgcatagcattatcacataacaaaacattaagattccatctcaattaatcctgaccccaagattctgatatcaatactaaagaaagatagggctactgtgtcaatttccttggaaatcgagatacgactggattgtgcttttctcaagaatacactgcatctgatttttctggtgaattgggrtcacattctgctgataagagttaagagttaatagtatttagtaatcactcactcatcaggtattatttagagactctgcctcagttctctatttcatcttttagtggcctaaaagagctaattcagtgctttacttaagcaaaaggcatgacttaatcactggaataaattaacaatagagtaaaaataggatttacctgcatttctgtgtcagtgttgagctcattgaattgtccttggtaaaaataaaaattaatataaaagtgaattataccatgtaaatatctttgtgtgtatatcaaggttttatttttaaagtacttatgattcattgtttttaatggtacataatatatttattactattggtattcattatatcattaagttctaagcaaaagtaagttttgtctaactgtacataattgtgttgtcatttttatgggaaatgctttatcagcctaataacagagtgcttgcaaatccataactaaacactgaaaaacttcacttgctcaccraagcttctgttactatttgaaagtaatatatgtgcatgctctggctatgagaatccgagaatgaagcttattgattcacttttgaaaacacttttggctggacacagtggctcatgcctgtaatcccagcactttgggaggccaaagagggaggatctctgtggccaggagttcaagaccagcctgggcaatacagcaagaccctgtctctacaaaaaataaaataaaataaaattagccaggccatggtagtgcacacctgtagtcctacctactcaggaggctgaggccagaggattgcatgagcactggagttggaggctgcagtgagctatgatcatgctgctgcactcagcctaggtgacagagctagaccctgtctctaaaaatatttaaacaataaaaaatcttgagtttttgtcattacaatatttttttaaaaattaccactgacttccattgctctttgcctgaaccttgcattgtacatttttggccatgcgattctccattctcttttcctctctaaccccttttattctagccaataattttatttggtccagtaattaaagttaaaaatgagattctatatcagttatgacaacaaatccattttgtactcacttttttttttttttgaaggagttttgctctgtcgcctaggctggagtgcagtgcttaggatcatggctcacttcagcctcaaccttctaggctcaagtgatcctcctacctcagcctcttgagtagctgggactacagacatgtgccaccacactttaatttttaaattttcttgtagagttggggtctcattatgttccccaggctggtctcaaactcctgacctcaagcaatcctcctgcctcagcctctcaaagtgctgggattataggcatgaaccaccatgctcaacttccttgtctttttaaaacacaaattagggattccatgtaaacatggcactctattagatattgtaaaagatacataaaataaaaagttatttacttcaagggctttaaaatataaataccacctatgtttcccagcaatttttcagaacctacactctcaagtaatctgtactaggcattgtaacaggatagggtcccttcctgatgatctcctcccacctctaaattattttgacactgtctaaaggtaaagcagccctggaatgaargtatctgtctctgatcattaccattgcttaaaggaccrctgatatgacatattgctgttttctgttgctaaagagttaaactttcttgtattgatgtctttttcttgggggtttagaggatctctcacatgctcaggctgatcttcattgttccagatttgtcatgatttctgggctacagagaggcaactagagataaagccaatgaaattttgagaacattacttgtgagagcctggctgactgtggmgatcaggcctctaggaatgccagttttgaagaggggttaggatgcatctagagtctagacgcgatgtagcaggcccagaaatgcacagttatttgaccacctagagattacgagactgaagggatatgccacccagattaactttccctaagctagtattaaaccaaaacaaaaaaaagtctagattttgcttaattttctaagaggacattgtagaataatcttttttgaaaatgagagtttaaatctcaacatacattcacaagcaaacttcaaaacctctaattgctctgattttggtgttctcctctttaaacttgatatatatgtaaacttaataacattttcttcataacacttcctggaaggttgtgtgaggataaatttttttttaattttaaaaacaatttaaacaaatttaatttaaaatttaaaaaaattgttgtagagatggggtctcagtatgttccccaggctggtctcagactcctggcctcaagcaatcctccctcttttggcctcccaaagtgctgggattacaggtgtgagccattgtgcccatccagtatagtagattctatatgtatgtgcgtgtgtgtgwatatatatatatrtgtgtgtgtgtgtgtgtgtgtgtatatatatgtgtgtgtatatatatatacacacacattaaaagtatatttatatattatttgctataatatataaatatatgcttacaatatacttacatataatatatagttatgtatatacatatgtgattctagataatttgttaagtaactaattagatatattttatactatgtcagattttcttccaggagagatacaactgtgtacaagatggaaaaggaccttactctgcctgaggtcaggagttctaaaccatcctggccaacatggtgaaaccccatctctactaaaaatacaaaagttatctgggcatggtagtgggtgcctgtaatcccagctacttgggaggctgaggcaagagaatcgcttgaacrcggagagcaaaggttgcagtgagccaagatcatgccactgctctccagtctgggtaacagagtgagactccatctcaaaaaaacagaaaacaaaaaaaaacccaaaaaacaaaaggaccttacttttctggagcttatgacatagagagggagatggaaaataagcaattaaataaatgaacaagatgatttcagattatgataaatgttgagcagacaacagaacataatgtgataagagagactcagatggggaaaagaccacttcagactgggttgtcaggaaaggcctcttggaggaagtagattggagaggagagctaaatgatataaggaaattgaacatgtgaacatctgaagacatagagctactgggagagaggacagctagtgcacaatccagaaatcaggcaacagctaagcatgtttgaaagcaggaaaggccacctctggtgagggagagggagagtaagtcaaaataaagtcttggaatttcactgggaccagggtcctggatgccaaggttagtcctgggttttcattctgactacaataggaaggcagtaaagagttmrgcagagaagagatgttatctggtttacatttgaaatatctcaaagaaatgaagggaggcagaggggaagtagggattaattatggaggccaattcagtagtccacgtggtgtcagactgtggcattgtttgagttgagagaagtggacagactaagatgtgctttggaattaaactaacagactgtatctgtgtaacacagagagaaaaatcaaggacatgctttagtttattacttgaccaccttgatgaatgaggattctttttgctgagatggagcagattgggacatgaaaagtttgttatcagctgtgttaactttgaaatacatattaccaatctaagtggaaatgtcagacagttggatatatacacctttaattcagcataaaaatgtaatattgagtgtcatctgaaaatagatatgtttaaaaccatggatctgagtgagaacacatagaaagaatacgtagatatagaaaaaaaaaaagacaaagtatcaagtcacagggaatcctggcatttagaagttgagcagtagtcagcaaaggaaaatgaaatgaaacagccagtgaggtggaaaaaaaactagagtggagtgtcatagtatcttaggaaagagcatgcctcaagggggaggaagttgaatgctgctgatagtccaagtaaggttaggacatataattgatttggcaagattgagctcattggtgactagaacaggcgaactgtcattgccgccgtgaggatagaagtctatatgaagttgtttttctcacttctaaaatatttctgcttaaagaaccaggattgatcaagtaaatgtcatgagcacattcttccctaaaaaaagagggaaaattcttaatacaaaattatccattttatttgtcatccaaagcagtgttcattcatgccaaagatgttatatcatcgttatgcagattgtggctttctttactttaacattttagtcatgtctttttttggagctaatgtattttattatacgtcttagatttatgcattgcatatacgcttttaaagctccagttaacagttcaatacaaaattttaaaaaatatgtatgccgtggttttcaggcacagaatttaggaagagataggagcaagtgtttttttccttagcatgtagtgaatatgaaaaaccatgatagtggaatgcttccttctgacctacaccctttttggattgaattttattacagtgaacagttttagtaggtataatattgctgattggaaataatgagattttaaataagtttataacctatattttcttraagtctttagtacctaaatgattacttttctcctaataaaattctaagacaatccaatgaaaataatatrgcctataaaatacctgaagcatctgcctagaacactgcccacggttattcaacgtcttcagggcgcacaggatgaggcaatggatttcttgtcagtgtctctggaagkcgctttcctcacattgtaagcgtctccatcgggctctctgttgttgacccagacatactctatgactgttctgtatttgctatagccgaattgcttgtacatgtcgattgcaatttggttagataccaaagagattgaccaaaatatccacctgtctgtygttgaagcagaaaaggtcattgcaagtgaaacccggaggatggtcatcactctaccaccactgaggccagcgtcccaggacctgtaactgtcctgccagaagtctatcctgtcttgccgacagggtcatcttgacaggttatagatgacatcttggaaccttaacagttagaaatggggaatcccctgctcttatcagcaattcaggattgaaatttctagatgagttattgctgcatatggcaaagcttatccattttatgctgattcttgtttgctaaatttattccccaattccgatgagctctctgtagcatataacctgattacaatgaaattaagaattcttgactttggcacaccctatttcaaacagaaaaagacactaaatattttttaaagcttgcttggtctcccctctatccctgtcagctttctttcatgctgtctttatatatgacgcaactctcttaagtgacctctstctctgtggcccacatgctcctcagagctgtgccagtgagctgtgtgttccttctctgccaagttttctgtccttttccgtggtcccgacatgcttcctttctccaggatatttttttaaagataaagaggaaacaagaatactaagtattatgaataagtctttggcctttaatgaagataacttcaggttaaattcttcagaaatawtgrctatcttttttacaaaggaacttcaaagagcattcacttttttaattgaccattttttgtgtttctaactactccatgtattaaatttaaaatatgagcaattatcagaaatgcatatttaaatttttctcatgcactaaaatttcaacttctgccagtttctcttaaaagagagctaatagagcaaggacatttataggtttagatactaaagaaaatcatctttagaaaaatggtattactatagtcaaattatttaggtcttggttcaatgatatttttaggtaatgcatacaagtttttcctcaaagtaacacatattttaatatttaaaaaattagcttaggagacaatacaaatatttaaatcaagcaacatacatttatgcttagaacataaattttggacagcattctatatgctatactcaataatagcggtttggattaaggttgttttacagaaaggtattagcaaaatataaatgagtaacaagtacacaaaataatttatccaattcaactgttttaaatatttatgttaaatggaagagacaggaggcatatgccatataaattaccctacgttgaaagctcctgaaggcagggacagtttgcttctgcattgctttatacatttcctaacatagaagtatatgtaaataaactacacatttctaagcatagtgatgctgggtgaggagtaggctgggtcaatctgaaataaataaataaataaataaataaawaataaataaataaataaataagccagagcatcctccaaagtcttactctgagtgattttcttctgtcctgtgtttaccttccctcaatatccaatttacaatgtctcacttgttgtggaggcctcatgcgtatatcctgaattaattgaataatgtgtttaaggaagccttttatagtattctacaggtcatggggtatcttttatgcttagctaaattrgagaaccatttaatttttgcatatgtttttatacaattaggtcacatagagaagtggcaatttcttgctcaatattcaaaaaggccaaacatgagaaactcagaaatttggaacctgaggctgtgccctttgctgtggctgttaatatttttgtttctgtttcctcattgattgattaaatgagaataagaagtctttccacacacctacttcacaaatggtttaaatatggtaagcacacatactataaaataaatgaaatccccagtagagcttggatggacagggccaagagggttgtttttggtcatacaactgacatcaagctctccttcatgcctggaagatttttctcaacattaggctaaatttctcatatgggttggtaagatctggaccacagtgtcaagaaacttttagttttactgcgtcccagggtagacctctgatacacagtggaaagcatacatcattcctgtttttaccaagttccatgctctaaaatttatggtcactaagaaaccagtagaccctagtggttaagatctcaggctctggactcagatttacatctctgttatttctctgatatttgacaagtctccaaagctctttgagtctcatcattgaaattggatgaaattattaataatatccactacaaaggtttgctctcagaattaaatgagatagtacatgtacagcatttagtgtgattcctagaacatgagcatttctcaataaacgttagctgttagctgtattggatgattacttcataatataaagtatgctcgttagccatttcagccaccatttttaagtagaaaaataatcagtgagtttctttctttgatcctatgcaattctcagaaactattaacaaagtgtaacatgaagaatctctgggctttgacactgggggcaggtaggtgatgagaaaacagataaatgaaagaaaataaatggtgagacactcatatcagcaagtgccccgccacagtactgaggagaatatgacactacggtttgggaagatgctatgggaagcgaggtacgagagcctctaggaagtgtgcaatctagtttaaagatgaaatggaggtgaaatgcagagcaacaaagcagattcagagtaaaagaaggggaatagagcaagaaagcccatagccctggatagaacgaccaaatgggttgcatgtgatttaaacatgttactgaagaagcttgattgtgtagagagcaagtgtaggaaaaaagtgtgtgtgtgtgtgtgcgcgcgcgcatgtgtgtgtgattctctgctctttcaaatcctgtgttctggacttgttatttttcccactgtttgtcgaaatcttgggcagctccatagatttttctcgtcccttgtagtcatgaggacttattgcagtaattaagaatttccatccggaaaagtcttaagtcttttgtcttttatccaactgaaagcttcttctctgacagactacagtaggaggcaaagtttctccctccctctccctccttccctctctccctccctccctctctccctctccttccctccctcccttcttctttcttctttctttctttttctttcttctttttctttccttttttcctttctttctctttctcttttttctttctccttccttcctctttctttccttctttcttctttttcttcctttcctctcctctcctctcttttcctttctccttgtttctccttttctttccttctttcctctctgctctctttttcttctttctctctctgtatacatatatacatatatatatgtaygtatatatatgtgtatatgtatatatacaagtatatacatttttcaataaattaatctccaatcatacctagagggccttcaggacgagcatttacaaaatatttaagtatcgttatgtatatatgtgtatacatacatgtatttatatatccatatacatatgtgtatatatatacatgtatatatacacatatgtatacatatatatatatatatctcctatcccctgctgtttgatcccatccaaggttggaagcagtgttagaggtgaggaaacgtctcactggccgtggcgaaggcatatgagctagcccagtctctttaactggatctctcttagacctctcctctttgatggtggcttatgatttttttcccttctgcttgctagtttctcagaaccactctaggctggagtcactcgtctcattcagagagacttctaggatgagtctctttsaagacagcacagtctgatcttcttccatagagtctgcattcagcccatgggagatgaactttcttgccttaccttaggtggagaagcagccaactcttcatgaaactctccctttcttggaacagccacgaggagggacagcttcagtcacagcctcatgtcttcagaatactctgggataagttagagccactccccaacttcttcatattctattcatcacatcttactaagcttgaggtgaagggatgtaacctctcctcttccccatgatgggagagtggggtagggtggactgaataattgcacattgaacaattctccaaggaatttcttactcccaagtattttacctctcccagtgaatttttcacattcctctgtctaatttgaagacaggtagtgggcaagtttcagcagaaataatttaacaatcccttagtatgtcctatgtatgtggtctagcaccttggtttagaatgtaggactatttgggtcctagtgttatattctcaattgtaacacacacctcttatatacaacttcagatcctcttagcctcgcacggattctgagggacttcatgcaggagcaggctcccattgcctaagctcagactcacaccaagtgctggtccttccttattgacatggagctgtgagaaaccatgtgttgagctcatcaaaactcatgcacataccacccagaagtacaggggatttcttgccccatgtgacaaaattttgaccagtgggagatgggaactggtggataaatttctttcctattcttcatctttcccttgaggacagactatcccaaggtgcagcttgtacagcttcttagatgatcctcaaagatgaagcaagcagttggattcagcagtggtcaatcttgcatcctcgctttctccttccctgcttcaccgcccttgttcctcactccagctccctaataaagagacatcacataagtcctcagcctgctgttctgctttatgagaacacaggctgttacagtggtctttgaagcctctgctgaaatcttcagaagcaaaagagttgcatttaataccctagtacacatgcttcctggggttggtgaaattatagctggtttcttaaagaggaatgaaccctatactggttttggggaaggtgtgagtaaaagcacaggggcttaggatgattgaactcttctttggtcttgaccaaggtgatgggaaatctaaagagatgaggtttgagaaactgaaggagggctctcctggaaagatgagtaatcaacttgctgaaatggtattttgatgcatacttttggtcactaaccagatcgcgtttcctctgtgtatgctgtgatcccacaaaatagcagaacttgagaatgagaactcgccattcaggttcagccccagtttagagcctcagggtgggaaagagtcatcgggatcatgctgttagtggtgccctgggacacatcctcacacaaagctcatgcccctttcacagtctgataaagtttctaatctttactatgtcctcttacatttttcaataaattaatctccaatcgtacctagagggccttcaggatgagcatttacaaaatatttaagtatttttatttgcaaactttcatattattctctttttaaaagctcctgatggctaagggatagggtacaagtacaggataaatgtataaaaatatatttaataaatgaaaaattaaagctcaaatgcaataatttgacagttgaaccatatcagggaactatgtttcttaatattagcatttactgatttatattggcttcacagtaaatcttagataaactgtcaattatttgctcagactcaagatactggcctgtattttgcactttatcgggtttactttttttcctggtaaatttaagcacacactcacacccacacacacatacacacacaattcacaatttacttcctcatagggagatcttgacatatattttttgaaaaggcttatgttgtttttcaaagttgggcctctgctttccttaaaattaattgcagtttactcagagttttctgccctcatctactacttaaggtcccattctctttcaatgaggaagaatggaaacattgyattttacctctttatgggcttgatctatgtaactatgttgattttcaagactgacagagcattccctgaaaggcactcaaacccaaaatactaatgtgaaaataactgttggtagggcaggcaacaatttcaaagaagcgcagttgcgtatcaggaactgtagtgaatacttgccaattcaggtttctaggaaaatgctgatcacattttgagaatggaaataagtcaatttaaagtgggcataattttttatttcctaaaaaaaatgcagaaatgcagtgatttacaaagaacctattttctcactgaacatatttctaatccctgaaaaagaattactaactgagaattgcctgactacatagcagtaatcatagaccacccaagcatagtttttacaaggccaaatttacaaaagaatgttattgcttgaggttatcagaagaaaaataagtggctayttattaggttataatgatgaaaataaaggtagtcagtcatgctaggtttcataagaataagtatactcaactatgactcatgatcgtttttatcaaagtatttaacaaaatttgcagtgttaataagttgagacgtagatggctgaaaaaaacctaaactctgccttaactgcaattccatatgctctaatcagagagttatccatctccacagaaatgcacagaagcgcgacaataaatgtgacacacattgcatgtctttataggtgcaaattgataattggacatcaaaacaataaggttatctcattgccgaggtgcaaattggcagattgcagacatcagcaagagagaagacaaagggaagggagtacatgtaaaatcctatattgttgctgacttttagagagcctatatttccagaaagagagaaacactacagaaaacaacaacaacaacaggacatttaagggatcacattctctctgactgctctggatgaaaaagctttttataaattcctatcmgcattgtatgaattgaaactttatctaaacttgttatttttatttttaatggtcccgaataacaaccaagaattaaatagataaaaaggataatgtagtgataatattgtgcaagcacttgtgctaaaccctttacaattaacgaggtttgtagattagttttggtaattgtcacaagaatgggtgtctgttttggaactagatcttgaaagtcgtgatgcctcactatagtgtttatattacaaggatgcgtacaagtaagaatgctttggtggttctctattgacatgctaaaaattccatttgaaacttagcaaacttatagttcagtctcactgtggtagaattggttgtgttattaaaatatatamagaagtaacacataaagatatggaaaaaaagcacaaatttatcagatccatctagaagaaaaagatgactaacccttatatcaacaggaagagactgagaattactagaaaaacaactataaagacaacataaatcaaacagcatagagtttagaacatcaaaaactcagaaattttcatctattattaattatgataaaaaattctatctcagaatattttacacagcaactgttgccaagaaaatctacatcttccagagctgaggaaagttagaaataagaactaaggctctaaacttccaatgaagttggatagccattgataaaatatcctaatgtctttgtacatttttctttcaattaaaaagccacaatttaaaaagaagaaaatttattatttcaatggcatttaaatatttaatgtcatgacaattagaatagctacagataatgtgggaacttaatgttagtttctaaaataatattttaccatcaagttgtgattttttatctatattatatgtgtacctataatagaaagtctaaaaaaacctgagaaaaagttaatattatggactttattctgaattgatgatgaaagaccttcactaacctctctattaacctttctattaaccttttacaaatgcttcttattagccaacgtagacaaatagctgagtaggcttcttcatcttacctccaatggtctttgaggagctaattagtagagtgaggcacagttagacttttctttatctgcatccagttcacatcagcagactttttatccactgaacatctgtattccaattagcatcataacctcatctttcctgtagccacatctgtgacagagatttttctggtaatggaatgatgtgggcacatagatcagggctaatatcaaaaatctgggaagatcattcaaactttgctttggctacaaagcactagatggagttgagctttcttacgtgttgcagatttaagaagttagaaggggaatgtgtgtgtgtgtgtgtgcatgtgtttgtgtgtgtgtgtgcacatattcctatagaagtataagtttgttacaatgtaagtgggttttccaagaattcaaagaatgcaattttctttttctggaaataaacctggggcaccagggattctagatgccataagttcataataagtggttgctaattgagtaataaaattgtaatacccctactcagagcatgaatgactaggagtcctttgaatccagagctaccctgggctgaccacactgccttgggaaaataactaatcttcatgaatccttagtttcctcatctataaacagtgatattaataacaatgtagcttagagtatcaatgagttacatgcaaaattggaattaccatatttactttgtagggttgctgaaggaattaacagtatctaaaataatgtaggaaggtattagacatttaataaagtatagttttattaaagtgcttacaaatagttttaaagtatttagttgttaataccacatttataatatgtatttctcatactttgcatatcactacactttaaaaaactgtagcacctttatcatggaaaaagaatgatatcagagtgaatattgtctttctacaaattagtggtataaaaataaaaaccagattttatgaagcaaaaaaaattgtggtatataggtaaaactgcctaaccatttaataataacattgaacattttcctttcatagtatattattgtcaattctattaaacatccatatcagtatgtaaaaaattattatagcaatatatccatattgtggaaatcatattaaaaagccagacaaatctattctaactttaccaaatagattatgtcagctgttcagtagtcagcttgatattattggtaaaatgtaaaacaaatatggtatgaaataatctattaaaattgaaagcgggaaaaataaggataatagttaattgtacaaaaagaggatgttctggagacattgtctagttgtgggagatttaatattcaaactttataaaaatagaggaaacatatatataggtgtattggataaaagtcttggatcaatgtgatattaatggacaaaattcaacaggaacacagatcaagaggggcttttgtgaaagtcctgataaataatgtctcatcctactgaatttgatgagtattactgtatatgtgtgtgtttgtgtgtgtatgcatatatataatctggttttggaagacattttaatgttacttcaatacaatttacagagaaaaaattagccaggtctacagaaaaccaatttggggaaaatttattactttgaggtgttgtcacaaaaaggcccaacctaaaaaggtttaacatgatcctttagatagcagaacttactctccatgatctgtttttcagagttaactcaaatataagaataatataataataagccatcttaggcaatcaatgggcccacagctcaggaaattttgattttcagggatgatttcctgaaggatgatgtgctcttatatataatgataatgccttatcacatacaatgcttccaatgtttaaactgtacttatatactcattatcttttttgccccttgcaacaatcctttgcagcatgtagggcatataagtttcatcaactccactttataggtgaagaaatcaccatgtccacacattaaggaactcactaagaattytggtyagagctgagtcctcttcagggcaactccttaattttccagatagacagttacaaaaggtatttagaatagacttgctttaatctcagcatttgtagctgcattagttgtagattttcactgctataagttggtatgattcactttattaaatgactaaaaatacaagattggcaatttattcattgaactgttcagcttcttttttttttttggtccattttaggaccactctgaggggctattaaaataaatttcaacactaaaacttcataatgtttataccctaggcagtactttcacccagtccttccttccttccttcctttcttttctttcttcttctttctttttctttttttttcccatagagatgctattttgcccaggttggtcttacactcctgacctcaagcgattcctctgcttcaacctcccaaagtgctgggattacaagagtgagccaccctgcctggcctttcaaattaaaacacttatgtcacactatttattatccttcttaaaaacagaagttacatttaatccattttgtattaatagtaatttgtacatattcaacaaatgtgtgtgaaacaagacagtagctagtactcactgtggacccatcactattcttacagcttctamatatatgtggaatttatggaatgtagaatattctatggaatatagaatatatatttagaagctctaaatataaacaaccctaggaggtagctgcaatggttaaatctattttatagcagaggcaactgagacataagaaggctatattccttgcccaaagttaattatctacaaagctataacacaacttcagccagtctgactctagaatctgggtctttaataagtatattatggttgaatcaaggataatcatcagaatagctaacattttatagtgatactatgctaggtgctattctagacactttacgtatgttgattcattttctcctaagatttccatgtggtaagtactattattttacyttatacacataaggaaattaaggcaaagagaagttatgaaatttgcctgaggtcactcagctagtgaatcgaaaagctggtattgtaatccaggcagtgtgaacacagagtccgtactattgactactagacttgcataaagaggaactcaatttctttcactttctcatgttaaatttaaaataagatgacaaayaaatcagaatgacagttcatcaaatgtgaattgtgatcttgaagtccccttgtgagttgattagcacaagtttttcatatcaaaatcttcttgggaaaccaaattcagataataaaattgcttgcctggtgaatatagaatgagaataaattggagctgagtgtctagaaggtgctggatccaccatggccactgtgagaaatgagctatacagactggcatttctttggttgtgcgttagtgcactcgtacccttggatggtaggaaaacacatgggcatattatgagcacccctgcttaatagtagtgcttggtggccaatgaaagtttcagccacggcagcattgcttcctgccacagtgttcactattacacctcctttcccagtgttatattaagaattggagtcttctttggggtgccccagctccttgtgggaattcaggagctgctgtggcttccttagtaggtcaccatgtccctgtgctctattcccaccatcacagctcatgtctagccaccatcatctgtcacctggatagctgcatgtaggtcccagctaagggatagcaaaccaatggccagaaggtcaaatccagctggaagaaatattttgtttgagaactaatgttgagagcttagcaaaaatggaatttgttgcctttgtttaaaaataggagagttcaataaaatggccaatactcagctgtcctaaaacactgaaaaattggaggatctggaaacgttggacctgtattttcccatggcaacaatcagctggaagtrgttatccaaataaggtagagaatgctttgtgctgcctaactctaggagcaagtgccgaccatgatagcctttgacgctattattgacttggtggctgcttccgttacatgaagcatgtgtgctctcttttttgcctcagtccctttctggtctccttcattcatctatattaccttcctggtcccataggcttttgcctttgcgatgcttatccaaaatagtacgcctgccttcagtctcatttccctaaaatccattctcccttcagccagaattaacttaataactaatatatatatrtrtrtgtgtgtgtgtgtgtgtkwtatatgtttacatgtatgttgtgtacaatcaccaggcaattttctatggctggagatggcttgaaaaaactaaaagagtagtgtcttggccgggcgcggtggctcacgcctgtaatcccagcactttgggaggccgaggtgggcggatcacgaggtcaggagatcgagaccatcccggctaaaacggtgaaaccccgtctctactaaaaatacaaaaaattagccgggcgtagtggcgggcgcctgtagtcccagctacttgggaggctgaggcaggagaatggcgtgaacccgggaggcggagcttgcagtgagccgagatcgcgccactgcactccagcctgggtgacagagccagactccgtctcaaaaaaaaaaaaaaaaaaaaaaaaaaaagagtagtgtcttacatttaattttaagttgtctctttgttctatacactaatcccatctgctaggtctaaactttcagtaaatacctgccttggttcaccagcctttggtgagctatcctttgagaaaatgaaggcaaaattgagttacacggagaagaggacaggggcagggatgccagacaagaattaaaacatcggtaatgggcaccatgactgaactccagcctcctgagtgtttatggagcaactgagaggatgccgggttcctcacagtatggacactggaggctggagctgttgtattgatttctaatgaagggataatctgcaacagtyggtgatttgaagctatccaggcagcaggcccttgagtcttactggcccacactcaggactttgtccttgcatgtgtttacagcctcttttgtttaactctgctccatgacatgcaccaagccctacaccttcctctgtggtcgatccagccatatactatggggccagctccccatggagatccagtgacactctctatatccatccacaaattcctgtatgctctgtttattcccccttggtacctccagatttacatggctcctgacttctggcttcctctaatttcagcatcacattcagtatgccttagtgatattgagcttcttcctatgcacttaatatactatgctttataacatatattctaaggtaatatgctgttttccatatctagaattgtctgatcattcactcattccacagatatcattgatgtttatgtccctctatgtctctggcactgttatcrtttctgtacgtaaagatgcatcactgaacaaacagataaaaatccctgcagcaagggagctggtattttagtaagaggagagaggtaatacagtaagtaagtaaattattgagtgtattagcatgttatgcatactgggaagaaaataaagcaaggtaagcagacagaacatgctgggaaagtggcttgcaaatttaaattggataggcaggtaaggtttcaatgttgagaggacatttgaggaataacatgaaggaaatgggggagtgggccgtgtgggaagagcaatacaggcagagggaacagcaggcaggtaggaggggctacaaggaaatgagggaggaaaaaatcagtagaagatgatgtgagagaagtaatgtattatgaggctggaggtgtgaggggctattgtatggggccttaaaatcaaagtaatttggcttttatgctgagtgaaattgaaaaacattgatgggttttgagcaggaaaataacatggtcaaatatacattttttttttttttgaaagatcactttgattgctttgttaagaacagcagagaccaggcaggaggctcctgcagtactccaggagagaggcaaaggtggcttggactgggctcatggccagggaggtggaagtagttggattctggatgtgttttgcagaagtgtaaggtatgaaagaagagcaccctgcattttttttaacctatacacatggaaggatggagttgcctcttgatatgaaaaagagagcaggtgaaaaatacttagagggaaggagttcagtttgtgatgttttaactttgataatggagatattaagtgagtatttgtatatacacctttaaatatcagatgaattgtgggctgggggtattaatttgggagtttgaaaaagatggcatctaaattattgaattgcctcaccaatgaagaaagagcacatagagaagagatttaagwatggagtcctaggacactccatactttagggatcagaaggaggaggaaactagcaaagaagacagtgagtgaccattcagttaggagtaaaactaagggcttgtggtattgtaggagccaaaagtttctagaaagagagagaaatgaaggatgtcaaaggctttgcttgtaggccatgtgacatgagaactgacaaatgcttgttagatttcatcttgggatgactataaaccagtggaaattatccaggaaagatacaggaactggtgctgtgagagtggggagacttcttggagcctccagtgagtgggagaccrtgggcccaaatacctaagtggaggggctgkctcagataggagaagctcagacaaatgactgtggctgtggttctcaaagcatggttcccagatcaacagtatagccattacccgggagcctgttagaaacctgttagaaaattcctgggcctcactccaaacctacagaatcagaaactctgcgggcggggtccagcactctattatacaaagccctctaggtgatctcaatgcacacttaagtttgagaaccaccaaaactaggaagttctgttttatcttttaggatttaactcagggtcacctcatttacaaagtgacatgtttcctctcttataacgactactgtttgccaggcttagaaatggaactgagtttcagcttatattaaatrcataccacatcaggggcagagcaaggtttggcaaagcttgaagcttatgtcatttggagggacagggccttctttaacaagtagaatacataattacacatataaaatttgctaaaataatgcatatttattttgaatgaaaaacacatttagaaaaaaatcacaagttttaagagctggcaatacctcaaacatcaccaacacacaaaaaaatatattaactgcctaatatacctgtataatactttgtttcttatttttgtgctatatactctttaatagcattttatatcatggtatttttgtaatattattatatagagaaaaaagataatctttacgattattgattgaacttgagtttgtgtttgttttatttaaagattagaaaaattccttttggcttcacaaccagtatttggtgttatctaatatattttaaagactgaggtcctatttgtcaaaacttctaccaagtttctttcacaagttagcctcaartcttcagggcagttcagggtttctcaagtagtaactaatttcagatactctgaattgaaggcattcatttatcagtttgtttttgataatttgtttattagacatattataatttttacgataaatctatcgatgctggcacttcatatcaaagcaacaaaaaatttccatattttaaaatatgtttatgtaattcataccacttcattaactggactagcaaacattcaagaatctacccattacttctgttcaaaatttgtctttctcttaaggagttattgcccttgaaatgattttaaaaattttgtcttaacatttacttttttatattagaataatttctattgattttattacttatatttatcattttacttcatatgccattaattattttacctgaattgtctctcagttcaagagaaagaaggtatatttcacatgtacgctgattaggagtctgtaatttctcacttatttgatggaaatattacaaactcctttttagtattacagttaaaatgttgtattcaagcttcatgaacttttaaaataaacattacacactattttgtatttggtgttctttttcaagtcttctcaatatattttagagcctctaaaatggcattttacccatcgtctcatagcttaaacatctttatcagggtagaccacatctttacacttaagaatataagcatttaaaacctcaaattggtatgtgtgtttagaagcagctcaatgtaagaagaacccaaagaaaccagaactgctaaaatatcaaagtggtcaaaatcttcaagcagtatcgaggtattgttttctccaatgagattaagggaatgaaccctgcatacgtgttctgcaatacatttgcccacaatattgggtgagcaacactcccagcagtattcttgaactattccaatactgggatggctagtagtgacttagatatgcacagaagtgctcgtgaaccttacaaacctaatccactatctctagctcaacatctcattaggcagatcccccaaatttctgaaaccactccggagccactcaaaagatggagaaaatgtatgaaggatgcagttgtaaaagaaaaacacagcagtcttaaacaattgctgctaaaacatcataatttggcacgttttaaatttgatgaaggaracacattgccagggcccttctcaagttcctggagggttccatgtaagagagagttcataaagttgtttcattagcttccaggtaattctgcctctgtacgtcttgtgaggtagacttttctcgctctctcttatgttcctttggacagtaccttttatgataaataatctttttctaacatcctttatgtatttacctgtgattagagccatgccctcaagaacccgcattctgtattctcttagaatgtttaacagattatttttcaccattgaaatactgttagcagagctggaattctccacattcctcctgttgactctgtagacttgtaaacacaatctttaggagattttaactttgacagtagagaaagggtattagatagacatgaataaatctaacataatatctttcatgcctgttaaggggttaaaatatgctgttctggcatattgactgtttaagttacagacactcgaaacatagcacgtgcaaaaagatcactttgacccttgtgatgtttcttaaaagcagaagatagaattgccatgtgaaagacaccctctctataccagaaagatgcagcatccttatcctcaaggacaagaagacgaaaccaagagaattctgtgcagatcttgttagaaataactcttatcttttaagcctccccacataatttagttgcttcttcacagctattattcatccagttgagtgtataagtaactgaccttaactgcttctttgtgtcttcatttccttatgagggcttctgtgccacataagacttgtactatgcttttctcctgttaatctgttacaatgtcaatttaattccaggaccctaagaggatggaggtggagtttttctgctcctacacctggataggcaagaccaaccacttaccagrtggggaatcttccagtgctaatagttcagactgtgcatacaagaaactgagagaaggaccagtactgttttgtggttgcaggttgttccatgatgagaatagggccaaccataatgggagtaggctggcagagacttacttgtctagtcatgggctttatggcaaatgtctctaacacttaccacccaaagctatgcttatggtgttgcagtcaacatcttactttatgaacttataatctatactgatgtttattgttactatgttttcctgtttacctgagagggrccacacccaaaaggagtgtcctagaggtggaaacatgtactacatgttctattatagcatttatcatattataatatgaataatatgctgcctctctgcacttcagcttaacccatgacctctctgagaacaagtaacatgtckcattgacctttacattactccccagcaccacttcttcactctgccctatcccaagtccttcgactttgccttatacatgtgatcctctctgaaatttgtgtctaagaaatgatcaatgaataaatacatgattgaatcaataccttacttcctccagagatgtttacttatctttaatcacatccattctatgtttatgattttaatttgtaggttatacttgaaaacagtagcctgataataaatataaatttatcagtttctctctattgaagtttcagaaccccttttgcctcttctcatttataattcctttaaattaggtaggaaagcaaaaaggaaatcttagtgaggcaaatactagcttctgcttcctatgtaaggagataatggtactgacactatcagctgaggatattttatacttcaatggttttgtgaatgggaactaatccattactttcttaacttgctatctatttactttcttaacctataggtgcacaggtggatgacttggcaggagatgccatttatggccatggaacagtcaagttgttaaggggaccaagaatgtcaatgaactaaaagtttctggaccagtttattaggcaaaaattaaaaataaaaataatatttgagaacctaaaataaatttgatctcaacttgcataatatctctaactcactgaggttccacgaagacaggcaggtgttttttcttgttgttgttgttatgttccatgttgtggagttgtaggtgagggcaaacacccttcgtatatgatgcaagcacaaagcaagctttatctagaaaacttaaaggcagatgattggctgaatgatatgtgaaaacctcatgctctcagccttttagcaagagggatgcagaaactagatcacagcaggatgtactatggaataagttctagagagatccccaaactttgctgttctatttttagagaatgtgggacaatgcgggcatttgtgggtatgaaagcagctttgggggatggtgtggagggggtaaaacgggttcagcttgggtgccaggtacccagtgaaggtgataccagtgcccacatccccaaatcctttattctggtgtggtaggggcactgggcaatgcagatgatgagcaagatggtcgtaggacagtaccagccacaagatatgcactcaaaaatattaagtgaataaatatgtaattgaggattacagttgttaaaatccactacaaagttttcataagcatgaattgacaatgggatattgaaaggtcaaacatgaaacccaaaatatgggtgattaggaagaaatagtgctagagcagcaaatgaaagaaccaggagctgcaatgagatataaaacaaagcgcaggggacaaatggagaaaaaaaaaatctgcgaataaaaagggaagtcaaagtttggcctggagcaggagagagccttataaagttagcttcaaagtactgcttgaatgaaaaagaaattacagcagacaacayacatgttaatgaagctcaaacaatattgaaaaagaacccattatcattacctagattaaaagaaaagacaagattaacagctcagacatcactaggacagaataagaattaggcttatccacaagctctcaccttcctctcactttttycatcttttctaggaagcccragaaaaagaggttgaagaaaattaactctgaaaaactttggctgtagttatgcattttggtaattacagtgaactaagagcaatagctcaacataagggataaaatgtgtgtcaagtctcaagaaagtactcaaacactttttaaaaactcagaaagcagaactgtaaaagggtaaatggtgaggtggagggaaaaacttggaaggtaaaggatgtaataattatttattccttttctaaaacaaagatgaaagggccaagtatttattattcttttattaaaataagaatgatgaagctttactccttttcctgcaatttttttttttttttttggcaaacctctcaaatattttgtaatagctctaaagagaaaaggttatggtcattttcatatcttcttttgtaaaacactgttcaaacctcttgccaatttttccactgtattttttgtctgatcaatctgtgtacattcttcatatattctagacctaagcttgtaagttatgtgttataaataccttttcccattttgtggttttatttatctcttggtattggtgtctttttgtgaacaaaagttctactcttactataatctcagttaacaatcttttcctttatggttagtaatattttgtgcatcctgtttaaaaattattttacaacagtaaaggaatacaaatccttttttagattgccttcaagaaactttattaatttcctttcatatttagacctataatctacttggatttgatttttgcagataacgtgtgcaggaattgatgttcagcattgttttttgtctatttggcaatcgtattgtcccagtcacactttttatcttcctctcactgctctgcctgtacttttttcataaattaatagtaaatatatgcatagatttctaatctgttctattgatccatctattcttgcacaaataccacattgtcttaattactctagctttaaattgacatctagtaggggaagttttcccattatgtttttctttttcaatagtgtttaatctctattctttttcaatttacatacatgtgagaatcaacttgtcaaatcacacacacacacacacacacacacagcatgcagagtcgaacttcttgagatttttaatgggactgtatcaaatttataatcaattgaatcttctagtcagtgaacatgtatgttttctttaatttctttcaacaatattttgtgaaattatgccttgagagttttacacatcttttagatttattcctagatattttattttgtggactttattgtaaatggtatctttaaaatgtcatttgctgactaccttcagttcagcaaccttattaagctaaccttctgtttctaaataattatctgtagatttatttgaattttgtatatattcagtcatcacacctgaaaaaaataaaatattttttcttctattaaagttatttttttcatgtcttactgcatggcataaaaaaaaggtaataaggacatatccttgtctttttcctaatttcagagggagagttttcaaaatgtcaaccatgctgaattttccaatctcagacggaaggttttcagcaaatatcaagtgtaacatttgctctaaacatttgtagatatttctgtcaagttaagaaagatgtttttcctcttattttgcaagcgctttcccatgaatgcattttgtagctcctctattttgttaatacggtgaaatattgaattttaatgttaaatgaaattttccttcctagaataaactctttgtccagttttgtttttctctttacccattattatatttgtttggtagtatttgtttagtattgcttcatttatgttcatgagtgaaattgactgcaattttcctttctaataatatactaattagatttctgatatcaaatttatattggcctcataaaacaaatcggaagtattctcagtttttctgttcactgaaagagtttgggtacatttgacattactccttccttaaacatttagcagaatcacaggtgatttcattaggtctggaatttttcttatgatcagtttcacactgtggattcaatttcgttaatagttacaggagtattcgttttctttctgcttctacctgtatacttacattttggaagtctatctttcaagctgtattttcaaaaattgtctgagatctttgctttttatttggagtatttagttcatttatatttcatttaaatatttatatttttgctttctgattgtccaactctttcatatttttcttctttcatttttcttgcttgcctatatttggaatgattatacatttttatgattccattcctccctcctcatttaggttggaagctatgtattcttgtactatatttttatggttaccccattataaggtgcatctttttcttattaaaatatattgttgtttgatactattaaccttttcccagatcactcaaaaattaaaaataccttaattattatctttctgactttaatgacattgtcacttaaaaaaaattctatgtacattaaactgcctaggacattattattgtttattttacagttaatatccattttatttagctttactttttttgttgatttctaggttctttttattttcatcttcagactttcttctgggatcattttctttttctctgaagatattctacagtgtggttcttctggtgccaaattctgttaggtttgttttacttggaaatatatttattttacctttattcccaaataatatttttgctcggtataaaattttaggatggcaaratatttttgctggattttggagaaactattacatggccttttggctttaattgtttttattgaaaagacagcagtcagtttaaatattgttcttttgaagataatcttttttacccatttcacctaattttaaggtttttctttctgctgtgatggactcaaaagtgattttctttgtacatgtcttgcttaaggttcatagtgctttttgaatcagtgacatgatgtcactcatcagttttatatcagctgataagtcttcaaattgtcctgctctattctcacctggaaacctgctcgtacaccagtgcttccctcctcagtaaaaagaaccatcaattgcctaggcaaagttatctttcacccctctcattcatacaccatatccaatctattggaaattttgagaatacacgtggagattagatcacctctaaccacttatgtttctcccactgagatgcatgattttaggtattgacttgactagattaagagatatccaaatgcctggyaaaacactatttctgggtatgtctgtgtgggtgtttctggaagcaattagcattttaatcagtggactgaggaaaggagagcttccctcaccaatgtaggtgggtatcatccaattctgagggcttgcatagaacwaagaggttaagaaagtgcaaattcactcttttcatgagctgggacatctatcttctcctgacctaggacattagaattccagtttctctggcttttggactctaggacttataccatcagctcactggttctcaggctctcagattcagaatgaattataacactggtattctaattctccagtttgcaagtggtattttgtgggacttctcagyctccataattgcatgagccaattcccataattaatgccctctttatchatctatctatctatctatctatctatctatctatctatctatctaatctctctagcctattggtttcatttctctgaaaactawcaaacctaccttcatcaaggtgcaattgttctcacatggactactgcagtggccttccaactagtgtctctgcttttctcccttcaacccccaatggtccaatcttcaygcagcagccasagtaagcctttttaaaccaaaatcatgtagtgtcactcctctagtctatcgtccaagggsttcctctcacacttggggtaaaattcaaagtcctaccacagtggcccttggggccattccttatctgtcctctggctgtctctgacctgctgcttaccacttttcccctgctcagacttctctagcctcattgaatttctggctcttcctggaagatatcaaacatgttcctgccttaaacctttgtagtgtggttccctttgctgaaacactcttcccagatattcacataccttgtttctttaatttattgrggtatgtaatcaaatttcactccctcagagaggccatcgccatcattttctmttttcttatactgccttattttcctcttggcacttttattactgatactgtatttatattggcttatttttctttctaaatatttctattaaaacatgaactccatgtgagcagtaattttaaccatttttgtttttcttatttgttgtatcaccagggtctagaactgtgtttggcatataaaaaacaaatatttgttaaataaaataattaatggctattgtcactttttttctcagtaaatgtatcaggaagaagaaaatgggtaaagaattggctgtagtgaagaagatagttcaataattttggttagggtggtgtaggccttaattgtggaagcagtattgagatcttttcagaattttttaaatcctttccttaaaatgttcaaatccaataatgaaattgagtgctagaataaattagatgatatggtttggctgtattcccagcagaatctcatcttgaattgtagctcccataattcccacatgtcatgggagggacctggtgggaggtaattacatcatggggaatgggtctgtcctgtgctggtctcgtgatagtgagtaagtctcaggagagctgatggctttataaatggggattcccctgtacaagctctcttgcctgctgccatttaagacatgcctttgcttcttctttgccttccactatgattgtgaggcctccccagccatgtggaacagtgagtctagtctactaaaccagttttatttataaacaagccagtcttgggtatatctatattagcagcatgagaacagagtaatacattagggatttaaacatattagagataactttttatttgatcatgatataaagtattattaaaatgatctgaaaagaaaattcaacagggaattttcagaacttaaatgactgtgtacaactttcattccaaagaatcaacttctcaacactctgtcttagagtatatctgtacatcactcatcctttaaaatagttatgcctaaaatgaagatatgtgacatttatttaacagccacataagtcaatacaatccatttaagatagtgttgtaaaaaaatataactagagcctagaaaaatgtgagatattatgtttaagtgaacattttcaaaactcttgttttttgaaattctctccaacawcttatctatattttaaccaaagaaacatgggtcagcacttgcattggttattaatctacatgatccaaccacattgtgtgccttgtcaacacaaggagtgcaaaagagagatagatagaggcgtattcttaaaagctctgaatagatattgcttataattttatttgaaattgggtttttaaaatcatttccttgtaaattatttgtatctaatgactgtcatataatagtctcatatttctgtactgatatacagagaaaaaaatttctttgagatttctaagtggtaatatttttacctttgagtgagggttcttattttacaaaaatgtccattggtctaaactttagaatatgaacatggcagatatgtgagagtatttgttaattaccataaatttatagatggtgtccctcaatattgcatatgggagctgtatcagagaggctgtttctcactgtaatttattcactgatctattcattcaactaacattgagagtacactctaagaggcactatatttggaggtaagtgtgccaaaaacataagatggaatcctgtctccaatgagtttatatctagcagaaggagaaagaaaaatgacaagtgaatcttactgatgagattgggtcattgatctgggagtacatgtttattggcatgtttttgtttgcttaggttgagtgtccatctactactcaaccactcaaggagcatgaattcttcaaaattataatcgcttcaggaatcaatatgtattaatgttgattatttatggagagtaaaataaaatataaaagtagtcttaggtatatacagagtaacatagatctctgttgaaaagtagtctccttatatgtttaaggagaatgaagaaaagctcatacaaactgacattagagatagataatgagaagtacatttagctcttgcatagattcaaatacaagaatataatattatttacaaacacttggaggaaaaacaaccagcattagggcattaacaaagaaagaagacgcaagcctgttgtgtctctggttggcttggtcactatcaaatcagttattgccattgcatggacatgctccaggggtggctgatgacatttatcttcttattggtggttctaaactggggtaggctgctgccttgactgctcttcctgtaataacttccaaggacaactgaggccacctcggggagtggaaaacctatgtcagcaattatatgccagctacattagctgctacgtatgcaaaggcaaattagacatgtggtgggtgcattcatggaggctacaaaatcaacacataaatgagagggatgcataagtaagaaatcattaaaaagttcctaaatgcaaagaaaaagtttctaaatgcaaagaaatatgtttacagtagatatgaagacagtgcattagaagtacacctaactcatggcaggaggctgccatactttccagatttccccgaggagctaaccaataagctgagtcctggagtgtgatcaggagtcacccaagggaagtagggagtaaaaggatatccacagagggaaagatgcattcaaagttagagaggcaagagagagcgtgagagtgtggctgttagaggggagaggaatgtcactggacttcacttattgactgtgttggctcctggctcatcattcttggtgacttaagcattcttatgaatatacttttctgtrcttctcccttctcctaccatccccccaacaagtagaccccagtgtctgttgtttctttctttgtgttcctaagctcttatcatttggctcccacttaaaagtgagaacatgctgtatttggtgttctgttcctgaattagtttgctaaggatagtagcctccagctctatccatgttcccacaaaagacatgatccttttctttttttatggctgcatagtattctatggtgtacatgtactacattttctttatccagtctgtcactgatgggctttaaggctgactccatgtctttgctattgtgaatagtgctgcaatsaacattgatgtgcatatatctttatggtagaaagctttctattcctctgggtatttccccagtaatgagattgctgtgttgaatggtagctctctgcttttagctctttgaggaatagccatactgctttccacaatggttgcactaatttacacttccaccaacagtgtataagtgttcccttttgtccacaaccttgccagcattggtcactttttaactttttgataatagccattcttactggtgtgagatggcatctcattgtgcctttgatttgcatttctttaatgatcagtgacattgaggggccagatagatactatagcagccatcctagtgagaaaatgtgagggataagcaagttactgcagctggcatttaaatacagattgaaaacaagaacacatcgatcactgtgccagttagtaggcagtttgtgtggaggtggaggtggaggggtgttgaccaatgctgaaaagcaagaaaagaagtgtcaccaaggccggtctgagcagcttcctgggtgaggggttattgtatgacaaactttaagaattataatgtataacttcctaaagtacttcataaatgaagtactgagtcttagcctgattctattatatatttaaattattcaactcccttgcactgattccatgcttattgggcaaacatttaactataatgtgacttttcatgtaggtatttctatagggaaagagcctgtcctggtcatattgaggggaatatgagatctgcaatttattaaaataatttggcttacagatttgatgtatgggtttgatgatgttggttatggtgaggcagttcctataaaataaggcttctgaacctgtaagggcagaatctggtctttgagaaattcatgaggtattatcttcctgctaggacttgactttagtgacatttatgtcactacctctctcttgtttctcagttattttttatttttagggcttacaatgttacctatagagaatccaaggaagagagttggggatgttgatatgagttgaaattgggtaatgaagaatttgatattcaagccaacagatgtagcaaacaaccgaaattgggtctagaaattactccaggttggagacacggacttgaaagtcactagcacattgaagaagaccatgagattaggcaagacaccttaggaacagtgagtcaagtgagaagacaacagtaaaaccccaaaagattgccaatatttaagaggtagacagtgggagaaagaaagaggaataaatgccagagaaagaaagagtgatctgagagataggaatggatttctgcagcacagaaactaagaaaggaagaagggctttcaaatatgaggtagttcatagtatgaaaaggaagccaaataaaatgatgaagctaaaagggtttattttatttagtcagaaaggttgttgctgatcttggaggggatgatttcagtgaagtcatgggacagaggctgtatttcagggatctgagaagtgaacagtatttgggtaaatgaggggctgcaagtatggaagtggatgaagtattgatgccctgtgagtctggaaaattccagcttagcaagttaattactggaagttataaaggtaaaaatgaccaagatgtgctgtcaaaatatgaaaggtgctgaataatctgtaaaattccatttgtatccacaaatagaaagcagcttttctcaactctgattttgtaagaattttggccctaatatcctaagaagtccattgtatgtgatgcgtaaacttctttcccatgcattgagagtkgtcctagttgtcacaagaattgagaaaaatgtcactcaaataattttctgtgttctgatgcattagcatcacctgggagtgtgctggaagtgcagaaactcaggggccacccagacctactggataagaatcagcatttttacaatatcctcttaggattgcaaaccatattaaagttttaaaggcactgctttagagcaacagttctgaaccttgactgttctctaggctcacataaggaacttaaaaagcttactgatgttcagccctcaccttcacaggtcctgattcaattggtctaaggttggacaaaggccgtggcttgtgagctactttccaaaagctcaccaggtgattaagtgaggtcagggttaagaaccactggtcctggaaaataagagcttgggtatcatagagcccagattaggatttgagaaagaagtaagctgaccactgatcagtaaaatggaagctatgatgctttctgatttcttaattcaatgttgtgggaggaagataaatgatacaaaactcattaactgctttgagtttcatagagaaaagttaaacttataaatgttatataatataattatatgataatgaagataaatatgcaaatgcttaattgaaacagggaataagataccaaatgaaatcgctcgagaaagcttcacaagaattcgaaagtaataaaaaatagtaaagtgcatatggctgggaaaatatatttaaactgtaacttccaaatgaattttagcaatgaatttattatctgccccccgattttgagtcaagagcataaacactgaaatttccaatccaatttttttaacaattctactctggttatactagttattgaaagttcaatgagttcagtgacctattttaaaagctttatctatactgccatggatacagatatttgtataattatctatccagtttaggataatctatgtacccatagggccaagaatttcttaggctacagtaaggtatttcggttgtatgaattactagtataaccgtgtcatcttctaaattcataaggaagtgtgcataggctgaggtcattatttccctcattctgagaatgaatcacagctcagagctttccccggagtgcaccgtgcattgtttrcttggtgcttcccttcacagaattctgtgcttcataaaaaatatacactttatatctgtgtggtgctttaacaatcatttcctcatgaaagactgatatggtttggctctgtgtccccacccaaatctcatctcacactgtaatgcctacatgtccagtgtccagagagggacctggtgagaggtgattggatcatgggcgtggtttcccccatgctattctcatgatagtgaggaagttctcacgggatctggttgttggataagtgtctggcctctcccctgcactttcatgctctcattctctctttctgtctctctcttacctgctgccacgtaagacatgcctgcttccccttccaccactgggaggtgattggatcatgggggcgggtttccctcatgctgtcctcatgacagtgagtgagttctcatgagatctgatggttttataagtggcagtttcccctgctctcctatttctttcctgctgctttgtgaagaagatatttgccttccaccatgattgtaagtttccttaggcctccccagccatgcagaactgtgagtcaattcaacttctttcttttataaattacccagtcttgggcagtatctttttggcagactaatgcagtgccttactaatcatgcacaatatgcagaggagaagttattgtttcaatttagggataataaaactgattgatgtttaaagcagtgagtcccctaacatctcaggaatacttgaaaacactatttattgccaataataggccaccttctgttgagaatatctaggtctagaacgtggattttgttaagcaatccaagtgattcttctattttctttctttctttttttttttttttttgagacggagtcacgctctgtcgcccaggctggagtgcagcggcgcgatcttggctcactgcaagctccgcctcccgggttcgcgccattctcctgcctcagcctcctgagtagctgggactacaggcgcccaccaccacgcccggctaattttttgtatttttagtagagacggggtttcactgtgttagccaggatggtctcgagctcctgacctcgtgatccgcacgccttggccttccaaagtgctgggattacaggcgtgagccgccgcgcccsgctctattttctttcatttacactttgtcctacagtttttctagttcctccctcttcaatttgattttcatttattctccccttcttttctcatttttctttaatcctgtgtcatttgccacttgttatcttatacctgtttcccccttgctttatattacaaaattccagttttaaccatagcgtcatctaccccaaactgagaattttatacattcctattcatatcatgatgataataagttaagttgaaacttgacaagtggctaaactactggtgttttcttgtttaatctacataactgaggagtgtgtactattttttcaggggctattggcagctttcaagaagtgtctcacacattacaccttaccaagcattacttttttctgtgttctttgagctctggtttctttccccaatagaaccaaaaaccaaatattttatcaaagtgacagtgtggtattcatttttcagatttctagttcttggaagggtgccttcaaaagccacaaagttctctaattgtccagagcacctgcttcaaaatacctcagtgttaaactatttgttttttccccttagaagaccatagtacaagttctgttaacattttgacaccaggccaaaatatacaacattcatttaagattgagtattaaaggccctattcaccattttttaagagaagggaaaaaaggaataagggtctttcacactttccytctgtaattatgaatgtaaaactattcttgattcatttacctagcagatggaaacattgtgaggctttactgtatagttcactcatattttccagcaaaaaatattgattttattcatttattttggatttattttgcctcttttttcatggcctttaaggtgcaaaaataaggcagagctttttatattagtcaaatcagtcatgcatataggtaagtgcctaatacccagaataagtgccactgggcatctaaccatagctctggccagctgcacatagctgtccttgttctaccaggccctacccctctactccttaatgctcccacagttcctgcatcctggacacctttgaaaggagcatgttcttgctttgtgtaattgctgactggcaattcctaagccctgctggctcaaagtgccctctgcttgttctccttcccctttgggttttccagtggacaggtattggtgagtaccttgggaagaagttaaaagttattttcattgaattttrcttggatgaattaaagtatatacacatgaatgtatagggagaaatggcatgtgatataatcctccccaggtctgccccgacaatgcttatcacattcgttgcacacacaacttttttctgaagagtttgcacaagtcttcatggtctttataatcttatctgacatactagacaagagataacttaaagacaacctctgtagactagcctgtcacctaggccatgatggttctaaggctcacaacagggaacctcaaactggatgatgactgactgaaccaaacagttcctctttaaaaacaataagaaacacagataatatgtcaacagtgacagattaattagaagtagagaaaggaaagagctataatttctacagtgaaagagaaaccaaatcctgtcttcaagggggatggtttagatatgtgcatgaatggtcccggtgtggtggctcacacctgtaatcccaggactttgggaggcagagatgggaagatcacttgagaccaggagtttgagcccaggctggtcaacatagcgagacgctcatctctatttaaaaaaaaaaagtatgtatttaaaaagtaagatatttgcgttaatgttgcttcttacccaatagcctcttcaaatccttgaagttctcacctcaatgaccttcttttccaccatactttagctatctccccctttggccccaattgctaactcatgtcatcatttataactgttctacttctcaaattactaatttaaaccattacttcagttattgcaatcatcatttctctatgacttcgatgagatcatcagcctcatgtatcttctgctttcttctaagtaataagttcttcttttattaattttgttcttatgcaggttagattcccttatacatcatgaagtaacaatataccctaagatgtggatttacttgcccctctgtgtttttgttgcatctagaaactccttagaaaagatgaacctcctttctctggacctgtaccctggcagctggaaactgctagaaaaattcacacaataggacagacaagtttcaccagaaattcaggttcaccaaaaaggaaactccattgcttggcagtcttgcaatatttctttagttgaactcacacttactccttcaaattatttttaaaaacattatctgtatttctcaactttatttcccttatttcctgccacttatttccaggtgggaaggtcctcatctttctaaaatcaatttagattttaccaagtctgcctcatctgttcctaatcttcttttaaggttcataatttcactattcttcctgcatcccatttttatttaaattttactttaaattctgggatacatgtgctgaacgtgtaggtttgttacataggtatacatgtgccatggtggtttgctgcacctatcatctaggttttaagccycacatgcattaggcatttgtcctaaggctctccttcccctttcccccaacccctaacaggccctggtgtgtgatgttcccctccctgtgtccatgtgttctcattgttcagagtgagaatatgcggtgtttggttttctgttcctgtattactttgctgagaatgatggtttccagcttcatccatgtccctgcaaaggacatgaactcatccttttttatggctgcatagtattccatggtgtataggtgccacattttctttatccagtctatcactgatgggcatttgggttgtttccaagtcgttgctattgtgaatagtgttgcaataaacatatgtgttcatgtgtctttatagtagaatgatttataatcctttgggtatatacccagtaatgggattgctgggtcaaatagtatttctggttctagatccttgaggaatcaccacacagtcttccacaatggttgaactaatttacattcctaccaacagtgtaaaagccttcctatttctccacatccatgccagcatctgttgtttccagactttttaatgattgccatcctaactggcgtgagatgatatctcattttggttttgatttccatttatctaatgaccagtgatgatggtaagcttttgttcatatgtttattggccacataaaagtcttcttttgagaagtgtctgttcatgtccttcacccgctttttgatagggttgtttttttttttcttgtaaatttgtttaagttccttgtagattctggatatcagaccttgtcagatggatagactgcaaaaattttctcccattctgtaggttgcctgttcactctgatgatagtttcttttgctgcctgcatcccatttctttcctgcttttgagaaacctgcattttgtctttctcacttctgtcaattcaatgtctcactctttcaaatgggttctttccattgacttttggggattattaaattttttgctttaaaaatgcagaatattaaaaaacaaaactgattgtacaaaaccaattgtacagttaccacatctcagagttaacacattgttaatattttctaatgttttctctgatttataccttaaaaaacaaaatatataaaaattgtaaaacaaatacactttattccctttctcaatcccagttgtcccctctcttttccaactcctagcactactttgtgagttttatttttgtaaataaataatctcatgctgtgtctgatttttaaattcaatattatgttgtgaaatatattcatgtcgatacacatagttctataatagtacattgtagttttcttccatacattatgttattgaatatgccaatgtatcttccccatattctttttgttattacacgtggtgctgccatgaacatccttattcttgtgtcccccattggcttcttaccatgctgagtctggccctattccttcccagatatcaccctatgtctcttcctaacctcaaaatcagtttgtcaggatgtcactattttctcatctctcacttctgcaattccttcagtttgtcttgttgtcctgtaatttcaccaaaaacagttcttgcttaattagaaggcagtgaggaagttcagcacataataaacatgatgcacagtacatagactctattgttactgtcccttgttatccaaattagtgaatctaatattcatttccactaaggccacaaagtcaattgcaaggtggcaatgaatcgaacagcaacagtaacacacttctagggttctgtacttaaaattttaaagcattacgacatgttatggaaaaagagaggaattaagtatgattaattaattgtacaaaggagcctgaagctaaaaaggtaattcagtgaattgtctaaagttccatgtaaaactccaatgcatgaaaaatatcacctagctctcattcatatattgacttatccttgaaaaaatatatggggctatatactcataaagttctaccaagttcaatgaatggcacaaagaagtcactacccttttttcctggaactcacagtctaatgagaacatgtgtgataaggtttgtactaagattgtgaagtgatctcttctagcacaaggaatgggaaacccaactgcctagaggggtttgggaagccttgagcaaggaatacttttagatggcattaaaggatgagaaagaacccaatggagaaagaagggtgtaggaagcgcatttcagaaaaagggtgacaacatgagcagagcgtatgagcctgacagcacatggagtgtgtgaagatgagctggcagtttgacacacagtaggtactcaataaatatttggtaatggtgtgaataagtgaaagaaagggggcacatggagtcttgctgctgagaatatgataagaaagccgaggagcaactttggttcagttgcactgttctgatccatcctgaaagaagaaaaagaggagacaaggagtgatttctgtcttccatgtcacatttcataacatggtcaaaaagttgtttacaaccgttcatttgctgttaagactcctcacaaacactctcagatgagtaagttctgtagtgagagagtttacgtctgatttcttggtagccctttgaatggttgtcaaaccatcatggtgatgtgatggaggtaaaggcactgatggacaaggcaaagggtagacttgctttaaaataggtagggtagagggaggaaccaagatggccgaataggaacagctccagtctacagctcccagcgtgagcgacacagaagatggatgatttctgcatttccaactgagttaccaggttcatctcactggggagtgccagacagtagttgcaggacagtgggtgcagtccactgtgtgcgagccgaagsagggcgaggcatcgcctcaccggggaagcacaaggggtcagggaattcctgttcctagtcaaagaaagcggtgacagatggcacctggaaaatcgggtcactcccaccctaatactgcgcttttccaatgggcttaaaaaacggcacaccaggagattataatccgcacctggctcagagggtcctccgcccacggagtctcgctcattgctagcacagtagtccaagatgaaactgcaaggtggcagcgaggctgggggaggggcgcccggcattgcygaggtagttatttgattaggtaaacaaagtggcagagaagctcgaactgggcggagcccaccacagctcaaggaggcctgcctgcctctgtaggcgccacctctgggggcagggcacagacaaacaaaaagacagcagtcacctctgcagacttaaatgtccctctctgacagctttgaagagagtagtggttctcccagcatgcagctttagatctgagaacgggcagactgcctcctcaagtgggtccctaacccctgagtagcctaactgggaggcacccccccagtaggggcagactgacacctcacatggctggctactcctctgagacaaaacttccagaggaaagatcaggcagcagcatctgcagttcaccaagatccgctgttctgcagccaccgctgctgataccggggcaaacagggtctggagtggacctctagcaaactccaacagacctgcagctgagggtcctgtctgttagaaggaaaactaacaaacagaaaggacatccacaccaaaaacccatctgtacatcaccatcatcaaagatcaaaggtagataaaaccacaaagatgggaaaaaagcagagcagaaaaactggaaactctaaaaatcagagcgcctctcctcctccaaagaaatgcagctcctcaccagcaacagaacaaagctggacggagaatgactttgacgagttgagagaagaaggcttcagatgatcaaactactccaagctacaggaggaaattcaaaccaatggcaaagaagttaaaagctttgaaaaaaaataagatgaatggataactagaataaccaatgcagagaagtccttaaaggacctgatggagctgaagaccaaggcatgagagctacgtgacgaatgcagaagcctcagtagccaatgcgatcaactggaagaaaggatatcagcgatggaagatgaaatgaatgaaatcacgtgagaagagaagtttagagaaaaaagaataaaaagaaataaacaaagccttcaagaaatatgggactatgtgaaaagaccaaatctatgtctaattggtgtacctgaaagtgatggggagaatggaaccaagttggaaaacactctgcaggatattatccaggagaacatccccaatctagcaaggcaggccaacattcaaattcaggaaatacagagaccgccacaaagatactcctcgagaagagcaactccaagacacataattgtcagattcaccaaagtggaaatgaaggaaaaaatgttaagggcagccagagagaaaggtcgggttacccacaaagggaagcccatcagacgaagagctgatctctcggcagaaactctacaagccagaagagagtggggaccaatattcaacattcttaaagaaaagaattttcaatccagaatcccatatccagccaaactaagcttcataagtgaaggagaaataaaatactttacagacaagcaaatgctgagagattttgtcaccacctagcctgccctaaaaaagctcctgaaggaagcactaaacatggaaaggtacaaccrgtaccagccactgcaaaaacatgccaaattgtaaagaccttcaaggctaggaagaaactgcatcaactaatgagcaaaataaccagctaacatcataatggcaggatcaaattcacatataacaatattaactttaaatgtaaatgggctaaatgctccaattaaaagacacagactggcaaattggataaagagtcaagacccatcagtgtgctgtattcaggaaaccyatctcacatgcagagacacagataggctcaaaataaaatgatggaggaagatctaccaagcaaatggaaaacaaacaaaaaaaaaggcaggggttgcaatcctagtctctgataaagcagactttaaatcaacaaagatcaaaagagacaaagaaggccattacataatggtaaagggatcaattcaacaagaagagctaactatcctaaatatatatgcacccaatacaggagcacccagattcataaagcaagtcctgagagacctacaaagagacttagactcccacagaataataatgggagactttaacaccccactgtcaacattagacagatcaacgagacagaaagttaacaaggatacccaggaatagaactcagctctgcaccaagtggacctaatagacatctacagaactctccaccccaaatcaacagaatatacattattttcagcaccacaccacactgctccaaaattgaccacatagttggaagtaaagcactcctcagcaaatgtaaaagaatagaaattataacaaactgtctctcagaccacagtgcaatcaaactagaactcaggattaagaaactcactcaaaaccgctcaactacatggaaactgaacaacctgctcctgaatgattactgggtacataacgaaatgaaggcagaaataaagatgttctttgaaaccaacgagaacaaagacacaacataccagaatctctgggacacattcaaagcagtgtgtagagggaaatttatagcactaaatgcccacaagagaaagcaggaaagatccaaaattgacaccctaacatcacaattaaaaaagctagaaaagcaagagcaaacacattcaaaagctagcagaaggcaagaaataattaaaatcagagcagaactgaaggaaatagatacacaaaaaacccttcaaaaaattaatgaatccaggagctggttttctgaaaagataacaaaattgatagactgctagcaagactaataaagaagaacagagaagaatcaaatagacgcaataaaaaacgataaaggggatataaccaccgatcccacagaaatacaaactaccatcagagaatactataaacacctctatgcaaataaactagaaaatctagaagaaatggataaattcctcaacacatacatcttcccaagactaaaccaggaaaaagttgaatctctgaatagaccagtaactggctctgaaattgaggcaatactcaatagcttaccaaccaaaaaaagtccaagaccagatggattcacagctgaattctaccacaggtacaaggaggagctgctaccattccttctgaaactattccaatcaatagaaaaagagggaatcctccctaactcattttatgaggccagcatcatcctgacaccaaagcctggcagagacacaaccaaaaaagagaattttagaccaatatccttgatgaacatcgatgcaaaaatcctcaataaaatactggcaaactgaatccagcagcacatcaaatagcttatccaccacgatcaagtgggcttcatccctgggatgcaaggctggttcaacatacgcatatcaataaatgtaatccaacatataaacagaaccaaagacaaaaaccacatgattatctcaatagatgcagaaaaggcctttgacaaaattcaacagtccttcatgctaaaaactctcaataaattaggtattgatgggacgtatctcaaaataataagagctagctatgacaaacccacagccaatatcatactgaatgggcaaaaactggaagcattccctttgaaaactggcacaagacagggatgccctctctcaccactcctattcaacagagtgttggaagttctggccagggcaattaggcaggagaaggaaataaagggtattcaattaggaaaagaggaagtcaaattgttcctgtttgcagatgacatgattgtatatctagaaaaccccatcgtttcagcccaaaatctcctcaagctgataagcaacttcagcaaagtctcaggatacaaaaatcaatgtacaaaaatcacaaacattcttatacaccaataacagacaaacagagagccaaatcatgagtgaactcccattcacaattgcttcaaagagaataaaatacctaggaatccaacttacaagggatgtgaaggacctcttcaaggagatctacaaaccactgctcaatgaaataaaagaggatacaaagaaatgaaagaatattccatgctcatgartaggaagaatcaatatcatgaaaatggccatactgcccaaggtaatttatagattcaatgccatctccatcaagctaccaatgactttcttcacagaattggaaaaaactacttcaaagttcatatggaaccaaaaaagagcccgcatcaccaagtcaatcctaagccaaaagaacaaagctggaggcatcatgctacctgacttcaaactatgctacaaggctacagtaaccaaaacagcatggtactggtaccaaaacagagatacggaccaatggaacagaacagagttctcagaaataatgccacatatctacaactatctgatctttgacaaacctgacaaaaacaagaaatggggaaaggattccctatttaataaatggttctgggaaaacgggctagccatatgtagaaagctgaaactggatcccttccttacacctcatagaaaaattaattcaagatggattaaagacttaaatgttagacctaaaaccttataaaccctagaagaaaacttaggcaataccattgaggacataggcatgggcaaggacttcatgtctaaaacaccaaaagcaatggcaacagaagccaaaattgacaaatgggatctaattaaastaaagagcttctgcatagcaaaagaaattaccatcagagtgaacagggaacctacagaatgggagaaaatgtttgcaatctactcatctgacaaagggctaatatccagaatctacaatgaactcaaacaaattgacaagaaaaaaacaaacaaccccatcaaaaagtgggcaaaggatatgaacagacacttctcaaaagaagacatttatgcagccaaaaaacacatgaaaaaatgcacatcatcactggccatcagagaaatgcaaatcaaaaccacaatgagatatcatctcacaccagttagaatggcaatcattaaaaagtcaggaaacaacaggtgctggagaggatgtggagaaataggaacacttttacactgttggtgggactgtaaactagttcaaccattgtggaagtcagtgtggcgattcctcagggatctagaactagaaataccatttgacccagccatcccattactggatatatacccaaaggattataaatcatgctgctataaagacacatgcacacgtatgtttatwgcagcactattcacaatagcagagacttggaaccaacctaaatgtccaacaatgatagactggattaagaaaatgtggcacatatacaccatggaatactatgcagccataaaaaataatgagttcatgtcctttgtagggacatggatgaaactggaaaccatctttctcagcaaactattgcaaggacaaaaaaccaaacaccgcatgttctcactcataggtgggaattgaacaatgagaacacatgcacacaggaaggggaatatcacacaccgggtactgttgtggggtggggggaggggggagggatagcattaggagatatacctaatgccaaatgatgagttaatgggtgcagcacaccaacatggaacatgtatacatatgtaacaaacctgcacgttgtacacatgtaccctaaaacttaaagtataataataaaattwaaaaaaattatacatatataaaaaaatatatatattagatgccagagctacttgccattttctctaggaagattttttaaataaggacaggaaaatgcctcataattttatgacttatttcaagtagttttmctgagaatgttaaaaaattttttcaggctaattattttgtttaatttgttttaggaattgcaggaacagcaggattaatattttaataaaatggtttacaatggcaaaaataaataaataaataaaataaagtaggtagggtaacacaacttcctcccatagatggttgcccagtacaaggatccagatctgactccaggccaatcaggcaaaattctgtggccctcagattcctccagaagtgctcagctgccaatgataccatttgaagaggagaagatactttcaagctctttgcaaaaatcttgtttgctgatctgccaagaatttttataacctcctagccctcctgaatgttctgaaagctctgcttatatgcctgtctcatcacgaagcagaagtaactacaaacagtcccagaaaattgttgaatacgtcctatacatatgggaaaatcagaaaatcagaagggtaccactacccaagatgtccagatccagtccttcaggcctgcttcagttctattctggcacatcctagaataaatttgttcctcaagacatatggttttatgacatggatgcatcaacaagtagaactgaacaagtagaagggacctctaaaaatgtcctttaattttaagacttagaccacctccctaaactagaggaaatctttgatgcattgcttatctcctgtgtttaaaaagtgtacagttgagaactggaaccataaaaataccatacactatgaactagtagaagttgctagatggactcagagggaagaaatgtattgtctacatttgtaagttctcccttttttgatatttatcattttcttcatcagtgaagaaaagctatattgttaattaacttactttctgtaaaacaacaataatttctgccttatgaggttgagctgagtattaaatttttaaaaattattaagtttatacagtcacattgtaaaagccctcaaaatggcagctgccatcatcatcatcataatcatttattcacatcaaatttggttttataaaatatttgaggtggcttttgttaaaagatacatgtatgttaaagctattaaaataagaataatgaatttttaaaaaacagaagtattaaatttcattctgagttttttcctgaagcaaacatgtatgcataattacttacataataaatataaactgacaaaaggaaagatacctgttattcagaaggacagatttttttcttggcactaaagtatgaatgtaatttttttttcttttttctttttttttttgagacagggtctcacagtgttgtccgggctggagtgcaatagcacaatctcatctcactgcaacctccatctcctgggttcaagcaattctcctgcctcagcctcccaagtagttggaattgcaggcacccgacatcacacccggctaatkttagtatttttagttgagacagggttttgccatgttggctaggctggtcttgaactcctgtcctcaggtaatccacctgcctcagcctcccaaagtgctgggattacaggcatgagctaccatgcctggcctgaatgtaatttcttataagatatagtttataaatgataatgaataacacaattgacagtgtaytcaacaatgatttcacagaaaatccaaaatatttcttcattgcttcaaaaataaagacatgtcattatgttataacttagtaaaaatgtttaaaagtgaatggcttaacttctgctcacagaaccaaaaactaggatrtagcttacatttcttagataaagaaatgtatattaagttagtggttcccaaaactgaatatgaattgaaatcactcaatgaacttttaaaaaaattctaggaatctgccccagagctactgaagctgattttccttgggttggattcaagcatatgtattgttttcctttcttttatgtttggtagaatacacataatataaaatttactatcttaaccacttttaattgtacaattcaatgtgcaaccatcaccaccagccatctccatgactttttccaccttgtaaaaaaaactctacatccattaaacactaacttcccatttccccrccaccccaaccctggaaaccattattctactttttgtctctatgatttttgattactcttagtatctcacataagtggaatcatacagtatttatcttttttgtgactggcttatttcacttagcataatgttctcaagattcatatatgtaatatattgcagaattttcttctttttaaggctgagcaatattccattgtattactttgtctaataatattccattgtaatattccaatgctgtcatccatttattctttaatggacactgggttgctttcatgttttagataatgtcagtaatgctgctatgaacgtggtatacaaatatctcttccaggccctactttccattattttgtaactawtggaagatgggaattgtagaaaatacaccaaacttatttactgtttggtaggacacttctgagatgtattccaacaattcttaaaggactcccagtaggatgttccccaggaggagcctgaggatccttgctgtgctagtgaatgtgacacaaatattgttgacaatctcaggtgtgactgtcctctgtaggctagagttaataacagcagatgctgctctagaactccacttcgctccactcyactcaggggatgagacagtctgtggctgctgaggccaggtggtggcacttaacttttagaggcaaatggccataattatcataacaagtaggaaagccaaaaaggtagccaagttgcttaggccctctgggatttgtggcaatggctaacacactattttgttcctgggggcaagatagagggtcacacaatgagggaatggcttaatatatataagccaaaaagtaaaaattaaaaggcatctgggatgacagctatcagccaccacaatggaaaattatgatttctcacacattgtatgacctaacactgataccatggagcccaaaatggcaccctggtgttgctgattaatagggtagatacagaaactgagtgataagtagaatctggcctgagtgtacctcatgctgctccattgggtccatggtcccatcctatgatcatttccccagtctccgagagcacaatatgttcacaccctatatctttccagcagaaccctaacatcattccttggcttatggaataacagctattatggtaggaaaagccaagtggagtggctccagtggtgcagttggttagygcgtggtgcttatgaggaaggccaagtggaagctcacagatggccccactcaccttcgccaagatgataaattagaagcaatatgacatcctgggtggaatgtcagagtttaatgccaccttaaaagacaaaggatgtagtagtggtggtgcctatcatttccttatttaatccaccagtatggctctggcaaaaatcttataaatcattgtacatgaaaatgtactatcataaacttagtcaaatgtagctacaattctagctgctggactaaggttgtatctttcctaagtagatctcttcagcctctgcagctttgtgtgcagcgactgatctggtgaatgggtaatttttttttttttttttttgagacagagtctcactctgttgtccaggctggagagaagtagtgtgatctyggctcactgcaacctccacctcctgagtgcaagcaattctcctgccacagcctcctgagtagctgggactacaaggcgcccgccaccacacctggctagtttttgtatttttagtagagatggggtttcaccatattggccaggctggtctcgaactcctgacctaaagttatctgcctgccttggctcccaaagtgctaggattacaggcatgagctaccacccctgtcccctgaatgggtaatttcttttttttttattattatactttaagttttagggtacacgtgcacaaagtgcaggttagttacatatgtttacatgtgccatgttgctgtgctgcatccattaactcatcatttaacattagctatatctcctaatgctatccctcccccttccccccacccccacaacaggccctggtgtgtgatgttccccttcctgtgtccatgtgttctcattgttcaattcccacctatgagtgagaacatggggtgtttgtttttctgtccttgtgatagtttgctgagaatgatggtttccagcttcatccatgtccctacaaagaacatgaactcatcatttttttatggctgcatagtattccatggtgtatatgtgccacattttcttaatccagtctatcattgttggacatgtggcttggttccaagtctttgctattgtgaatagtgccccaataaacatacgtgtgcatgtgtctttatagcagcatgatttgtaatcctttgggtatatatccagtaatgagatggctgggtcaaatggtatttctagttctagatccctgaggaatcgccacactgacttccacaatggttgaactagtttacagtcccatcaacagtgtaaaaatgttcctatttctccacatcctccccagcacctgttgtttcctgactttttaatgattgccattctaactggtgtgagatggtatctcattgtggttttgatttgcatttctctgatggccagtgatgatcagcattttttatgtgtcttttgrctgcataaatgtcgtcttttgagaattgtctgttcataagttttgcccactttttgatggggttgttttttttcttgtcaatttgagttcattgtagattctggatattagccctttgtcagatgagtagattgcaaamatkttctcccattctgtaggttgcctgttcactctgatggtaatttcttttggtgtgcagaagctctttagtttaattagatcccatttgtcaattttggcttttgttaccattgcttttggtgttttagacatgaagtccttgcccatgcctatgtcccgaatggtattacctaggttttcttctagggtttttatggtttcaggtctaacatttaagtctttaatccatcttgaattaatttttgtgtaargtgtaaggaagggatccagtttcagctttctacatatggctagccagttttcccagtgccatttattaaatacagaatccttgcctcatttcttgtttttgtcaggtttgtcaaagatcagatggttgcagatatgyggcattatttctgagggctctgttctgttccattggtctatatctctgttttggtaccagtaccacactgttttggttactatagccttgtagtatagtttgaagtcaggtagcatgatgcctccagctttgttcttttggcttaggattgacttggcaatgcgggctcttttttggttccatatgaactttaaagtagttttttccaattctgtaaagaaagtcattggtagcttgatggggatggcattgaatgtataaattaccttgggcagtatggccattttcatgatattgattcttcctacccatgagcatagaatgttcaacatattgttggaagttctggccagggcaatcaggcaggagaaggaaataaagggttttcaattaggaaaagaggaagtcaaattatccctgtttgcagatgacatgattgtatatctagaaaaccccatcgtctcagcccaatatctccttaagctgataggcaacttcagcaaagtctcaggatacaaaatcaatgtgcaaaaatcacaagcattcttatacaccaataacagacaaacagagagccaaatcatgagtgaactcccattcacaattgcttcaaagagaataaaatacctaggaatgcaacttacaagggacgtgaaagacctcttcaaggagaactacaaaccactgctcaatgaaataaaagaggatacaaacaaactgaatgggtgatttctaatgctcaccacaaaagcggataaaaaatagtttgttttcttctaggaaagaaaacagagcatatttgtagttttgaccaagcgctgtattaactgtatcaccttttcacaatataatcctcagggacttcaacatcttgacattacagagagtatcatgctaggctactgtattgataacatgatgctagtcacgtctagtgtagaccatctctaggctgaactaactttgtttcacttctttcatgaatacaatcctgaaatgaccattgcccagtcaatgagaaaggttgttttctagttgtttattaggtgagaaagcctggtaccagttactgtgttcatggctatgatataacaatttaattttgtatctgcttctgtaagtagattttaaaaacaaacaaaaatacctttattcatttttttctagttatagggttacccaaggtttctattaattttttgagtcaattattataaattataattttctatgcaattttcaatttatttaatgtttttataaacttattccataaagacattcatcgtatgctcttattattttttaaaatattgggaatttttcaatctttttaaaatatttcttttctcgggactaatatgtgtattttctttttctttcttcctttctttctttctttctttctttttttttttttttttgagatggagtttcgctcttgttgcccaggctgaagtgaaatagcgcaatcttggctcactgcaacctccacctcctgggttcaagagattctcttgcctcagcctcccaagtatttcttttttaaatcagttttgggaaaagagttcttattttattaattattcccccaaaagcagcatttggattttattttttgttgttttatttgttttacttttgtttctttgatttctacttctttttttccatcctcactatttgtttcctttttcctttctttgggcttgcagcctgtctagttgaatgcttagctcattaattttcagtctcttctaatattttccttgaaggctatattttttttataaatacagttaagctgtattctttaagtgaaaacattgttgcttaattctaagcatatttaaatttccatgattattttaatttgatccataaattattttaaatttttgaataatatatagttttctcatttttacaatttttaaattaagatataaacatatcataaaattcactctttcaaaatgtactattcagtgatttttagtatattcatgaggttgtgcaactcaccaatatttaattccagaaaaattttatcactctaaaaataaactgtgtacccattaacagtcattttacatttttccctccccctagtcccaggaaaccactaactttccatttctatagaattgcttatctttaattttatataagtgaaatcatacattatatggcattttgtgtctagcaactttcactttgcacaatgttcacaaggttcatccacagtgtagcatgtatcagtatgtcattcctttttatggctgaataatattccattgtagggatatacagcatttatttattcatcagttgataggcatctgtgttatttccactttggggctgtatatataatgctgctctaaacatttatatatatgttcttgtgtgaaaatatgtctccaatctcttggscattgaatggaattgctgtcatatggtaattccatgttcatctttttgaagacctgtcaaattattttccaaagtgactcaatattatacattcttgccagcaatgtatgaagtttgcagtttctccacatgcttgctcatatggtttggttgtgtccccacccaaatctcatcttgaattgtagctcccataatccccacgtgtcatgggaaggacctggtgaaaagtaattgaatcatgagggcggtttttcctgtgctgttctcatgatagtgaataagtctaatgagatccaatggttttacaaagggcaattcccctgcacatgctgtcttgcctgccgtcatgtaagacatgtctttactcctcctttgccttccaccatgactgtgaggcctccccagccatgtagaactgtgagtccattaaacttctttttctgtataaattacccagtctgagatatttcttcatggcagtatgaaaatggactaatacacttgctaacactttttattgtctattttaaaaattacagccactccagtgagtatgaagtggtatttcatcacagttttagttttcctaatgacaaatgatgttgtgtgtctttttgtgtgcttatcggccatttatatatctttttctgaaaaatatttattcaaatttctcagattttaatttttttttatttctttacattatcttaatctgtctcatcagataatgagtttctttcattccatggttgtcttttttattttcttaatgttgtcttttgaagcacaacatttgttgattttgataaagtccaacttacctattttttttcctttttgggtatttgtgcttcaggtgtcatatttaagaaaccattgccaaatacaaggtcaagaagatttttaactatgtgcttttctatgagttttatagtttagttcttacattgaggtgtttgatccatcttttgttaatttttgtatgtggtgtgaggtaggagttcaatttcattcttttgcatataaatatctctttgttaaaaaaaaaattggttgggcgtgatgactcatgcctataatcctagcacttttggaggccaaagtgggcagatcacaaggtcatgaggttgagaccatcctggccaacatggtgaaaccctgtctctactaaaaatacaaagaaattagcctggtgtggtggtgcatgcctgtagtcccagctgctcaggaggccgaggcaggggaattgcttgaacccaggaggcagaggttgcagtgagccgagatcgtgccactgcactccagcctggcaacagagcaagactctgtctcaaaaaaaaaaaaaaaaaatcctttcccccattgattagtttcaacacccttgtcaaattcagttgaccatatatgcaagggtttctttctagactctgtccatttccattagtttaaatgtctattctaatgccagtaccacattgtcttgattattgcagctttgtaataactttgaaatcagraagtgtgagctttctaactgtattcttcttcaagactattttggttattctgattctcttgcatgttaatataaattttaggttcaccatgtcaagttctgcaaaaaaagcaactagaatgctaatagtgaatgttttgaatcagttgatcattttgaagcatattaccatcttaaaaaaatttagtttctcaatccattaaaatagaatgtctttcgacttacttgtcttcttttatttctttcaacaattttttttagtgtaaaggcttatacttcttttaaaaatttatttctaagtatcttattctttttgatgttaattgtcttagtccacttgtgttgctataaaggaatacctgaggctggataatgtattgaaggaaaaaaaagaggtttctttggctcagggctcatggttctgcaggctgtgcaaaaagcatggcagctcctgatgagggccccagactgcttccactcctggtggaaggtaaagggaaatcagaatgtacagagataacatggcaagaaacaaagtaagagagagagaagtggagcaggtgccaggttcttttcaataaccagttcttctgggcagaactagaagtgagaactcatttctgtgagaatggcaccaagctattagtgagcagtctgcccccgtgacccaaacatcctgaaacacccaggcccatctccaacattagggatcaaatttcaacatgagagttggtgaggccaaacagatcatatccaaaccatggcactaatgcaatagaattttttttttatgcaatagaatttttaaagtttcattttcagcttgctaattgctagtgtatagaaataaaattgatgtatgcatattgattttgtatcttgcaaccttgctaaacttgactattagttctcatatttttattgaacttttagaattttctatatacaagattgtgtcatctgcaaacagagatagtttaacttcctttctaatctggacacattttacttccttttcttacctaattgctctggcttaatccccagcatgatagtaaagaggagtgacacaagtggataacattgtcttaattcctgatcttagaatgcttttatcctttcatcattaatttttattaattgtaggtttttcataagtgctttgttgaggagcatttatgttgcggaggttccattctacccctagtttttttgttgtttgtttgtttgtttttatcatgaaaggatattggatcttttcaattgcttttatgcaactaaaagcatgattattgagacaatcatgtgggttttttgtcctttattctgttattatgacaccacagtattcagacagatttttgtatgttcaactaacctttcattcctgtgataaatcccacttggtgatgttatataattctttttatatgttgctggattcagtttgatagtattttgtttaggatttttttaatctataattttaaaagatattggtctaaagttttctttttgtaggtagtttttttctggtttctgtaacacgtaaatactggcctcatagaataaggtggaaagtgatcgcttctcttctatttttctaagagtttgtgaagtatcagtgttaatttttctttgagtgtttttagaattcaccagcaaagctattcttgggcttttctttgagggaattttgtttattatttaaatctctaatcccttaacttgttttgttttttgtttgagacagagcctcattctgtcgcctaggctggagtgcagtggtaccatctcggctcactgcaacctctgcctccggggttccagtgattcgcctgactcactgggattacaggtgcaccaccaagctcagctaatttttgtatttttatagagacagggtttcaccatgttggccaggctcgaactcctggtttcaagtgatccgccggcctcagctttccaaagtgctgggattacaggcatgagccactacggctaccccacctactctcttcatttgttatagtacttttcatatatttaatttctccatgagtcaatttcaatagttcatgtctttctaagaatttgtccatctcatttaagctacctaatttgttgatatatgattgtgtatgatattccattataatctttttcttccttgaaaggttattttttagaatacatctcaatttatcttaattacattaaaagaatgaagtctatattttaccaattttgttacttcatggagtgatttggtttctgtatctttgcatccaattttcatatagctccgtgtatacttaaaaacaaagaatagtctctaactttaagtatattttaagttatattctctaattttgtaataggattctatacgtgttctttagactaaaactgttaattggtgtatttaatattcttagtacttttttatcttcttgatttattaatgagagaggtctgttaaatttgaacactatgtgacttgttaattttccctgtgatttttgatatcattacattacatattttgacatttctttgtaaggattatagaaatttaggattatgtagtcctaggaaatctttccttgataattaggaagtaatcttcttaattatcagtaattatttttcaaaatatgttttgttttatacaaatgttgtgactattctaggctttttaaatattacttacttgtgattatttctgttctttctttcagccttgctgtattatgatttaggtgtgactcagtaaaaaaaaaatcagttaggtttttaaaacacctgactttctggggaccctcttttattttgcctggattggttaatccaccaataattacctttattattatttctaacacacctaaatacagttttacaactgtatttactttttctattttctatgattttccttgctattttattgaattctcttcttgctttacattgaattgatcagattttattttattaccctttcttctgtattgatttatatgttaaatatccattctttttctattcccacagcagtttttgaattttaatttctacacttgacctagagagtctaaggctaatcaatagctttctccttctcctaatcaataccagaatcttagaatgttttaagtgcatcacaatcatcgcacattatacccactccaactccattcctagaatcttagattataattttctatagaagtttagttttatatctttttgtatgtgttcaattaataattattattaattatatgtggttaattatatttaacttgayctacatgcttcctatattttttgctatgtattgtttcttagattcttctcttttcttgtttaccaatttttcattaaaaatgtagttagcatttctttctataattaattgttatttacataccctatcattctttttcttagggaaatagttgtattttacccctactcttagtttagctgggtattaaactctaggctggagattttgttatttgtggatattattcctttgtttggattttttttggaaaaagtctgctcttagtctacttgtttctgtgtagataatttgaaaaatataattgttcacgatgatgttatctttgtctttaaagttttgcatttttattacaatgtgtctagactgtatttagattgggtttcccagaagcagatataggggtatggatttgtgtagtagtattctgtctttttttaaaggagtgatcccaggaaaaatcaatagggaaataaaataacaagacaagaagtggatagacgccaagcaacactgtgacttctagcaaagttccagacaggataacttagtctcattaactcaggaaatttttcccactggaatcagttttggtcatacttcagagctgtctcaatcagggtgcatggtggatatcctattcctatatgctgaaccatcagcaataagttaaaggctgcccttaaaggaatagaatgtgaatttccaggtactctgattcttcatgaacaaaggtatttaggctcccacaacctgaggacggcactctgccagaaagttgcaggtgctggatttgggaatgaagtcacacctggagctaatatgggagtgggagatcaggggaataygggcagagcattccagcatcttgtagagatgggaattaccattgttcttctcttcaatcgtcatgattgttgaatctgaagatatatgtcatttagaaaaggtctcaacattttttctgaaagtgttctgctaccattatctctaatctgtcgcagaaattatatttggtgcctgtttatcttatctttctattttaataattttttggcttgtaactgatctgctttttaacctgtccattgagttttaaatttcaaaactataaatatattatttcttagtgtcattgctgctttttaatttgcttttkgatagtgttttattcttgctttatggttttattccttttgttatcactttaaacatatttacttttatatatttttcagatttttttgtaatcttaaatttggggattatgtttatttaatcttgctgatgcaggattgttcctgtgtatattcttaaaaatatttgattgtgaggtcatcagaaataaggattttgtgtgtgtgtgtgtgtgagagagagagagagagagagagagagagagagagacagagagacagagagaaagggagagcgagagagatagggagagagagtttctccaaaggagttttgaatttgcatttatttacacaagatgtctgggactgatttttttccgcatacttcctggtttgaaggggtttccatgcccctccaaattgcgcagaatcaagctccatttgctcatggctcctcttatcaatttttcatggtagtagtattttttttttttttggctcatattcctatacagaggcaaggttccttgccatttccctgggccaatgggtatgcatttccagtatctattgtcactaagatgaaacccttgattttttgggcttataagattctcatttctaccttcctactcaaatatgcccaaagtgccatctcttttcatgacatttactgagttttaaagttaatcctctaggtattaaactccaggtcacaacagtatctttttttttttttttttttggatttttagtagagacagggtttcaccatattggccaggctggtctcgagctcctgacctcaggtgatcagcctgactcggcctcccaaagtgctgggattacaggcgtgagccacacaacagtatcttctaacacaggcacttgctggattttagattcatttttacttctaacatccaggtatttctttgtgtttgtatrtgtgagtttgtgtgtgtgtgtgtgtgtgtctatgtatttttcctcatatatctatttagaaagattgaggaaggttctggaatacttagcgcatcatgcagctaggatagattccttctgaagggaaatgacaactgaaaatccaattattttgtccaaaagattaggagtgcagtcttattgagttactaactgaaaaatgtccctaagtttgggtaaggaggtagggttcaaattctactataatctttatctttctctttctcaggttgaagatcatctcttctttttttcatggtgttaagcatgtacgtatgtaacacctggtactctttactcccaaagaatacatataaaaatgtattttatttgattttccaaaaagttgagtatagcaacctgaaatctcagtggtttcagttccctgtgtaaaacacagtacaggttatcacaagtcattggttcattggctgcagattgacacaggaatgtgcttttaaaacaataacaatattgtcccatagcttttgtcttcttcactgtatgcaatccttgattagcttagtgggaaatactatgtcagaaactttcaaatttaaacaaggatgctgacatttgttgagtgtttaaatcagtgttccaggcacttggcatatcttatgttatccttgttatcaactgagcattgaagtattattactcattttgtaaaaatagagaactgagactcatataagttcataaatatatcctaggtcatgtatctaataattatatgactccaaagcatctactctttgcactatgccactgatcataacgcaagggatttcagaaaatgtggaaagaaatggcatcaatcaggatgtattttcagtttaaaaatcacttaaataagaaggggatttaatactgggaattaggagtttgcaaaccagtagactaactagaagagcaggctccgtgttagaacccaggaacaactcacagatcagtaacatagaactggctccccagggagccacaatcagaaacagggaaccaggaatccaccaccttgactgtacactccagaggcacactttttaggtatgattcaggtcagggcattgcatccacacctgttggcttcataatcatgctttctcagcatgtagtaattgtccctcaccttgccttaggacatcaggaatatctgctagcactactacagcaaaactcagtatttccaggactgtgcttgccaacgtggtaaacagaaatggtaaaatagtgacttttgcctcaatttcagtttccaaatctttcacaagtatagctgatgtgataaacccaaagcatatctggagtcctagctgcaaaggagtcaagcaaaagtggtttttaacttcatagcttctgcagcacagaaaggcacacaaggagcagtatggaatgaagattgagtacagattcactgtattcacctcactgaggataataatggaaagactcatgggggatattccttcaaagatgtgaatttggtaaaaattggaaaagtgaatccacccaaggtaacaagcaaaacctcacaaggaagaaattgaaaaaactattctcctcagaaatgcctcatggaaaacctacactgggaggcctattgaccagaacaaaaccaggaatacagactttaagctacattattcttyatgatttatgaccaccaaatattttattatttttaccagttgaagtaaaaatttaaagtttttctaattaaaaagtgaaatatattaaacttctataaataagtttcagtattattgttagtaatatgaattagtatatgtatcatactttgcagagaaagttaaaaatagtaaaaaccaataatcagcaaaattattttacttttttctgcttaattgacaataatagccttccccagataggctacaaacgtttttcctctcttcaggatttctacattgctttaatatatctttcattaataacctaaggaaatgaatgcatattctttgaggagcaactggattcttaacaaacattcccacgaaatcaaaccaaaatgggaggtaggttgtgaagttgtgttcagtttgctgtctgattttcattagactcatcattctacattcttttgagtcctaggcacttggtctctggctattttcatgactgctgtaatggaattaccatttcaagtttgtaggaggtaaaggagaaacatgataggaatagcaggaaggaatggctcactcataaacaatctactggaattttgaattgattaggtttgagtggctaaaagggaagagtggggaaatgtactctagttttcttttcctccagtttcctgttgcattatgtggcttcttgaatgttgcataatataaatcatctaaccactggaagacaagttttagcattgcaaactcagcagatttacttaatttcatttttccagttggatatctgcatcaattcaggccaagagagtatctcatgtcacctaatgcaacaaatagatcctggagcattcatggcgatatccgcaatgttggcagatgaatgttttctttcctctgccaagcaccatcaacattatttttgggtggatctaaatctgaacagtctagagtttccattacatcgtcctaattgttaaaaagagggcctgctataattcttgaaaactagtctgtttagttgtacttgttaccataacatcagattgaaatattgcttctctgtccgtttggccacagtgtagcagccagcctggtagcatcaaggcattaggaaggtgaagcaatccacagtcaacagtatgaatggaacaattcacactgttgtacatagatatagaggttaaacccaaacacatgaaaaagtgatgctggaagcacttgkgaacagctgggccagatgaataactcaattggatgccatgaggaacaaattaaacaactgactggagaccaggctgctcctgtgacagacactttaatcaggaagtcaaaagctgattgacaagatgaaaagctggatgacatgaaaaatggaaacagaaggaacaacacaagaaaagggcacccgggtcagcatgctgacaaaaataatcaagtacgacaggccataatccaatcttcgaatgtttggcrtggtgctagttatgagaatctgcagccaagaggaaagaaaactattattaagcaaagaaattatctggctttctagaattcactattacatgttcactagaggattttctttttcttttttttttaaacaagcataatagcttttgttgagtttcataagatcaattaaaaagtgctaatctatctggatatgaagccctaggaaaacaatgtataatagtgttttagattcagagttaaataggatatacacattcattgcctcaaattgcaaagtgtgggtccttctcatgctctcctattcaaggcatagaagaggaagagtagcaattactaagaggaggtttctgtggcccacttaaaaactcttatgctggattattactgttgaattactgttggaatccaaggctgagcttcatgccagagaaaaaatttgtctgtgctacatgaattattttttagatgactcagaataccacctgcatcccaaaagatacattcataaatgcactatctgaagaagaatgaaataatgatcaggtgtttttttaaaaaagacagataacatagaagtttgtcactcctgggaaaaaygtgtgtatttatgcatgtttcagctctcatagcactttaatttcaatagcatataatttaccagaggagggcccagaagattaagcaccttggtggtgtttagacattgtcacttcatgccttttcagtaaactcatctgcctttggaaaaacagaaaacttgcagtaaacattgaaaggccagttgacactatctcccttggatccctacactggagctaaacctacatctcaagagaaaagaagggattcattgtcttagtccactggttttcaaaccatgtttcaaatctctagggtttttgaaagaaaagtatggtcacagaggacatgtttcatttgtatctgctccattagctccagatcccataggttttggagttctggggcattaaaaacaccgtcgaaagggttcctggcctcaaaaatgtgtaaaagaaaaacaccactttgatgatattactcttaggtgaggacgccattgtttgacagaatatattcagctcaaactggaagaccaagctggtgtatttcactcggataaagtaccttatagaaagccaaaccgaatgtcttatccataccattctagaggcacctggcttatagttgattatttttcattttatagaatttgctagagggcttcattgcagatcttaaaacttgagtcttacttctgccatatagttaagttcacttgagtcatgactgtctaaggaactagcttcttcccactgcctttacggacatacgtctaaagtgtcaaataagtaaccacaaagacatttaattttcctgtgaggtcagggctgaccccggagtcttactaaggtaaaagcatcttaaagggtaacacagaaattttattatgtcctcaaagcctagagccatacaacgttaagcatggtaggagaaaaaatgtatctactgaatttctattctgggttcacctggagtgttttgaaggtctgacccaccatgctctacccctctgctataaaagggaactacatatatgaaccaaaaattacctgggccaacctcgcttcttaaacctgttttactttgatcatgcttctacctgcctgcaaactcccaactctgtgatcccagcgtcatccctactgcaattctcaggactcaatgtttatatgtgcttgctccagattttgttgttttcccaggtctttgccttcattgcttcctgacactgctattgccacctccatctgccaggctcctcctaatcctgatcttgtaacactcaatccccgcccgctgtaactcagtcttttctggcctcatggagggttggtggcagaaggtgatagaggctattagtgargtggggaaatgtggcagattgggacaattgcatcattcacagcagtatttaaaaaaaatttatttggaatttccttcaaatatcagatgatgaaatagaatataaaagtttatatatatagtttataaaagacttcatgctaaaatatgaagaattcagaggagagagagctcaacattcaatacattgtaaaatagtgtatgtaaatatggttcaagctatttaatttatttgacctatcgtgtgtgatttgggtgacatgaagctgaatgatggttgtagtgagatcttcaacttttcccttgccattaatctttataatataccagccaccgagacccatcatttattcctattatgaaatgtgttttatatttagtctccatttcatttttagcatcactattctgagcctccaattttatgtggtacatgagagaaaggctggatcagaggcacaaagcatcaagaagacaataataccttctgtgtcatatatttaaaagtaaaaacaacataaaattaaaaagaaatatatgtagtaaattctgataaagttttgaattttcatttagtgactatttcaatgtcttttttgaaaatcaaatatcaaaatttttagtttttgttcaatgccctaatttactrgtgtccaaaacatatctttaaaggttaattggatagtccatcactgtatgggggctatattaatatactttacaataccagaaactatatatataaaacatagaagaatgtagaaaaacatactataatgtagaagtcacatgttgctgagaatttaataccctgaccccttatattattataaattcctagtttacatactttcaaaggccagccattgcccacaaatcaatagtttaatcttgtattggatatcctttactatctagtgacacagaagaaagaagaaacctgacattcattaacctactaactttaatacattatactatttagtcctacaaatatcataaggcaaatatttaaaataatttaaataacctgttcaaggtcacacgatgacttaatggtaaatccaagactcaaaaccaggactatctcttcatcagattggactagggtatgacatagagaccaacaaaagtgggacattcaaggctgcattgttgacaaggtttgagcaagtggggaaattagagaataaacggtcattgggaaatctcatattttgagtttgatatcagagtagatcactaatacactaccatggagttacagccagagtcaagcagtagaggtcgaagactaaggtcaagttcaaatcccagataaaaatcaaacatgaacgcatctgatagatatttactctggtaggttctttaatgattacaaattccttccattccagtaagsatatccytttgcattgtgactttgctgttcctcccatccagaattagatatgttccttcactcccttgaatagggaccgaygttgtgactctctttcaccaacagaatatggcgtaagtgacattttacaagttccagagcctgggactcaagatgtcttggagattctgtctttgcagtcttataatgatgccctgagatcatcattaaagaaagccagtctggcctactgaggatgagaagctacataaaggagaatgaagattccccagccaacaggcaatatcagtggtcagatatgtgaataaagccatgttgaacctctcggctagacgaccctccagcatatgaaaccagcagatgaatatcccagcctgcctgaagaactgtacaggaaataagaaatcattgttttttaagccactgggttggtgggtggtttgttacattgaaattgttaactaaaacagaaattggtgcatagaggtcaggtgctgtcataataaaaatctaaaacatatactgttggctttggtgatgggagtgattggtagctaaagaggcagtgaaacaatgattagtagatactgggaagttaataaggaaatttctattggagggtggagaaagggccacccttgttatatagtggccaaagaatcagcaaaatgttgcctgctgcaacctggaaagtagaaacttttcttaaactcacggatctggctgggagatttccaggatgcatgcaacaaatgtgaatcaactttgtatagctgtgtataataaagtgtgctgtatttgtccattctgatgctgctaataaagacatacctgagactgaataatttataaaggaaagaggtttaattgacacatgaggcctcaggaaacttacaatcgtggtggaaggggaagcaaacacatccttcttcacatggcagcaggaaggagaatgaatgaccagtgaaggggaaaatcccttataaaaccatcagatcttgtgagaacgaagtcagtatcatgagaacaggatgggggaagctgcccccatcattcaattatctccacctggtccctcccccataacacgtggggattatggaaactacaattgaagatgagatttgggcggggacataccaaaaccatattatgtgggaagagagattaattaaaaaagcaacttttcaatttgcaagcagaatttagagaaaatatagaaaacccaggatgagctggattgaaaaagattatcaaagaaaattttaatataggtaaaaatttaattccagaagacagtcaataaaatgtggcctcaatggtaagatcaaatagaaggatgtggctgttaggccctaacaaaataacccagaatgatttcttatagagtatttagtagacctctcatctaaacaaatgaytgtctatgaatccagacccatcactcaaataggcccatcatccaaattagagagaggcctaccttgacaagaatagtaagcctggctgtcatctaayagagtagaatttaatctgatccatagaaatcccataaggaattttaaaggaactatattgatttggattaaaagggacagagacagttcaagaagactccatgccatcaatttcctacagacaaaaagtgagttgagaaaactacttagatgcagtcatgggctatttctttcttacagaaaaagaaggatctctcrgaggctaagcaaaccatccagagtgtggacccaaaatccaaaaaacaaaattaattagagagccactccaagagataagaaataggccctaatcagggaacattccctgtccctggacatgtacctgtttggatttcacaattgcttcagaccattgattgctatgtgctcccagtcctttctctttttaaaaaagaggattattcattgtggttattttttctttgtctcaccatttcatcttagatatttgaataaaagagggtaaaagccttgtagttttggttcacagaactctggatcatgaaagccaaggagctccacagagaaacctcctttgtatctggaccagaggggaagctcaaacttgtggatttccagcctgatgcaatacctgggatraaacttttgcaattattgtgataggagtaagcgtactttccatgtgcaaaaatgattaatttgtggccagaaaatggagtgtggtaaatttgtggtttgatagccacaaattccacccatcccaatatgcatgccctttggcttctcctttcatccaaagacaggatatatgtctatatccctttcaatcttgactggcattgtgacttatttgaccagtagaatgtggtagaagggacagggcatgagtttttaatcctgggccacaagaggccctgacacttcctctgttgctctcttgaaaccttcacgaaaggaagccaacctaggcagcatccaacactgactgccagacatgtaagtgagaccatcttggatttccccgcccagackaccatctggctgaataagtgaaatcaagtgaaggcagaagaggagctgcccagcaacccacagaatggtgaaaacaatatattttaagccactacatttgggggtggtgtgttattatgtrgcaataatcaactgaaaccagttattatacaccagacaccatggtgactaaactagatacagcccacacctgtggggatttaatatggggcaagggtgtggggagaatggcattaaacagagcaataaaatacaattgtgaatgtgataaatgctatgaagggaaaggacaaggtgctgtgagaggctcaggaatgccatagagtcaggttggaccctctgtagaagctgttggagctagtcagcaatactaaggcagaggtccagagaagattcagtgactgtggtcagcgaggaaccaagaagaatgtaaggatgtattcatggtagttctactaggatgccagggcctaggccctgttacattgtcactaagagaaaacaattctaaaggttttagcacaggggtctagcatatattaaccacttggtattatctacaataacttattttttttattttgaattggcatggaaatgtgcgattacaagtgagtttaaaagtggaaacacaactctctgtttagagagggttaatagaaagaataattactacaaaatgcttctaaacgcaaaacaagactgtctctatgggagaaaaataaaacacaggtacacaatcccttatctaaagctccaaaggccagatgggcttcagaactcaaaaggtttagggttttagaaaggcaatttggagcatttcccatacactatgcaatacttccagcatttcctggggcagcaccccaccattaaatttgagcagcaaaacgtatggctattcgcaataagtgagataaaaattgggagtggacatacatctgttcaatcaccaaatttgttcaaaaaaatttgttttaacggacttcagaaggttctgcacttcaggattgtggatagagttgtgcacctcatctagaaacccccacgttttatgggcccacagcgagaagggggatacttcccaagtgggttgctgaaaaacacagtccctgtgattggtcattgacatcttaatgagctcaatggatcgcagcttgtccaatgcagctgcagaaatctgtctcagctttacaagttgacagaagtaaatcacacactatattttccatactgtggtccatttcactggctctgtgttggtacagctggagtatagcagattcaaatcactgtgaatgcatgtataacccttgtttccctaaaccatgccagcagtctcagagagtaccatgagtatgaggataattacaattttctgagtcctcacccattattgcattgttattcctggattcctamtttcctccccttccccaaggcctctcctaacttgaggatgccaatagcttacaatgtaccttgaaaatgtgttgtgtggcttggctgatgccaaaggccctgctgattctgtatctcctggatctcatcatttctgccagtcctttagccactccttagctgccrttttcattcccagcctcatcttcagatgcagcctctgccatcagtgctgagcaatgctgaagtaggatagagttctatcattcatctcaataagtagtattgagcctaagtaaattaaatcaatctctctccatctgtgtctgtctccctctctatatatrcatagatgcaaatgtatgtatatgtgtaggtatagaaaataaaaattgccatacatattccaggttgcctatattttgagttatagtcctttctgtagaaaaacaaacacatttcccaggaatttagccagaggatatttgcatgtcaacaaccaacattatagggtcactccctcattcaacaaacatctatttagtgcctaaaagcatcaggagctagtctaggcaatgaggaccagtgcaccagacacaccaacttcttactgtcatggagtttacattctagtctccrtcaaaactgtttcttctcatggacaattaattggatcacaggctgaaccatatgcctgtggggctcttagtccttaggaagcttatgttttgaaatgtgctgtaacctgaaaaggtaggaagagacttagtttcaccttctttgctcaaagtagtaattttgggaaccagtgcctgattgttagacctaaatattctcttccattctgrccagaggcctctttacaaaaatcagtcctcctctgacattccagggtctctgtgtctctaagctaagccttgccacacgtgagttctgttcaatagaatgccatgaagggaactcaagagtgactcctttgagaggtagttgagattgacactctcytttttatgggytactccagtaggctctgaggtcagctttcagtctccaagaactcctgccaccacgttcctgtttaatatttttcagggggttccctattgcttagaatatgtactccgtagcttggtatgccaatgattcacaacccattccacctcatgacaggtatagaaaatgatgatatttttataatgtaccttggaaaatgaaagagactgtctttgaccagagatgatggacctgaagttcagcagaggtgacaacccaggctttcctggctgacccaaggaggggtgaggagattaacatctcagcatatctatctatagcccatctaccyaccttacaaggagtgaaaagctctgtgatgtgcagtagtctttataatgaagcaycaaattacatcttgctatcaacttttaaattactctataccaattgggtccaaaaacatttaagtagttcatttctaattctatgttatttacctttatccctaggcaccgtttgctaattgttctcctcattctattttctttcaaactttcatgtttctgctgtttctccacctataatgcccttcttttacctttctttggtgaactcctactcatcataaatctcatttcaaatgccactactcaggccattccaagctctttcaggcaaatttaggttgttccttcctctggctgtccaaacgtgcacacacacatacacacacacacatcacagtacttactgcatggttgcttgcactagttgtggaaagctgtagtgtagagactttgttttctatatcattgtacccttcacttggttcactgtagttcctgcctgcctagctcagagctcaatatatgtttttcttaatgggtgaatgaaagaatcaataagtggggaactggagaaattgcccaygtgttagatttgcatgagactttggataaggcttggaatcttattgtttcatgttctccatatgctgaaataacaatatttgtcttctctgaaatataatgccttaaaactcaaaatatcaagctgtcagaacttagttgttattatgtccatggtcaccctgccattaaactttagttgtcctggaaacatatattggatctataaatttagattaaagaatcttaccaacagagtttttgtgcatactgtgttgtcagtttcctctaatagctacttgtttatcacagtaatgtaaccgtaacagaactaagaacaaaatcatggaacctactcattcagcaagaccaggaatgggttttctgagtttgtgctgggtgagaaaatcttgtcaataacccaatgtcatttaagttctaactttgggatgctctttggtctaaaagtttgaggaaaaaatgggttcaaccacataaatgataggccatacaccaattttatgtagcatggtcattaagatagccaaaaatacggcaaactattagaagtgctatgcgttgcatttatactagctcttattttccttttggtggctaataggattctcatttcattattatttctcacattttccccttctagtgtttcaagaaattaccactgtagaatttattgtagcctacagtatagtcatgggtgtgtgacaatatgtaaatgcccaagcatgctacatgtgaattacgctgccatgttcacatttctaatcaggacgatgttttttagaaaatcatttaattatacttgaaaactatcagtcatgagggtcaaagtatttgatctctcttctctggtgttccaggagtgacacaaagtcacacaaaaggttgaatttttctctgattgttacaccatggcattcaagcaattttagaggtcaaactgataacagaacatgaaaaatctgcattatttttaatctatagggagacattttaattaaagttatgggtggtatttttttgcctgatgaatgtgtttcttaaaagcctgtgtacatttatgcatactgtatatagaatatctatatctatttatctgtaatatctatttatctatgtatgtatgtatatatctatatctatcaacctatctacctaatctattcatctatccatacttccttccatctgtctgtagacacacacacacaaacacatataaactcatatacctatacatatatatgtaatattagaaatatatctagaggtaactttacggtcatttgggctatttatgtctggttgttgtccacaggcttttataacagaggagatgattataatcacctttgccacagagacatttaagagattgatagtaagcatacaaagacttaacttccttgggaggtgatatcttttaaaagcaccatcttttcaaacatagaaatgccgacattttgtgtaaatatgttgcaacatttcctagcagtatattattccttctgcccagagccaacccactccgttcaacagcctatacacctacagactaattaagtgaattaatttgttttggaattaaataaaaattcttattttggacatatggatcatgtagatgccaaatggaaattatactggttaatgctcgaacttctgcttttaaaatactctactctctgggaggagcagttcaaattccagtagaccttttgagaaacataaattgaacaccatgtttattctgcaaaggtctttcagatgaagccttaaaaactgtgaagactccctgcgattttctctgaggacatgtcttcattagcatttcaataattcaaccttctggttgtgcctttgaaatttctttaatctttggcattgaaacacctaggatgtatattacgggactgtgaatctctgagcaggaatattattacgattatactaagcagatctgaagcaagccaggacactttctagcaaggatgactacaaatttgctgcaaaaatgatcaattaaaggccacttgtaagcgaaaagtaactttatatttttccttaaaagaaatatgagataattttatattttagtaaaaataaactttaaaattatgcaaataatacatgttcattatagaataatataaaatttattgataataagcagagaagacaaattcattcattaatttcataacccagttatagtaaccattaaaattttttatatattctttcagaattttcatatgtataggtatacatataaaaatacataaataaattttcttttaaattaagaagtaagaatatgcaaatagtaaatttttatgcaatgtaaatgtcccttggacattagcagctggtgcaacttaggaaggtcaccttaacagcttatatcactaggtgtccctgatcatctttcaaatagaggaaggaaacccttaagtctcttcaagagtctgtgctgaggtccaaaatgtgagtaagagaaagagaggagaatgctctcatatataaatcaaaccaatctctgcaactctggaatattttcgtctagctgttttcatcatccactgctgtctcttgttccacaatgatgtcaccagcaaacatcctggaccacactgttggtggtagtgacctcctttctctctctgtaatatcttgtagctttgttattaccaaactcatagtgttctcctgataggttttccattttctatccagctttcagggggtggtttgggagcagaggggctcaaatggccggtgccatagtgttcttttaactgatttggtaaagagtccccaaatatggtcaccaattattactgccattcttgttcatgcaagctgctcataacagagatgaactgtattttcctcctcttgaatatgctctggacttgtgatgtgttttgaccaatagaacgtgataaaattgatgttctgggacttccgaacacaggcttaagaaacttagcagctctcttttgcttcttcttgggactcagtgaacatactggaaggaagttcagcaaaaactagtaaatgcttagagttcacgtgggcagagttttctgagatctaaaggccatcacggatgtctcaaccctagccaagctctcagatacatgcatctacacaatgactccagccgccatctgtgaagccaaagaactatccagctgtgtcttgcccaaattcctgatccaaggaatcatgaaaagtaataaattatggtccttgcgctgtggctcacacctgtaatcccagcactttgggaggccgaggcaggcggctcacgaagtcaggagatagagaccatcttggctaacacggtgaaacaccgtctctactaaaaatacaaaaatcagccgggcgtggtgacacgtgcctgtagtcccagctactcaagaggctgaggcacgggaatcacttgaacccgggaggcggtggttgcaatgagctgagatcacggtattgcactccagcctgggtgatagagcaagactcagtctcagaaaaataaataaataaataacaataacaacaataataataaattatggttgttcacataggtaactgaaacaaacatacgatttttgagtcaagttacgtttggctgcacattttagaaactatgcttcatgcataaaacaaaccacatcacacattatcttctgtaacatggaagtatattttttgttcatataaaagaaatctcaaaataggtagcaaaggtgtactatagaggttttattatctggctcaaagcttcttccttctattccactttcttgacatggaatttttattccaaagtcacctcatgacctaacataactgctagaactccagctatcatagctacattccaggcagcaagaaagaagctgaggaaagggcaaaagagacaggctccctggctaagtcaatttcctgaaggattattcaggaaagtttgtgtaacatttccatttggccagaatttagtcacattgtcacatccagctgcaaaagaagctgggaaatttagtcttgtacaagaccactccaagcaaaattggggttttatacaaaggcagacagagagggtaggaaactagcaatttctgaaacggactctgtattcccagggcaatgaggcattgcagacactgatttaaagcaatttctcatagagattaatactttacataaacaacaattgtctctagtattcaggttctgcatttcagtgtccagttcatctctctctccttttgtttccattgatctctttgcaacacggcttctatggagactctctgttcatcaaatgtatcagtagatctctgtgttcatgaatgaatgggttcttttcctgtgaggttctgaaataaacttgcaatcacaggattaccctctccttcattggccctatatcatacagatgacctccaaraagtgttgcctagcttctaaatagcaaacacaagttggatctgaccccagttccctaaaaatgtttgtgttttatacaatccttaatttatggggaaatatcagtaacaaagaaactagatagaaaaaatgtaatatttaggtaataagggaaaatagaaataatgaagggtgagagagagagccagtcactgagttatttgcacttagcagcatctctttccctcctcaggttctttgcaccttctattccctctgtcagtaaagtctttccccctcaacctcttacccaactagttttcattaattttgggggttccagtgtaaacctacttcttcagagaggttttctctgaccaattgatctcaagtaggtataccttggatatctctcttacccatcccctttgttatctttcaaggcacttgtcataatttctaattctgtatccagctgtttatctgttcaatatctgccaccccctctggattacgagctcaataaggcagggattttgctgcctttttcactgctgtgttccaaacacatggtgcaatacctggtataccatagatgctcaatgttatttaacaattcatttgttaaatgagtaaacaaggaggggaagttcagagaaagcaaagtgaagagagagagagagagagacatgttagtctgagatctcagctgcccagcctgtttattttgtagccaggttattcaagtctgtatgtaggccatgcagagctggggtacagtcgaaatctcaaggtgggactgtcctgaggccaaaagttttctcaccccaggctaggctcagtggttcatgcctagaagcccagccctttgggaggttgaggccggaggatcacttgaggccaggagttggaaagcagccaggtcaacatagtgagacctcttatctctacaaaaaaaaaaaaaaaaaaaaaagcttcctcacccctgattttagacagatagacagaaacatctccatgctatacaataaggaataaaatcatggattttttttttttttttttttttttttttgagacggagtctcgctctgtcacccaggctggagtgcagtagcatgatctcggctcactgcaagctccacctcccgggttcatggcattctcctgcctcagcctctcgagtagctgggattacaggcatccaccaccacgcatggctaattttttgtattttttagtagagacggggtttcaccgtgttagccaggctggtctcgatctcctgaccttgagatcgtcccatctcggcctcccaaagtgctgggattacaggcgtgagtgaccacccccggccaaaatcatggaatttttaatgtggaatcatttccatgttctattgaattttctgaaacaatagaaaattattactcaaataataagaatagtaataataattaatattacagcaaataataaggaaatattattatccaaacttgctaggaaaatgttttgaattagtgatttgtccactattgtgcattatgacattgcggaaaatggcttatcttatgtcttgagatataagtagtggattattttgagaaatgcctgcctacacagtcagcaataggtagaatagacacctgcccaggctgtaccagtgtataaagctatcaaaacttcccagagggctgggcatctgccgcagagggtacagaaaaagggttgaaactagaaaaaattagagcaactcagggaaacaggaaatgagaatagtccaaggatccagaaaaaaggtcatcaatgaagtcagacttacactgcctcactagtcctccttcatgccaattcctgtaacccacaggtgtgcctctgaccatatcatggtttccttccccttctttctccccaggcctccaaagaagtctacaaattccatcagtcagtaacggcttggagttccaaagcttatgactcaaaggtgatyagagcatggacctggggctagtctggattggtaactgctaaacttggtatgttcttcagacgctgacatgagttaattcacagttttctgtccacacgtccattttcttgtcaccacatgatggagaacattctacacatcactgccagattaaccttccccaaacatttctttgatcacttcactcactttgttcaaaacgccttaaatgatccctgttatctgtaagggttcaaatgcttttagtctggctttcaagacccaccacaatctgaccctactgtgaattkctcctgctgctgaatcctgtactgtaaataagaaagattaaggagacagtttcctcaaaagtgatcaattttctaattgggccttcaatggttcggtataaaaattataattcatttcaataactgatcttgctggacgtgctacacatattaaatgttccatgcatttagagcatcaataatgttcagctgcaggaattatgcagaaataccttctatcttggcaagtayatgaagtagtaaatcccgtgggcagttgagactccttggtaaatttaaacatagtactacatccagaataatatagtgatctctcaccatgctgggtacratcatcagcagcaatgatttagaaaatgagaatgatttatatttttatttttgaacagtaaatcttttcttaaatttatggagggatttagatttatatagtaggctgtagtttccatcatgcagtagtagtcttaatggccacttttgaattccattcatctttacactcgccacaaaaacatttggagactaaaayaaagattaagatggtgacttggttaaaaatgcttaaagttttgagttttagcatgaaatatcagacccagatggctggcatttttaaagtagtgaaattcacctttcacgacacatggacaatatttcatgttgaaaatgagctacattaggacatgaatgctctactatcctgctctttcaaatataaacctatagatagattttataaatttgaaaatataatgactactctagcaaattagatccacccaaatttattattaccgcattttgtctatctagactttcttcagcagagtggttgacattatgagctctgttgtaaaggtgcttggaatcaaattccagctctcagtctttaccacatgttagaatgtagacaaattacttaaccactctgtgtctcggtttactcatctttagaatggggataaaagtagagatgttgtgagtattaagtgagttagtacatataagttgttagtacatataaatatgttagtacatataaaagtttgtacagagcatgtagaggatcaacaagagccatctatttctattgagtaaaattattccctttaggaagatgtaaaggggatggggaggggggatgccttcaaatgccttcagaggccacacaggtagtgaaatatgagaagggatttggtggtagattagtggagtctgcagataactgtcaagtgtgtgccctacttacttaaaaacaaaacaaaacaaaacactgtgtgccagccaaatacacagtgcttcttgtttattgaccagccttgtacaggcctttaggctactcacccatgttgacccctagggaacagaaagagctccaaaccacaagtcaggaggtgcaggctgtgaccctctcctccagcttctagctatggaagcctggacaggctccttacctatcttggcttctgtttccccactcaaaaggagaaaatagaggttccttctgtatcagaaactctatttaaatagagaggcaagaggaataataattgttaaaaycttttcacagtttaaaaaaggcatataaataggaaaaggcctgttactgtgcttaagaagtctgtacagtatgtggtggtccctaaaggagcgttccaacagaagctgaaaaggctgcctaaaggacgatgtgtcccaaagtctgaaggcagaaaggagcatagatggaataaaaggagcragagcagcccagatcagaggagccaggcagaaccttcaagaccagctatgcacaagagacagtaaggccacttgtttagttgaagtggaaaactaggtaatagcaaatgaaactgtccagggtgggcaggtgaaagtttcagaacctggtgatgctaagtggcctgagtatgcccaagttaacctttgggctatggtcmagtggacaacaaagccaacacatgcaagcagatattccagtctccagacattatcttctattcttgttcttctcaggaaaccaaaatttttatttgcttttacatcattcagaatttcttagttcctgaccctatctctcatttctgtttgtggcaaactgcattttycraagacggacatgctagcatacaactctcgtcctacaggctctatttacagtgtgactgctgcccctcccaccaagaggtgggggccatgttccctccaaatctgagtgggggcttctgtctgctccaacccgtaaggtagggcaacagtaacttcttccrtttgtgtctctcccttaggatacatggcttctgatggccctgctggggagaccatgtggagagatggcatagagccagagattcacgttccaggagccctgactgtctcatctcagggaattgaatctccttgtgctccagaccctatgagaggatgccatcccctgctaccatctgactgcaacctcaggagacaccccaagccagaactgagcagccaagccactctcatattsttgacccatagacattgggagataaaaactgattgttgtcaattttagtcagtacattttagggcaatttgatgtcctagcaatagactagtatatttatccattgctgcatcttcttctgcttagattatgatgcatgttttttagctccaactagtatctaaacttgtcatggtctttgcttgaaagtttgattttttgctgcccttgaactttacccctgattccaatttacccatttgttttggtttagtttaaggagattgtaaacaagtatgcctacaagggccatgcaacaaatgctaaaaagagaagtagacctgggcagggaggcaagggagcggaaagatgtgtagtacgttcagctcaggtcacgttcatcatccagctctggaagatggatccagtgggcatgtgtgcctaatgatgccacattatctgatttttttctccaaaagaaaaatcaagatttttattaaaaatcttctggtttaaaaaaatttaaatgctattcaaatttcaataacaaccatgccagataaaaaatagctactgactgaacttagccatgatctgccaacttgcaacctccaaattagaagtttttagccactatggatgttaggaagacctgaaacacagaatagagagattccaatttttctagtgacaatgagtcctgagaaaggtgacaaaatcagaataacctttggagaaagataaatgctactatcagtggaatgggattcagtcttcagcctgttgtagtaattcagtaagcacatgtggtcattgagtgaactcgcatggccaatacaaggtaagcttggcggttccttctatgtcaaacgttctatttaaatagagagaaaagaggagtaataattgttaaaacccttttgcagttttaaaaaggcatataaatagtaaaggaccagttaccttgcttgagaaatttgtacagtacctagttgttcctgaaagagtgtactgacaggagctgaaaagcctacctggaagagaatatggtcccaaattccaaaggcagaaaggaacacaggttaaatagaaggagcagtaacaacccagaccagagaagccaggcaaagccttggagactaggtatacataggagatagcagttctcaattcccattccctttgtgccaagcacaggcaccgtgatccttcactgaagctcagtgaacactgttctcagagagaggtcctgtcagcatccacctaccgaaccatcaaatgtgtatctgtctcagttctgcttgggagcctgatacagatctttccatcactcatgaaggccctagaatgcatcctctttttttttttttccttctggaaaatatcaaccagttttggtagattttacctttccattctctgtgtccctccattattttggtcaactcacctctgaaaacagcaaagcctctcaggtctaccgtgggacacgcagaattacaagctgagctaccctctgggatggaagcaggggtctgggagggtggcactaacgcttaatattattgagttaaaatctcaataaattatcccagtaaatcatacaatcagaaagacaaagtccttgccaataaatatgcacaactctctgcctagagacaaacccaccttgagttcactcacgcaacccaatacccataaactactctccataaagcaatggaaaagaggagctgaggttaacaaagttctttcagcctacccacgtaggctgacatttatctgcatgcatagaactcacaacatttattgtagcagagtacatatttcagaaaactgattttgctttttcctatagctgataacctggaaaatacagtcatctgtactctgtctcccaggcgatagtgcaaatcagtaaagagtttccattgatggttcttttgcagactctaaccacaattgaactctctgctttccatcagtcgcccaccctgttgtgtacaaagaagcagatatgcaatatagcaggagccccaagaaaaggtctggctgttctgtcaaaactatttagttcaatattgttctcaatgtggcaccatagccctggacatgacacccagcacgtccaaacagacatgattatatatgagacagaaaggcacttacatcactgcgggttgttatgctttaaagggctttttcccccctcttcaaattaaaagttttcaaaaatgaaataaaaataaacctttgaagaaaccagattgagactgaatttggaaggccctcctgcctagtgtatactaaagaaacattttctgggtttgtccctgatgattttccttgtagttgagaaacacaatccactggaagcttttgtggcagaacaagaattttatgaacacgaactttacaaagacttccctaggagatttaaggtctggaaatcaatagatcaatcagcagcttttatcaatctataatggttctctctctttggatgtttggatgaaaatgggatcaacgtaaattgaacatggaatcacttattcttacaagttaaatttktcaaactgtaaggcacataaatgacatgaaatgtaatcatttttgaatttgggaccctacagggtgcacgttgattgaagaaaaaacaagcagatgttgcttcagcataactcatagaggcaatctaaatgttcttcaatccctgacacttctgatcgtttcccaaataaaccagttcattagttaattattgggtatgcttatcgtgtaatatataattggcccagggcaaatagccttcaaagatggctggctgagtttgtagaatctgtttttgccaaattcttcccaaggaaataaggaaagattaatgagcactacctcatgttgcttccactttatctttaatgataaaggcctcagtgcctggaacctcttcttcgttataaagttagcttggcaggtagcttatgggcaaaagagttaggagaaaatatgaaaattatgttgggaaataagagctatttacccagtttctcctaaagaaaagcagatagaaaaatcaagttgtatttatatttctattttttcagatgcatgaagatatatgggatggaacgtacctcgtttccaatggtaaagcttttaaaaatgttgttgaaagcatcagtgctgaaagattacctcatactttaccagcttatcataatccctgtacagtataaaaataacaacaatgaatacatattgagcatttcctatgcacttaacacacattatctcatttaatttttacagcaaatctcaatcatagttattattttatcttttcttagccttatatgttataggtgagaaaatggaggcaccaaaaaattaaattccttataaggtttccagataaattgcaaaatgcccagttaaatttgaattccagataaacaatggataatttttttaggaaagtctgtcccaggaaatatactaaatatagtcatctcttcatatctgtggggattggttccaggagccctgcagatatcaaaatccagggatgcttaagtccctgatataaaagggcatagtatttgcatataacctatgcacatcctcctgtatactttatgtaatctctaggttactgtaataccaaatccaatgaaaatgcaatgtaaatagttgctacactgtctttttgtttgtcttttttattgttgtattcatattttataatttttaatttttttcctaatgtttttaatccatggttggttgaatctaaggatgtggactgacagtatattgatatactaaaaaaaaagtacccattatttatttgaaaaatcaaatttaactgagtgtctgacacttatttgctaaatttgactagttgttagcaaagccaaacagatctttctgatacccaagctaaacatttttaaccgttacactaaactgcctttttccataaaaatagtttgaaaactccaaatttagcaaaggattttatttatgtagacagagaaaacagcactgaaagtgggacatattaagctcatttatagccgtggtctgatgggcatttcttttgtctgggcagtggtagaaaaaggtgtgggaaagtaggaatcagccaaatggttgaagataggagcactggtgatatttgtctcctgcctgagaaggaatgagtgcctgtcatgaaatcagcaaggtgacatgctggttatggtggcagcgcttccagcagtgtgtcaagctcaggcatcgctttgattaaaatgccaagtgctgggacctccttcccctaccactcccacttctccctgcctcttcctccttcccctaccactcatacctctccccgcctctacctccttcgcctaccactaacacctctccctgcctcttcttccttcccccaccactcataactttccctgcttctaccttgtagttagtgcatgtccttgagcttgactcccaaaacagtatacagagaactatggtgaagaagttaacagtaaaagcacctgagtctggctgcttggtttgatctcctagtgctaccatttctttgtgccccaatttccttctttgaaaaatagagataacagtacctatgtctataggttttttgaggtttaaattagctaatacacgtgataacaataataataatcatgttcaatgaaaaattgtcttcctgccaatcactcatctaagtgaaatatttaaattattcagtccttaccaccacattaggaagttggtgttattatcatctcactttgtggaggaggaaactgaggtatggatgggtcaagtaacttgcccaaagtcatatagtcagcaagtggcaaatgtagaatgtgaattcagacaatctggatcctgagtctgtgttgtcaatccttaccctgcacacacaaaatacactaaggcaagtgcctgtaccccagccagcccacactgccttttggtgattactgtaaactggcaaggaggagtttgggcattttcctctgattaccttctttggccataacacagatcgcacccgtgaaaaattgctccatgctcttctacatccaaggccactccctatcttctgggaggcaccttgggttcctctgactccctctattccacatccagccagtcaccagatcccacagatcccaaagcactttttctctccgttcccggtgtcctggccttggctccagcctgaaacacttccctccagcctagctcaatatgtgcctgaaaaatgtcggtgtcttattgacctgctccaatccctcctccacattgccaccagaacatcctcctaacatagaactctgaccatattgttcttccacctgaagtccttttatgactcttcagtggcttcaaagaaatccccaagcttcttagccgagtcatgcaaatgccatgacctgcccacttatctctagctatttccccatacagactccatccttcatttccactctactctttcatttgcttaaacctgccatgttcttttattcctccatgcctttatgatgctatttgttccccttggaaagaccttccctcttttttggttctgcctgttaaatccctattcatccattggaactctggccaaggaccatgcagtctgggaaactttctctgttaccctccatttcactcacagaatctgagcttcatcgcctcccttcccactagtcataagtgtgttaagggaagggtctatgcgttatttatcttggtaactccagctttgagtggacaagctagttaaatagagagtgattgctttgccattattgacacagccttaataactacctgcctacaaaacaaagctaaatataaaaaccctcaatggcaaaaacaaacaaacaaacaagcaaatataatggaactagaagatcatcagattaaactcttttctttcaggggattctaggaatgatgtacatgaagaataagactgtgtatccttttcccatagttagaaaatgaacaaccatctaaaaaatacaaatcttttgtactgataaggccctcatatcaatcattcaggacctaaaactgagacattaaagcatataaatatttacaagaattctgcataaaggcagaaatagctggttatttctaagccttagaaggcataactataaatatttttcacaaaggaac

SEQ ID NO: 6773 - DNA, 32343 bp, Homo sapiens
tatcctgctttaaaaagactagatggggctgggcgcggtggctcatgcctgtaatcccagcactttgggagcccgatcatgaggtcaacagatcgacaccatcctggccaacatggtgaaaccccgtctctattaaaaaattacaaaaaaattagctgggtgtagtggcacatgcctgtagtcccagctacttgggaggctgagcagaagaatcacttgaaccaaggaggcggaggttgcagtgagctgctatcgcgccgctgcactccagcctggggacagatcaagactccatctaaaaaaaaaaaaaaaaaaaaaagaagactagctaggctgggtgcagtggctcacgcctgtaatccaagcgctttgggaggccgaggggggcagatcacaaagtcaagagatagagaccattctggccaacgtagtgaaatcccatctctactaaaattacaaaaattagctgggcgtggtggctgaagcctgggcatggtggccaccgtgaccagccatggcccgaaccatcttaagattccatttggatgccccattttagtggaggtgggtgagaattccagaaagcagtgctgtttctggggagtgaggaaattaaagaccacttttctggtctttgggtctgatgtgagagctgtggaggcaggacacagccggcatcctggctttctcaggctgagattttccaagatcaggaaaggatggaatttctcaagatgcccagtacttgtcaaattgaagatatgccaaaagagggtcatgaaagtcatggaatactttaaatgttttaaatgtctacatttaaatatgtttaaatgtctatgcttaccaaaccaatgcatttaacacacattaaaaagcagagcagagggctgggagcagtgtgtcatgactgtaattccagcactttgggaggccgaggcgggaggatcacttgaggtcaagagcttgagaccagcctgggcaatatagagagaacttatctgtacaaaatattttttaaaaatcagctaggcattctagcacacgtctgtagtcctagctacctgaaaggctgaagcagcaggatcccttgcccaggagtttgaggctgcagtgagctacgatcatgccattgcactccagcctaaggcacagagtgagaaaaaaaaaaacaaaaacaaaaaccagagctagctgggcatagtggctcacgcccataatctcaacatttggggaggcccaggcaagacgatcatttgagccccaggagtttgagtccagcctgggaaacatagcaagaatttgcctctaaaaaataagaaagattttttatcaagcaggataaaaaaaggaaaaataaagagtaatatgaagaacaagtgacagcaactcctggacaaaccaaagctggtattggctgcatccttgcaggcagtgcgtattccccacctccactgcatcaagcccaagaaaaaggctgaaggggatgctaaggaagttaaagccaaggtgaaggacaaaccacggagaagatctgcaaagttatcactaaaactgctcctccacaccagagccaaagcctaaaaagcctctgcaaagaagggagaaagaggtactcaaagagaaaagggggaaagcagatgctggcaagggtgggaataaccctgtctatctaatgctgagaatatgtaaaggagtaagcatacagtcgggggaagaattacataagatgcctcccctcaaaccctccattggttcttcaggtcaccaaaaataaaagctaaagtcctcacctacaaggctttcaagatttgcctcctgttaagagacaattctccatgaagctctttgatttttgcacttctttcaaacagaggtgccagctgcctttgtttggactatcttttgaaggacatttatataatgaacagccttggaagacagtgtccctctggtgcaggggacaggtctgtatactgcccagtgtcataccatttcccactgggtcagagttcaggcaggtccgcttgcagccattatgaaagatttgggttccctaagttctgggttcctcagctgtgttgcacaccatcgaatgggcagtgtccattcagactgctctgtgtcaccccattgtcctcagaaaggaggagggaggaaggggcaagtggaagtaacacaaacaggaagttcatgctgctcgctatgccggaagtaataacatagtttgtctctgatccaggagtcctgtgactgccagcatctgagactgtgtcaggctaacctgttaacctgcaagttaggtagaaccccagaacctccacagttctgaccacaaacacctcaccccatttcctaccactccttctgttgctcaccttgcctggtcacactggcctcccagatgttcctggaaactgccaggcacactcctgccttagggcctctgctgtcagcctggaacagtctaccctgacagccatgtaatgtccttcatgttcttatccaaatagcacctgggtggggcctttcttgacttctgtatttgatttagttaattaattaattaatttagagacaaggtctcgctctgttgcctaggctggagtgcaatcatggctcactgtaccctcaacctcctgggctcaagcgaccctcctgcctcggtctcccagtgttgggattacaggcataagccaccatgcccagtctgacttctctatctgaaacagccttcccaccaataaactggtgaacttttgccaatctgacaggtgaaaatggtatctcagtaagtttcaaatttatcttttattttttaaaatctatttctatttcagtatagatataactatacagagatacatagacaaataaatggatttatatattttctatatctattattctataatatctatatttatattttctatagtatctatatttctattactattttattatgcttgagtcatttttgggccaggcgcagtggctcatgcctgtaatcccagcactttgggaggcctaggcgggcggatcactggaggttaggagtttgagaccagcctggccaacaaggtgagacctcatctctactaaaaatacaaagaccatgtctactaaaaatacaaagattagccgggctcggtggctcatgcctgtaatcccaactatgcaggaggctgaggcaggagaatcgcttgaatcctggaggcagaggttgcagtgagccgagaccgccactgtactccagcctgggtgacagagtgagactaggtctcagaaaaaaaaaaaaaaaagaaaagtcatttttatttcctttcctatgaattatctgttctgaactgttgcctattttcctattgtgttgttagtctttttcatacttcttacttgcctatgatgtgattatttttctcaacttgtcatttgtctgagtttgcttatggtgtcatgattgttgttatgccatataagtttttaatttttatgtagttaaatttgtcaatcttttcttttatggcatctacattttcttttctttcttttttttttttttttttgagatggagtctcagtctgttgcccggggttggagtgcagtggtgtgatctcggctcactgcaacctctgccgcaggggttcaagcgattcgcctgcctcagcctcccaagtagctgggattacaggcgcctgccactacgcctggctaattttttgtatttgtagtagagatggggttttaccatgttggccaggctggtctcgaactcctgaccttgtgattcgccagtctcagcctcccaaagcgctgggattacaggcatgagtcaccacgcccggtctggattttcaatcatacccagaaaggtcttctcattgcaaaattataaggaatccatgctttcttctgtttttctagtacctttatagtgtcatttcaaaatacacacatcttttcatcacttgaaacttgtttagagtaataaacttttggagattcaacctgtaggtttttttgactacccaattgtctcaaccccttttattatttattaatttatttaacaacacataacagaatcatttattgaaaacagtactctggaaaaactatgtgcacaacaatgcctgtttcacccattttacagtgggtacatggtggtctggggcattcgtcaacttgctcaagcctttaggtaagtagagtttgcggcttttctgagaatctgcctgcatgttccctccttccccagcctcccaagccatcctgtggttcagacacctccacctcgtgcagccaggctctcaacaaagccagtaatccaatgtgttggcttgcactgggcttgcatctgtgtctccaggatgcacaaggggttccaagccccatggacacattgtccctggtttagctaaagctggtgagaagcctcagaagtggcctgacacctttctgtgacaggacagggttcaaattcaacatctaagaccccaggatgagcggagggtagagggtggtgagcttgcccactcagctccctgagtattgctggagtcccaggtgctactttagttttatttctgcatgtactttagtcatttctgtactttgctctgttccattgtgttttttttgtgtgtgtgtttgtgcatgtgcacgcacaccagttttaataacttaggctctataatatgttttaatatccaacagggttagttcccacctccttgttcttcattttgaaagcctgtttctggactagttttgtttggttttctatacgaattttaggaacaaatagggtaattaaaaaaaaagaacgaaaccacacacgacctattaatcctattagtacttttattgggattatgttaaatttaaattttactaaaggagaattgagatcttcatgaacccacagacgtcattcatctttccattagactgttttatttgtaaaatgagagtaataatagtaccaatctcgtgggactgtcctgagaattaaatgagaaaatgcatgcgaaatatactggggtgaacacgttgctttgccacttagctgtgtgaacttgggcatggtaggttattctgaacattgctctctcatttgtcaataaggataatactagcatctggagtcacaggactccaatgacggtgaaattagacaaagcgtgcaaagtacccagtgctctgcctggaacataagtgcacaataaatattagctgtttttctgtttttctaaaacataggccaccccagggcaaggaagtgcgactcaaagcaaaagcagctgggcgcggtggctcacgcctctcatcccagcattttggaaggccgaggccagcggatcacttgaggtcagaagttcgagaccagcctggccaacacggtgaaaccttgtctctgtaaaaatacaaaaaaattagccaggtgtggtgacatgcgcctgtagttccagctactcgggaggccgaggtatgagaatcgcttgaatccgggaggtggaggttgcagtgagccgagatcgcgccactgcactccagcctgggcgacaaagtgagactccgcctcaaaaaaaaaaaaaaaaaaaaaaaaagcaaggaagaaaaaaagcaaaagcttggagggatccacctcaagtggagggccccaaggtcaactcatctttcccaggacctatgtcaccgtcggtacccacttctgactttcctggtgcgtctggaatgggaagccgcgatcccgagtgtaccaggccgctcagggactccaggacccagccccggacccagggttccggcgctgccacgtctcgcgcggtcagctagccagacgggagcaggcggggccgaggcggggccagaccccgagcgcgctttgtcacgccttatgcccgcccctccgcggcccgagtcgctggtgggacggcaccggggcagagaggcgtaacgctgtgagggggcggggcccattacgcgcccggaagtcccggggaggggtgtgacgtacatccggcgagtagctggcggtccmgggtgctgctggttagtgtgctctgagggagggtccgagcyagccgctgttttgccggaggagcccctcaggccgtgagtctgagggtcgcgtcggggaggggagttggggctcgaggggctgggacggaaggcggggaggtcggagcggaggctggccctggcggggttgggggggggggaagtgacacgcaggcggttctgtggggccgcggggctgattctgggcggggacgggacaacttggccagatctgctccgtcccctgctgtcctctttgcctggggtccacttgcattccgctcgggggtctcgcagctgctgggccggataacagtttcttgtctgtaccgtgcgctccggtttacgaaatggctccatgtcctctgtctcggaagagcctcacagccctcggtgaggcgggtgggagccctttatgattatccttgttttgtagactcggagactgaggctggccaaggctccgcagttagcgaktgtgagcgctcgaacctggtctacaggcccctagtccagggcttacccccaagtcagcgcttggttgtcttccgatggcccgggtcgaaccctgtattttctccttctcccttccccttttcccctgtctggtctctgcatggaaaaatttccttatgtgcatttgacatggattagcgttttcttcacgattctagccagtgggtcaggagcatctttgtcttgttgattccatcggcttcggttgcgacagggggcttagggagattcgccatggggctgacctttgacatttaccccgcagctaagcagagttagctaaaagccagccgcctactaccccaaatctgcctggaatggcgtcttaaagttgccctgattatgtataacaagtaatgcgtaaatttttaaattggctaatggtcagattggtgccctccttttctattaacatttgtttgaatcatttagccctggaattcgcaagttttcattttaggtacattaatagtgttttgttgatagtttagagacctaccttaaattttagattactcttaacttctcgtaaggtggtacaatggaccaagaatagaaaataaatagaatgctagttattaaaataccattcaaaagatgtgatgagttgtaaggaagagaacttcggaagatcatcctctgtgtagttggtgggttaaagaagttttagtttttttttttttccccagcaattttgtggtttgggtttgamttttatgtactgttaacaggaagagcttaggctttggtgttagagatgagggtttaagccctggcactattactttttcaactgagccgtcttaaaggactcagcaaaactaggagtatcctcatctttatcttgttaaatgaggccagtgatccttgcctggtagggttggtgtggggatgaaatgagatgtacaagtactgtgcagattgtaaaactactgatgagttggtacaaatcctaagatcttaaggagagaggagccaccaaggccattttcagctgctgaggaggctgaggtgggaggatctcttgagcctgggaggttgaggctgcagtgagccatgatggcaacactgcacttcagccttggagacagagtcttggtctgtcttaagaaaaggggggcgggggcattttcttaactttgggtagcagtgcaacccgactctttggatctagtaagggtttttattatttttagctcacctgaagagtttcttcagtcagcctccactctcatcactcctttacaacccaacacttctatatacatttgtactacactggttttcagtcaatactttacagacttgtaaaaaatgtttacatcactttagaaatttttctttctttcttttttttgagatggagtttttgctcttgttgtccagactggagtgcaatgtcatgacctcggctcactacaacctctgcctcccgggttcaagtgattctcctgcctcaacctcccgagtagctgggataacaggcgcccaccatgcctagctaatttttgtattttaagtagagatggggtttcaccatgttggccaggctgatctcgaactcctgacctcaggtcatccacttgcctcggcctcccaaagtgctgggattacaggcatgagccaagtattttcaactagatgaattctgcaaaggtgaaaaggagaaaatgccacactttaaatagtttttcatggcaattgaactactttaattttccattttattttcctttgacactcctgcttttaagccatctcctcccttggagcatacaaatcagcagcagccgggatttagctacttggatgctttaattcttccctccaaaatgatctgagtgggaatgaccttaatgaggggtgtgctctaaaggtgagctgtgcttctccaggcagtagattgagaaaagtataggaggatgtttggtttgagggagttgcagaggaagggcacattgttcttttacttatttacagtaaatgggaatttcagcacaggagctttattaagtatatttaagttgttggactccttaaagtgcggactcaatttccagagaaaactattagttaatgtgataaatgcagtctttctgctgaaatatatttgttattgaaaaggcaaaaaagaaatcacctcatttagtattttttcgtaagagcctagtatgtatccacccaaactgccaaactttatttggctgtctttggtaagggccgtgaaaaataaatattaattaggccctaaaatttacagattaggccatgggcctgataaaaacccagtaattggatgaaaaacataccagctctacttttcaatttactcttttttttttttttttgagatggagtcctgctctgtcacccaggctgaagtgcagtggagcgatctccgctcactgcaacctctgccttcyaggttcaagcrtttctcctgcctcagccttctgcatagctgggattacaagcaagcgctgcygcgcccagctgttcattttattcttcatctggcattmtttgaatgtaaggggatttttttgtgggtaatgcttttactggttactgttcatgaaaattttgaatgcagttggtcatatctagtataaagccctgtgttcagatgctcctgctgatggagaggagtaaaagtgtggaccttccatttttctgcaccrcatctgagatactaaagcaaaaattcagcatggccagacaatgctgagaaaccttaagacccaccagtgtgtctagatcctaccctcttaatttcattcagaggtcattttgcttattaccaatatatgtaaaccttttagtagcttttgatagctatgagaaacaatagaaaaagtagtgttaatatcagtaccagttaagttatttactggcttgggaacttactgctatatcctgaaaagtattctttttttgcttttttgtttcttgagacagggtcttgctctgccacccaggctggggtgcagtgacacaatcatagctcacggcagcctcaaattcctgggctcaagcaatcctcttgcctcagcctcccaagtagctggaactacaagcacgtgccaycatgcctgactaattttaattttttttttttttttttgtagagatgcaggtctctctatgttacccaggctggtcttgaactcctgaggtcagggaggaatcccccacctcagccttgcaaaatgctgggattacaggtgtgagccacgggggcccggcctgaataagtattcttattttaagaaaatctatttgtaaaatgagtttgggtgtgattattcatgtatgaaaagattctcttcttatcccttaatggttctctaaaatagtgatgtcatttctttttataaattgagacccgtgtctgcaaaaatgattaaatattgagatarcattggtaaatggagcagggcaagtggtgctggccagtagaattttgggtgacttttgttttttagagttgtttacaggatagattaatatgtttttcattcaaatcaatgtgcttttcattsttattttctatttagtgcatctaagtggcattctgattcacattattgataagactgatttcctagagttgttcttcactggatgacagcagtcgtatgtctagggaatgtgaatgaaccgctgcctggaggagtaagtcacacagtaaaagaaagtgtaggcatacctcggatatactgtgagtttagttccagactactgaaataaaacaagtacagtaaagcaagtaacacgaatattttggtttcctagtgcacataaaagttacgtttacactatactgtagtctgttaagtgtacagtagcattacgtcttagaaaatacgtaccttatttaaaaaatactttatggctaaaaaatgctaacaagcatcggagccttctgcgagtcataacctctttgctggttggggatcttacctccatgttactccacgttgatagctgttgactgatcaggttgatgattgctaaaggttgggatggctgtggcagtttcttaaaataagacaacaaggaagtttgttgcatcagttaatgcttgttttcaagaaagatttctctgtagcatgcaatgctgtttgatagcattttacccaaagcagaatttatttcaaaattggaaccagtcctcttaaaccctgctgctgctcaagtaagtttatgtaaactcaagtaagtttttgtaattttctaaattgttggtgtcatttcaacrgtattcatagcatcttcaccaggactagattccatctcaaaaaaaccactttttttgcttatccataagaagcatctctttatccattagtttgatcatgaaattacagcagttgtcacatcttcaggctctacttctaattctagttctcttgctgtttctaccacatctaaggttacttcttcctccaaagtctcgaacccctcaaagttttccacgagggttggaatcactgtcttcctaactcctgttaatattgatattttgacctcttcccgtgaatcataactgttcttactggtacctagaatggtgactcctttccaggaggttttcagtttactttgcccagatccagcagagaaatcagtctatggcattgatggctttgtgaaatatatttctttttttttttttttttttgagacggagtctcgctctgtcgcccaggctggagtgcagtggcgggatctcggctcactgcaagctccgcctcccgggttcacgccattctcctgcctcagcctcccaagtagctgggaccacaggcgcccgccactacgcccggctaattttttgtatttttagtagagacggggtttcaccgttttagccgggatggtctcgatctcctgacctcgtgatccgcccgcctcggcctcccaaaggaaatatatttcttaaatgaaagactggcaaatcgaaaatactccttgatccatgggaagcagaatggatgttgttagtagacattaaaacaacattaacttctttctgcacctccatcaaagcccatgggtgaccaggtgcgttgtcaatgagcagtaatatcttcaaatctttttttctgagcaataggtcttcacagtgggcttaaaatacttagtaaaccatgctgtaaacagatgtgtggtaggcagagtagatttagtataattctttttttaattgtaatttttttaattggaaaacaaatacacaacttggaatggatttgaggcaaattgtgccataagcacattttctttaagtggctaaacaaagtttaaaaagcaagtaacagtaaaagaaaatgtttctggtacaggaccagcagtacagaaaaaacagtgtgtgaggtacctgggagtacctggataatacacccattctgcagtagtgcaacttttaagtacatattgttggctgtccgtagtccacacagagttacaactccatacttcaacaccatgctgacagttcctaaagaaaactactttaaaaaaaggcataacccggatgttcccttatttgaccaactccacctaagtttagatgtgcagaagggcttagatatatccggagtaagccacaggcaacatgttacttcatcagttttctaaaataaggtttcagggcaatgacagtaagggaagaacacatggaggaatgaagtcctgattaccatacatgcatatttttttttgacagtagggagaagccttttacagataagttacaaacaaaaggcaaataaacagttttgtgcaagaaatttaacacattctgtacaaggtcttcattatgctgtcatcatttgtacaaactcatagtttacttgaccatcaccatcaggatctgcttccctgatcatttaatcaacttcttcatctgttaacttcactccaaggtttgtcatcacatggtgaagttctacaccactaatatagccattgccatccttatcaaacacacagaatgtttctctaatttcttcttcactgtctgtgtctttcatttttcttgccatcattgtcagaaattcagggaagtcaattgtgccattaccatcagcatctacttcattaatcatgtcctgtaactctgcttctgtgggattctgcctgagacctcattacagttcctagtttctttgttgttatagttccatcaccatctttgtcaaatagtgaaaaaacttctttgaattctrcaatctgctcctcagtcagttggtcagccatgctgcaagtgctactggtttccgagacgcaaccacacaaccactctgctcgctcacttgctccacttggactgatttagtgtcattcttcagggccctaggattttcaaaatggtaaatgagtatgggtcctaggattttcagaatggtaaatgagtatgggtcctaggattttcagaatggtaaatgaatattggcctcaacgtaaagtcaccttgcattagcccataacaagagagtcagcttgccccttgaagctttgaagccaagcaatgacatctcccctctagctatgaaagtcctagatggcttttcaaatagaaggctgttttgcctacattgaaaatgtgttgtttagtgtagccacccaccttcatcagttatcttgctgcagcttctacatcagcacttgcttttttacctcgtgtttttattttattattattttttatcagcaataaggctgtttcattttcttgacgttcatgggtttgctggagtagcacttttaattttcttcaagaacttttcctttgcatttacaatttgggtaactgttgagtgcaagaggcctagcttctggcttatctcaggttttgatgtgtcttcgtcactaagcttaatsatttctaacttttgctttcaagggagagacctgttactttcacttggagaatagggaggcttggggtgggggcaggactgtggaggaagtcaagtttgctgtcttctatggttgtggtttgtggcacaacaaaacaattatactagtaataccaaagatcactgatcatagatcatgatgacagatataagaataatgaaaaagtttgaaatattgtgtgagaattaccaaaatgtaacatagagacatgaagggagcacatgctgttagaagatggtactgatacacttactcaactcagggctgcttccaaccttcaatttgtaaaaaaaccagaaaacctcaggatccacaaagtatcatcaaatgaggtatgcctttatatttttaactcctagttctctgagtatcatagatcaaaaactattaggaaacaagttatttttgcacatataaggattctagactctcctccagattgcaaaatctgtgtcaagaaagaatattagtttctctttactttgcttcctcccctccccttccatcccctcctccccttcccctcctcccctccccctcctcccctgccccgcctcccctcccctctcttttcttttcttttcctttcctttcctttccctttccctttccctttccctttccttttccctttccctttccctttcccttccctttcctttctcctgtcctgtcctgtcttttttatcagagtctccctctgttgcccaagtgagtgcagtggcaccgtcatgcctcactgcagcctcaaacccctgggttcaagtaattcttctgtctcaccctcctgagtagctgggactcttggtgtgtgtcattatgtccagctatttttttagttatttgtagagattgagtccagctttcttgcccaggccagttgtgaactcctgggctcaagtgatccgcctgccttggctttcccaaatgctgggattccaggtgtgagccaccatgcctggcctgctttcttattcccgaaaacaagagactataaatgtgcatcatggctagggaacaagagttaacctctccacaattgtactgtcattcagaaagctaatgtttgctactttcatattttatacaggtagtaagcattaataatgtctttcatctttgagtggatctacaatggcttcagcagtgtgctccagttcctaggtaaagccatttccttgaaatayaggtttcaaagtttgtgcctttccctcagtaatttaactacaaataggctttggtctgtagagagcaaatgtgttaacaatttttttctcttttaggactgtacaagaaatctggaaaacttgtattcttaggtttggataatgcaggcaaaaccactcttcttcacatgctcaaagatgacagattgggccaacatgttccaacactacatccgagtaggtttgaaaatatcaggtgaccttttgatctttaaaggtcagtgttaggcgtggaggatgaatccctagttggtggagttcttttattaactgaagtcccaaaagccaactcatacgagaaagttccctgtaagacacactcaggttatgtactttcagatctaaacctctggaactttgtcattatctgttgtcactggtcctgtaaagggacacctctcctatacctacttctaagaagtggaaaatagcttggaagaaaagaaacctttggcttttagaatagtttaagaacattwsacccttgtattccttttctttgttgggagtggggcgttgcctgggmtggtctcaaaaatcctgggctcagattatcctcctgccctcagcctcctgagtagctggaactacaggcgggtaccaccacactcaacttcttgtatctttttctttacaagatgaaagcattgatattggcttatagtactagtagttgggggttgttgagttgacaagtttttttcttctttttaaacaatttttcagcatcagaagagctaacaattgctggaatgacctttacaacttttgatcttggtgggcacgagcaaggtaagtgatgactcagtggaaagcatgtttattgacttattttttttgtgcctcccagctccttttaaaagcagtgtgtcatttttaccttttaaattacttacattttagaattaggatcttattactttagtgaagttgttttattcatttatttttttaagtaatttcaaacttgtcaaaagttgcattaaataatacacagaagtccccttcaatattaccctattgagctgggataaagttagccataatgtataactattcatgaacttttaagtatttgcctgatatagccaaactcaactcaaatcttgactgaaaatttttacaaagcaggacagcatcttgccattttaatctttactacatttttacttattaatgtaatttaccttgtaactggaaaatatgttaaaagatatatgtattgcttcaacaagagtaattatttcatcattttaactaggcttgccctaagccagtatattttcttctataccttttgctcaaatttgttagtctcctcctccctacataatrcatattaatgcttattttttatgaactgtttgtgagcatatcatgcccctttactctttaatactttagtgcctcttctttatataatacatattaatgcttgtttttaatgaagtgttggtgagcatatcatgcccctttactctttaatactttagtgccattttctaagaacaaagatatttccttgtatataatcataatagttatcaaatccaggaagttttatttttatccactctgtatttccttttttttttggtcagttgtcctgataatctcttttataccatttttttcatcttgaccaggtatacggtatcatatatctagttatgaagtcatttttgcatcctttattcaatggagtgaaagtatgtaggaaattaaatatttataagtaatttcagacttgtcaaaagttgcaaaagtaatacagtgactatgtgtgattactctgatacaagttgatattttgtatattctatccatttcagacagttggtggaacatttccttctacctttttgctttcctcagaagtgctttttgcctactcaggctatgtctttggtttccagattcctatcaggtgtttagagacatacagagtgtcatctttgtctgatgggcactcagttcacatttgacaagaccgtaggtataggagtaaaacatttaagatgtgagaataaatattctgggaaagtagggaaaaggaactattgagattctgtcagatttacttacttgttattacactgagtggagaagtcttgttttgaaacattaggttgagctaataccgtttttttcttttttttgagatggggtcttgctctgttgcccargctggagtgcagtggcacaattttggcatactgcaacctctacttcctgggctcaagcaatcctcccacctgttttttgtagagactgggtttctgccatgttgcccaggctggtcttcaactcctgagctcaggtgatccacctgcctcagcctcccaaagtgctgggattatgggtgtgagccactgtgcccagcctaatacagtttttaaaaaatgtatagtaaaatataacattggtcatttctagttgttaagcctaataattttatagtcagtgatttcattaacatataattacattttaattaatttatttaatatttatgccctgaaaagtcatgtatattatgatcataatcacataaaataccagtaaagaaaagaggctggaagaaaatatcaaaatattgacaaggggtgtgttttgatagagggattagaaatgattttgtttcctttttttctgtaaggagcttgtatttttttcatttgggtaagaatgggtatatggtgtcctttctgctgcttccacaaaaggatttgtaactgcttacaaatttaaattcagagcaagataagactgaacctagaccatctggagaatgtagaaggaccagacgccagatggttttatatacctgaactgggaattgtagattgtttggtgtgataaatttaggtttcaggttttgttaaaagtaagaagggaaatgtattgatgtaattagttttgtttatttgactgaggaaaatctacttaacaaaaacacttttacataataacctagccaccattttataaaagttactaaagtactgtacatctggaggtttcctttttttttttttttttttgtataacttaaaaattttaacttataaaaggagagcaagttcgatgtaacaaaatcagtatagaactacggaaagtaaaatggaaagttccttcaacctctttttcctagctccactctttaaaggtaaccattattaactgatgtagagatggttcgttattcattctattgcaagggctagaaattaatggcttagaaatgatagtacaattaaatcactgcttcccagcctttatcgtttcatgtcacaagcaaaaaaccaagtaatatttataaggcatgctgggttaaatatggtaggttgagataactggcctggggccttgaaccacttgtcaggcctagtctccctaagggctgagcagaggaatgtgtcaagacgcctacacacaagttggctagaaactaactgggactaaagttacatggacaagtaatttgtatcctgatgttttaactcagaggttgcaaactagacttggccccaggggcaaggcaagtcatttaagtgagtaaaattggctgactgtaagacagcagggaaattttgtcaagcaaaagtgttcagacatcatctgaaggggcagccactgcttagttcctgctgataattgtcacgtggataagtaggcatgggattgccagatgttgcagtttttcaaaaaaagcggaaactctgattttcaaatttacaaaaatcaggttcagctcatggaccatcagtttgcatcctctgttctgaattaatactggccagaacttggagaaatccatagagtctaatcttactgaaacccgaccaagatttgtccattttatagaccattaggttattcattttcacaatgtatattttttactcaygcaactacaaactttgttttttagcacgtcgcgtttggaaaaattatctcccagcaattaatgggattgtctttctggtggactgtgcagatcattctcgcctcgtggaatccaaagttgagcttaatgtatgttttgtcctttaatgtgtattttaatgtatattttgttcttttttggcctctatttttttttaaggaatatagctcagtagtgccaataattagtcattccagttaacatttggcaaaaagacctagttgcaggaggaaaatgttttaaatctaagacattgcttttcaatgtcctgaggaaactcagctcaaacttaartaaattaactgttgtttctatcatacagtgattatatggccaagtttgctcaggatactcctcatttatgcctgttgtcccagcataattaatagtattctgtttcacgtgtcatgaacagtaattctgttttgttttttttttttgacggagtcttgctctgttgcccaggttggagtgcagtggcgcaatcttggcttactgcaacctccacctcctgggttcgagggattcttctgcttcagcctcccgagtagctgggactacaggcacgtgccaccacgccyggctagttttttgtatttttagtagcgacggagtttcaccatgttagtcaggttggtcttgatctcctgacctcatgatccacccgccttggcctcccaaagtgctgggattacaggcatgagccaccgcgcctggcccatgaacagtaattctttataagtagtgttggcatagtgaaagcctaaaagcgatattagagttctttacatttttgaatctgcattctcagcttgtgcctacccaccctcccactgaatgacttgccagaccttcatggtctgttctcagtcttcagttttggttgcatacatcctttgatactattaaggactcacttcaagttttctcctttgtcaacattgcattttctcatggcttgatggtttctatactattggctttgttatccctactcctttaccctatatctcttctttctctttgatttataactccttgcattcttgtttctggcaacttgaacctgtcttgaatttatttctaagtatgtttctcacatctatagctccagcctcatgtagaattgcctgccaygcagtctttaccttgctttttttttttttttttaaacagaatcttcctctgtggcccaggctggagtccaatggtgcaatcacggctcactgtaacctccagacttctgggctcaagcgatattcctgcctcagcctcccaagtagctaggactacaggcatacaccaccacacccagctaattttttttaaaaaagtgtttttgtagagacagggtctcattatgttgcccaggcttgtctcagtctcctggcttcaggtgatcctctgcctcggcctcatgaggtgctgggattacaggcatgagccaccatgcatggtctccattctctttgtttaaactcctcttttcactcttgattttggagctacctctctggctgatacttctgtctctttgagaagcactagttcttctggttagtccttaaatgttggtgttctccagagtactttctcctaggctggtcccatstactcccttcatttggcacctacatgtcagtgactctcaaatgcatttctctcctctagacctctcctgagctctaatctcatacctaatcctgcctactctcgacaactcctactactgattctgttttcctagaatggaactatttgtctttcccacccaccacctacctggacatgcagtccacaaatctgtgaattaatataaatcctaccatgaccctgatatgcaccataatgctagaaggaactttctcagacttaattgccctacttaatatcctttgatagttctctatcattttcaggataaaatctataaatcttttgcatagcacataggatcattcatgatcctccctctgtttctttttactgcctaccttgaactatattccaaacaaacaacttagccatccttgaatatgcacaagtagctactgcctggctttttcacctgtacctctcctcaacccctcgctttgtcggcaaattttaaaatgttctataagagacctcagagttcagatatgactgcttctggtaagcctcccttgacctctgagactgtgttagactcccaccttaccaatgtctgttgtctttattgatttttttatagttctctctcatcagactatgaactaacatgatagggactgtgtcttatttctttgcaaaacccctgcacctagcaaagcattagacacattaggtactttgttgttgcttaatgaatgaaggacattcttattctaattttgtgtaacatttcctggaattccagatggtcaaagtacattcctctttatctctttaactctgctttccccgctagctttcctattggtgacaactagattcccaggcttgaaatcagtggcagttttgactcatttgtcttttttaaattttttttttaatcatttagacattggtctcttcaattctttcttcaaaatgcctcctgcagtattcattgaatgctctaccttaagctagatcatgatctcttacatgaacaccacagatagatactatttgtgaattcattatactgaaaaataagattttattcactaacttctggatttgtggtcttttaggatatattgcagctcacttctcacactggcccctaatgtgagtcatctcttctcatccatttactttgtcgctgcatgtctatctaaatgcttgaatccagccatgcagtactgtgtggcttcctgaattattgtcctaatgcaaagccgttgtttatgttcttacttctcctttacacctatccaaaccctgcccttcctttagagccctgtttaggttccagatcttttctaagactttgctcaagcccaaaattgccattttatttccctgaacttgtcttaatgttaatattcagttcccattcattgtgacacttatccactatattgtgttcttacttggctttgttaacataaatgtggctgggcrtggtggctcatgcctgtaattccagcattttgggatgctgaggttggcagattacttgaggggcaggagtttgagaccagcctggccaacatggtaaaactccatctctactaaaaaaatacaaaaattagccaggcgtggtagcacatgcctgtagtcccagctactcaggaggctgaggtgggagaatcgcttgaacctggaagtcacaggttgcagtgagctgagattaagaaaaaaaaaaaaaacataatgtgaacatagagtgaggatttttttgaggacaggaatgtgcttccttttgtatcctcagtgcctgagatagttacccttcctactttattcctctcaatgcctgagagagttcttcgcacacaatgggacttggtgaatacttggggaattcctgtagtcatctttgaggctctgtagccagagcattcattcttataggactttgctgagggacatcctgaggatagtttgtggctgagcagattagctcaaaagttaatattggggcagttctgctgccttgtaaataaatagaataaagttgcaactgtttcgaggcacttaggagatttttacttaatgtcatgggtgttatgtaatgtcaaggtgaatctttaatcactcaggtataaagttgatcagattttcactttacattaatgccttaaargattagtggaagtcagaattttcattatctggtgggcttttgtagattcctcacttaattcttttttttctttttttcttttttttcaatctttaggctttaatgactgatgaaacaatatccaatgtgccaatccttatcttgggtaacaaaattgacagaacagatgcaatcagtgaagaaaaactccgtgagatatttgggctttatggacagaccacaggaaaggtaagagaaaaatatttgggttacatataaaggacattaacagtttttaaaacatgatgtttcgctatctagattacccttttcttttaaaggcttaaacaggcttaggattagttttactgtgagtattttgtaagctcactagaggcaggagtgtgttctttttaacgttttaaaygggattcattcatcaggtatttgaggaagaaggaaatggtagaaaaggcagatttactcttctaagagtttatgattatctttcaaatttgattctgagaaattgcttttgaaatagccctttttagccagaaaataattttttttttggactggagtttgcaggttatgaagaaaaataatcatttcaatcactttccaagcattgaaatcaaagcacttgattatcctcattgcttcttgctgagagaggtaggactgttggccgcattttgcagaggaagaaacagagagtgatttgttcaggtctacacagcaagtcagtgataaaaccagaaaaagaacttgagtcttccaaatcaatagtttttactgtcttcaattggaaggaggactcttgtagaaaagcaggcttgagagagagaaaatctagatcagataaagttaagcaggaatcttactgttctttttagcttggggttttggcatatttagtttttaaatatcttccttttctgtgataactttctgacttttttacatggttccttagtctcacctcttcttgattatcggtttctttatagaaatacttcctttctttcatttaatttctcctcttttgcatcagtattaaatacacatgaattcttcatttcttcagtgccacctgttatgagtgtttatttctgcatgcttttgttaatgagaatgtccttatttttaaacagtcccagacctcttttctgcatyagagggcatgctggttccataagtcccagtggcttttttcttggtttgctgccataactttacagataaatattgggtgttcaaagcaaatgctcytcagagagagaaaggctgggaatagaactgtgctgcttattctatcctgaaaacacgaagcctggggaagtcatctatatggccttgaccacatttctgtaattaatacctacttaggtttgcttttaaggaatggataaaatgattgtaatgatcgtcctttcaatcttttccaccacagagatgctaacaggcctttcttggttttgcctcctttaggggaatgtgaccctgaaggagctgaatgctcgccccatggaagtgttcatgtgcagtgtgctcaaraggcaaggttacggcgagggtttccgctggctctcccagtatattgactgatgtttggacggtgaaaataaaagagttttacttctctggactgatcctattcacagcttcctcatgaacttttctaatagaacaaggaaagctctccaaccatgtctggcgttgagaagccaagagtctctgtcaactctctcattgcccagtggtgacatgtgctcttctccacactgttgggaggtaatgctgccccacgtgctggtgcaggtcagtatcctgggacttggaagctggcaggatttgccgggtaaagctgtatgccatcatggggcacctgaaaagaaaaacacgtctcaccactgtggttgattcaaaagaaagtgattctattttttaaagaaagcgttgttaatgtaattggtatccctcctaactttttgagttcacaatttacttggtccagagttttctattcttttttttttttaaactaatgaatgacatttagatacttcataaaattatgaacagatatggaggccagagctcatttgggtaaacttactcctgctgagttagcaggttggtgagagaagctcccctgagctcacctgtctctctgactgccttggagtaggtggcataaccttgtgcacagagaactagaaaaggggcagaaccccggccttgcagttgtggcaggtttccactgtggtaagctaggttcattcctcatcaaggaatgtgtagcagattgttcactgtggaggagttaattatagaatgggttattgttgttattcttactcatgaagttacagattttagccagtctttgcttttatacttttgtgaaatttaatttctctctatagcaccttcctttttcgttttcagttatcaaaagtgactttgacctcataaaagagttgagaacatctctcgtgtcacatactgcaggtgcatcagttacttttgcacagattctagggggacatttttctgaataggaagacaggacaaagttaacagcttaagggctcttaattctgtgagttgaggacttaaaagtattgtagcatttgtttggatccatgaaaaatgtattcagtgggctttaaaatttccatttgcagaatttggtctctcaggctgtttgggagctcttttttttacattttttctcctttgacacctattttattggtgtttaaagtaaaggttaacatctgtagcttttccaggtttttttttttttttttttttttttgrtatgaaattgtctttctccattgcagaaataagctagggaaacactaacccaaaaactttctgtagagctgttcctttggaggcagcatcacttattggcagtaaagactcagtataaaagcaccrgcatccctacttgggtgatggggattaattttatagcattccattttcctagtgccacatgtgaaattggattttgatgatcttaatctatattctacccttataataaaagatcaaaagatatatctcctatgaacagattggagataggagatgaaaagttgggaggatgtctttattctaatgtgagggtagggaaaatgtggataacattactggggtgarggaggcattgttctttagttggagttctcattyttattctccagtactgacttgtggggaaagcatactttttcactgccaggtactgaatgcagaggctcagtgaagtatatatgtgggaagtgcatgcatttcgtttattagcaaacatagctggattaagacaaagttgttggtttggaaaggggttaaagccttaagtgaacaaatctagctaacagtgaatgaactaggtaatataacttgcatatttttaatttcctttggttaaaggtcccccatacttctctgttcggagacatgagaagtatgattacttcagtgttagttttcttaatttttttttycccctatttgtcccttgtcactttgttgcaagctagaaatctgtgggttatacatagggcagctctttgtgaaagtggtttattccactggagaaaggggattgaaaatcagttagaaccaatgtatttcttgccccacggaacactattcctataagatagctgaaagaagctgctgtgaggagctcagctccaaacacaggatcagcmccttgtataggaattcccatgaattatgacttctcattctgttttatcagagtgcatatatgtcctacttcagsaaaagtaaaacagtcatttacgaaagaaagtcaatctgtatcctaagcattttaataaaaagttaaaacaaataygctatttccttttttttttttcattggtttgttctgagctctgagtttgaacartgccgtttatttggggaggcaaccaaaagttccctgcatagaggaagagacatttagggtgcgtgtgagatacttgaattttgccaccaggagggggaaaaaggctggggtactagaagtaatagatttagtactacttgagagatttggaacatgctgtggacccagggttgttggtcatctctgcaacaggatggggatggcagatgtttgagcaaaatctatattaacatgctagcaaggactagttctagtttagctgtgtttcactcattttacacagaattagaattggccaggtgtggtggctcacgctgtaatcctagcactttgggaggctgaggtgggtggattgtctgagctcaggagtttgagaccagcctggggaacagggtgaaaccccatcactactaaaatacaaaaaaattagctgggcattgtggtacatggagtagctcccagctactctggaggctgaggcggagaatcgcttgaactaggaggtggagattgaagtgagccgagatcatgccactgtactcctgcctgggtgacagagcaagactctctctagctcaaaaaaaaaaaaaaaaaaaaaaaaaaatcaattaaatgctacatttggcaaaatgagaaagaaagaatttcctttactaggcttgtaggaagcctgcttttacaaaaacccaaatgagatcataaaactaaagtactgggacaaacagtgggaaacagtgcaatgggttcttttcaaccaagtattaaagtattggagatattgccgggcgcggtggctcacgtctgtaatcctagcgctttgggaggccaaggcgggcgggtcatgaggtcaggagttcaaggccagcctgaccaacatggcagagctccgtctctactaaaaatacaaaaattagccaggcacggtgggacgcacctttaatcccagctactcaggaggctgaagcaggagaatcgcttgaatcggggaagcggaggttgcagtgagccgagatcgcgccactgcactccagcctgggtgactcccatctcaaaaaaaataaaaagtactggaggtgtcctgttgtccttgttactgtgaaaggatgccatgggttgtatgggcaaatgagttggttttgtttgaggcagagtggaaaataagattaggctcagtccatgagcctagcactcaacagatcttactttggcgttctggctgtgacttgggacttctttttaccatggtctgctgtaaacacagaaaaacccaatgcctaacagttcatgctggagtcttgagcgttgagggagaatcactggactcgagagagaaagtttgtttgtttgtttgtttgtttgttttttgagttggtctcactctgtcgcccaggctggagtgcagtggtatgaacataggtcactgcagccttgacctcctgggcttaagtgatcctcccatctcagcctcccaagtagcttgggaccacagggttgcaccaccgtgctcagctagttttcaaaatttttgtagagttaaggtctcatcatgttgcccaggctggtctcaaactcctgggctcaggaaattctcctacctcagcctcccaacgtgctgggattccaagtgtgagcccctgtgctccaccaagagaaaaactctttgattgctaggaagttgggataaagaaattgtgctgtgatcaagccaccttctgtgtcatagaaccaaaagaagaccgcctgctatggcaagatggcctaattttattcctgcctcatactatcatggataatcgttttcctttctctagcaggtttgtgtcactgggagtactgggagcattatcctgtgttgtgctggggttataccaagcagtgttaactttatttaaagaattcaggcagaaagattagagaatttaagtagcaattgtatatggtaagcaatacagtaaccttaataaaaattaatgatggccgggtacggtggctcacgcctgtaatcccagcactttgggaggccgaggcgggcggatcacaaggtcaggagatcgagaccatcctggctaacacggtgaaaccccgtctctactaaaaatacaaaaaattagctgggcgtggtggcaggcgcctgtagtcccagcgactggggaggctgaggcaggagaatagcgtgaacccaggaggcggagtttgcagtgagcggagatcgcaccattgcactccagcctgggcgacagagcgagactccgtctcaaaaaaataaataaataaataaaaaataatgtgtattttatcaattcagtgataaagcagacctttgtaaactgtctagcttgtggtgactgattgagggtatcatgaagctccgcgcccccccactccccgacatactcgttcatcctcctctgtcctaaagcgtacttctttggaaaagtagagcagtttatgttagtgtacactagagatggtaaactatgccttgtgggtcaaatcgggcctgctgcctgtgtttgtatggcctgtgagcaaagaaaggtttttacatatttaaatggttggaaaaaatatttaaagaatgctatttttggacacaaaaaattgtatgaaattaaaatttcaatgtctgtatctttttattgggacacagccaccgccattcctttagcttttgtatgcaacagctgcagagttgactatttgagacacgttgtatggtccccccaaactggaactgtttccattctggccttctacagaaagtatttggaccctggcctagataaatcctggctggtggttatgttatgtgaaatgtgcacactgtaaaatataggcctgtatgattaaaatttttgatttcagctactgttcatagtcgatttaaagggcaatttaatttacagcaaatccagtttctcggagatttgtgttggggctttggcagcaaaaaaaaatcctaggagtaatcttgagagttccatgccccctagtggattgctatagggkttacttttaaattttcaaaacactgaattggccaaggatttccttggtccatattatcccaagggtcagaggctgaaggtcgcctagacctgggcagatgctcacaggtactgtcgtggcctgggcaaatctaggcacgtcagcgctcatttctattccctttcccacattccagcaaacgagactaggcttgaagggacccaccctcctctcctctgattcctcgtgacgccgcactcctcttactctccccggggctcatccgggggaatggggcagattatgtcccaccggttggacaaactaacgagggcggggaaaggaaaaaaaaaatcagaataggaagccaatcagagctcggtacaagcccagccaatcgggtcgggtcaattggggcttagccaatcgggctcgatgaggaagacgtgagtcagagcttgcgcctctcgcttccagctgtgggtggcgctaggcagcttcagccggaccgggtaggggtcctcgctcgctagcttgctgtttctcggagaagctcccgagtgtccggcctagaggccatgagaaggcagtgggggtctgccatgagggcggccgagcaggcgggctgcatggtgarcgcctcccgggccggacagcccgaggcgggcccgtggagctgcagcggggtaatcctgagccgtagcccgggcctggtgctttgccacgggggcatcttcgtccccttcctgcgagctggcagcgaagtcctgrccgcggccggcgccgtcttcctgcctggcgacagttgcagggacgacctgcgcctgcacgtgcagtgggccccaacggccgcgggtcccgggggcggcgcggagcggggccgcccagggctgtgcacgccccagtgcgcgagcctcgagcccggcccacctgccccgtcccgcgggcgtcccctgcagccccggcttcctgctgagctgctgctgctgctgagctgcccggccttctgggcccacttcgcgcgcctcttcggggacgaggcagcggaacagtggcgcttctcgagcgcggcgcgggatgacgaagtgtcggaggacgaggaggcggatcaactgagagcgctgggctggtttgcgctgctgggcgtgcggctaggccaggaggaggtggaggaggagcgcgggccagccatggcggtgtcgcctctcggggccgtgcccaagggcgcgccattgctggtctgcggctcccctttcggcgccttctgccccgacatctttctcaacacgctgagctgcggggtgctcagcaacgtggccggcccactgctgcttaccgacgcacgctgcctkcccggcaccgagggcggcggcgtgttcaccgcgcggcccgcgggggcgctggtggcgctggtggtggcgccgctctgttggaaggccggcgaatgggtgggcttcacgctgctctgcgccgccgccccccttttccgcgccgcccgcgacgcgcttcaccgcctgccgcacagcaccgctgccctggccgcccttctgccgccagaggtgggcgtcccgtggggtctgcccctccgagactccgggcccctgtgggcagccgcggcagtgttggtggagtgcggcaccgtatggggctccggagtggctgtggcaccccgccttgtagtgacctgtcggcacgtgtcccctcgggaagcagccagggtcctggtgcgctccaccacccccaagtaagcccgcagggctgacgccacttcatccctttccaggtctcagatctgggtccagccctaatactcttgagtattgtgcaggcctttcttgtgtcacgcggatgctttgggcgtgtagtgggtagagacctggaaccctcccctcatcctttatacccagaacccctgtggggagaatctggggcaaggtgtcaagctcgaagcagctctggatttgggtactgtgggacaccctgaatccggaacagggcatctttgagctcccctcaaaggctgagtttcttctgggcagcttcactgtctgatagccctgcacgccatacccctcggttctctggccctttgaacagagattccctaaccctgctgcttctcctctgaaagtgataaggtcccagaggcccaggatggtgctctcctggggtaaggagatgggtatgttaattttatccatcttttagtgcttagccagagcttcccgtctgagtgaaacgtgagtttctacgtaatcagaaggtaggggggtggcccacgcagctgtacatggttcagcccagccttgcagcccaggcttttccaaatctcttcctgaatccccaagcttagccaggtgtgggtaacactgcccagttttgccataggtgtccccactgtggcctataggacagccatgactttatagggaagactgatgatgaaggtttgcctatggtgtgtggcccccaccagattccttccactccccccacatgccccttgctcctaaggagactgccaggtctgttggaagctacccctgcagagtgtgtagtaggacgcccctgtctgatcccgggcaagtcacttaacctgtctaagctgcctccctgggagttgacgctgaatgtcgtggaacggagcctgtcacgtcgtgtgctacagaagtgttagcgtgtacgtaaatagggacccagaggagtgaaaccatgtcatatctgacccaccaactgacgggattgttgtgggtatcaacgaggcagtgaaggaaagtgttgtgtttgccttggctcctcccactttgtttggtgttgggaatgttactgagcgtctctgggcctcagttataccacctaaaatggagataatgccagtgcctagtttatagggtcgtgaagactaaataaagtgatgtccacaaaacactaacaccaaacctggcccacagtgctcactaagtgtcaggttgatta

SEQ ID NO: 6774 - DNA, 169567 bp, Homo sapiens
  misc_feature (1)...(169567): n = A,T,C or G, or insertion/deletion polymorphism (see Tables 1-2)
tagatgactgatatattgtccctagttatggctaccatcattcctagacatggttggagtcctgaccattcagaagcacctacatgctcttgtatatgcatctcaaccaaagtagattacatacatagagcttagcacacttccctttctgccaacgcacacaaacactcatacacacacacagggaatggcttggagccaactcatgtgtaccttgaggcagccctggtaacccacagcatttgcactcccctacatatgcctgcttgactgtgtgtgcagaaatgtgcacgatcttctgtgtcgcaaaacacaagagcagaaaaggcatgtacacaccccaaaatcttacattgatggcagatgggagtcacacacacacgcgtgaacatggtcactcacggcctgaaaccataagcacccaaaggtgcagaaaacaggagagtgaagaagccctcagtccttttcctctgcactccacatttcagccttggtgaaccacttggcttccccaaagcactatgcactttctcacctacaggcctttgcacaggtaggttcccctgtttggcatgccttccctataccccattcacctggccactctactcacccttcaggtcttatgtcccaagcctagtaggggctactcttctacgctcccactatttcctgcatggtagtgcttctcagggttggccctcaccaccagccttgtctcatttacgattgtgtctccaacaccagcacagagcctggcactagacagcactccgtaaatacttgttgaatgaatggatttttgagctgggaaggcccttagccattccacttctcctttcctcccttgcccatcaatctctacatgttatataagaagaagtagatgagtagatgcacaccttaggtaacagagctaggagagagccagagctagaatccatccattcattccatcattcgctcactcattccttcactccaccattccttgggcatctatgctgtgctgaatgctgaggatatggggatgagtacagtcatccctgccccctgggaactcacagctcaggaggggacagatgcaagtcacagtcacatgtggcttatgctacagaagacagacccagaataacagcggctcaaatgaactcaattatttctcatttatgtgaaagtctaggcttgtttggcaacttgactccacgaagccgtcaggggcccaggtacccttctgtcttgttgcttgatgcaggagtcagaagcagagctagaaaactgagtgtcatgccagggatcataaagcctgggacagaagtaagaaacagaaagtctggagctccttggggaggctctggcaggtccccgtccacacctccgtggttttgcctgttctagctacgatatgggaaagttgggtttgtttaaagacctaggcttggactgggcacagtggcttaagcctgtaatcccaacactttgggaggccgaggtaggtggatcaaaactcaagaccagcctgaccaacatggtgaaaccccatctctactaaaaatacaaaaattagccgggcatggtcgcacatgcctgtaatcccagctactcgagaggctgaggaaggagaatcgcttgaacccaggaggtggaggcctcagtgagccgagattgcaccactgcactccagcctgggtgacagagcaagactccatctcaaaacaaacaagcaaacaaaaaacaagaaaaaccttaggcttggggcagacaacagaagcagagaggtcagagaggaggaacagatccaaaaaaaagggaaggaggtggaatctccaggactagtccctactcaagtgagtgagggaagggagggcaggggagaaagcaaacatcccggctgagcacagggtgatgccatacctggcaccgagggaacaaagggcagggagggtgtgaggaagctgagtgtgaggtggaggggaggggtgttccaagagctaccacgagcaagctgtgcgtgggacatgaactgtgtgtttgagtgggagagttgtccacagagagatagaaactggagcctacgatggacaagttctcccaaggcgagcgctcagtccagtctcttccctggatggacctcccaatcccttgggaagtttttagaagcagacaggaacctggacttccctgccatctcttcctaccaaccacaaagagattctgactcagaaaggtagcctgaggccctatatgtgactgggctcttacacttacaagaaaggaaacccaactcaaactggctggaactgaaaggactcctgtcaccgggcttctggcacaatttgattgaagggtttcggtgatgtcttcaggactcagtcactctccacctctgtttgcctccgtgttggcttcatcctcatttatcaacagtggcaagacacctgcggcagctccagctcatccctttagaaagcccttccaaggaaatagctgtagctcccagtcactccagcccaactctcactggcctgaactgggccacatgtcctctctgacctagtcacagtagccaggggagatgagagaggacaactggtgaggttacttcctattcatatgccaggtatggagttaactccaccagagccatatgtcctggggagaagaaagttccccaaaggaaattgagtcacagttactaggaatagggggactaggctcagggcaaataaaatgacaggtgttggctcccctgtggcctctacaggggacctggagcaggtcctggccatggaagctttccatggggaagaaatgggagaggcaggtcaagagccatgggcagaagagccaagtagaggacagaggacctgcagccttctggaggagggctgaccttcgcttttgtcatggggagcagaagctgagtctttggggaagcctgaaaagctggtgggagaggcagtggaagaggcagtgggagacagcacagtggggcctcagagatgccacgctggtagttttggtttcaggaaggattttgatgctgtcaaagacacagtggaggaagagaagtggggtttgctcaataaaaacgggctgggagcaaatgacaggattttaaggtgtagaaaacaggagagagaagggtggccttcctggcagagggtctagcaggagcaaaaaagtggaaaaacacagaaaagacttgaagaacagtagaggctgtatgcctggggcattttttcttcatttttgtctaggtgtgtaaccaagaccacagtttaaaatcaaagtctttgggttagcattggaggccctctttcttcttactgcaaacaagaaaatctatttcctggtgtttttcttgaggcatctgaatcccccccctttcttctgggagccctgaagcaccttttgtggtctttacatgttttgtggattttcactattctgccttttgtggcggttttatgtgaacatgacttgtcttccttaatcaactgtttttaaagctcctggaaggcactcttttcacctcagtgtccccaggtcctggcccccacctatgaagaaagaagggttcaagataagccacatgaggctgtaacttgtgcctggggtagacaatgctctacctgaaagaaaaatctcccagggcaagaattctaagcagtgtgggaagaagaagagggatacctggggatcaggcccctcaacacaagctaactcctgctgctcacaagctgctactctcagctgtcaggtagggaaaaaatggaggttaactgtgatccatttgctttctctgggatggaaacttcttcctgtttcacaactgggagcccagagctagctgtgtctgagatggccctagcagccatgaattccaaagaaggagccgatgccctttattgagtgcctgccctgtgccagcactgtgttcactgctttacatacattacctcattcagtccttccagacgggtagatacttttattatcagcccatcttacaaatgagaaaactgagcctccgagatgttcagcagcttccacattgacaaaagggagatttacacccaggtttctctgactccagagtcaccctggaagctccagggtttgcaatgctggggccaggtcaggctagcgcaacaccctcctctttcagttcccaatcacaaggatgctccagctccaaactgtttagatttcactgcctgagcattcctgagggcctccaaagtcctgaaagggaaaagatcagtttgcagaataaggagggaatgaaactaactccccacctcagttcctccattcagactagcctgggaggggagtgggggaagtccaaagtccctgaatttcctggcctgtacctcccagtgtagaaactctccaacgccccctggtgttcttcaataccatccaagtctcccaaggattcattcctctgtagagtggactgggacatcccatcacagggatggagaaaacagagtgcccttgccactgaagccatcaggagaatcctagaactggaactggaacccagagctcctggccacgggctctttcagcagcatcgccttctattcctgttgtcctccatagtggctgactggcccagcagtcaatgttacctttattacatatgatctaagtacttactatgttacaagtccaatatgcactattaagtgtgccacactttattagaagcgcagtgacactgtattatatatcaagttccatcaggtcaatatagaaaatgggaagtttgtactggcatgccttgttattttgaaatggaatcccagcaccactgctgcccccacctccactgcatatttgaaaacccagtctactctcctctgcccgctgttccaggaagacaggctttctcccaaaaactcagtcccaccacctcattcacaggaatgtcaacaggcacaaggagataaagtctcttgggatacaaatgctacttaatgtggggggtggaggaggtgacaagagaagagagaaaactaccaaatgcccttcaggccaccagtttttctctagtggaatataggaaatgacaacaggagagagcctggttagccctaagcctcccgcagggatggaacctgagtttgtgtaggaattgctcacctttgatgactgggatgattgaggcaggctggtctcaccacacagggatagatggcatgggtctcagattaatggcaggcaagaaggggagatgtcaggactggcaggcggccccaatgagccacctctcagatacctggaataagatctcctcagttttcagtgtctcatactacctcaggtcttggtcctgagaggaagggctgccagctctgctgccccctggagggctgacttttcaccccagagtaaagatgtggttggccgcccggcactggaggagctgcagatctcaggaggtacagagcccccggggagtcggttgtcgggggagaaggaaggggaaagaggttgggggcttgggagtagaggagcggtggctgaagggatcaggtagtcctgatcaggacgtggagatccacccacaagccctgacaataactcagtcgagttcctggagggtctcaagggctgggaaaggtggagtggtgcctgccccaacgcgtccatggaaggtggtgcccgcctcaccgcctccgtggaaggccaaacgagccctcggtgtgaatccggagaaagagagggaagtgcagcgccagctccactccacacccccttcctgcctataaataaccccaagtgtcmcttcaaagaggacggggagcgcggcagaggggctcccgggccggcgggctggggccgccggacctgctcaccacgccccccaccctgggcgagtttgcataaataaacaaatccaagccgtcggccccgcgggaggtggaggaggagtgacgaggaggaggaggaggagggaggggggagggagagattagtttgggaagtagcacggattgctcatccgatccgtgccgccgcagggagtgtgtcaagttacagaggcgccggaatcggcccctgmgctcctcgccagccgccacgacccacctctgcccatggggccctccrtgtgcgccccttcgcccggggactgaaactgactggcccgggagacacgaggcgcccagaaggactgacagcgcggcaccaactgctctgcagacacttgaagggaaagactgggcggagagaaggagagccggtcagattcccctaactttcctggacttggaamgttcttcgaaataacttttttctyacctaggtgtaccccaattaccgctggttgtgctttttcggcacttcctctcctactgctaatttttccgtcctctttgccgggagcagcggaaagggacgttttccagcgatacaagccctttccccctgccycgcagtttggatagagccttttggcagcggctgtcgcctttatttattctatttatttatttattggttctcaagacgcgagaggatggtagcggagcgcacccacaaagcggcagccaccggtgcccgcggccctggggagttgggcgcgcccgggacggtggctctggtggcggcgcgggcggagcgcggcgcacggctgccgagtccagggtcgtgcgggctgctgacgctggccctctgctcgctggcactcagcctgctcgcccactttcggacggccgagctgcaggcccgggtgctgcgcctggaagcggagcgcggggagcagcaaatggagacrgctattttgggacgagtcaatcaactgctggacgaggtctgtgctctttgttgctggcttttatccctccccgcggcgccccctcgcgcagcctccagactgttcagccggtgtccgcgggcgctcgctctctgcgagccccaggttcgcgcgagttgcctgcgggaggggtcggggacacggacagacgctgccctaccagggattcggaggacctggtgggcaagagcatgacccagcgactcccgcctcgggcaagcgcccccggcttccagcgctgggagcgccctgggcacgccrggcaggtggaggaaggctgggcgcgcggaggctcgcggaggcgggcaagctccactcctccctttcgggacccggccagggtggtgtgacagccgccccgcgcccgcgcagcggcaagcgcgcccagaggcccaggccgaggcttactgagcccccatggccctccccctccaccccttaaggacccggggggtgcggggagaggggacagttcttgcagggggtggtgccctggtctctgctcactggcccaggccgctagggtccaagtgtgggtcgcctggctctgctgtccttggccacaaattagtccacaccttctttttcctaaaccaggtttcttatttttctggagaaaggatgctttcttccattctccaaatttttttgatccaagtagattaaacactactagcgtgtcaggtagctatggcaatcttcggaatacaggaaaaggctgtcccctccccaggaaggagggacatgcagcctctttgtgccaccagaggaaaggctgggccttgacagggtgaggcttgatgatctgtgggaatctggacagcacaggggattcagggcccagatagagaggaggacaggcaggtgggggccgcagcagtctgggaagaggtcctggagcaggtcctggccatggaaggtcctggccatggaaggtttccatggggaagaaatgggagaggatatcttacttagctggagggagtgtgcagcagtaaagatcacggtggtagaggccagcaaccctgggtttttatccccactctgctacttggaagcttgggacaaacgctccaacccctctgaacatgcgaaacagtgctgatgtagcaaacactggagcacagctctaactgtggtgggtggggtgctgtgagcattttggcaagatgtacctattccctatagccaggctcttctcagctgcccctgccaggctggcacctgctggagcagttctccagggtggccaaggaggagattgcagggccagagcagagasagcggtcacagggcaagcgtactggtgctagtggtgcacccatgactgctgctgtcagctcattcccacgccctgccaggctccagggaatccggagaactccatcgggccgtccatggttccctgggcctggggtggaggtgcrgcatctctgggctcaggcagaatgagcccagactggctgggtggtgaagaaggtgtcagggcagtgagagctcctccaggtatctcgggggtcctggctgctgagggataagcatctgattttcagggtttagcacagcccctctctccatgctttccccttcccagaccttcctgctggcctgaccatgccctggccttttctagcttcttgcttccactgcttcagacttagacatgccaagtcgcatactctaggggccttggggctaactattgtatccgacatgctcactccttccctccaagctgcagctccatatttaccctactgaatacaatcttttcaactgctagatatgaaagttatcccagagagcatytgaactgaaccccatttttcagatggggaagttgagcccagagtcacatggcgaggcccaggactagaacctcagcctcctggccctgtatacaatgttctttgcgctgtatcctgccacctttttttttttttggcctattctcattcattcattcagaaaatgtttactgagagcctgctgcgggtcaggcattgtgggagacacttttgccytcctaaacttacatacagggaagtagtgcacaaagaagaaaatgggcagtgaccatgtcgtgtgcaaaaaaaaaaaaaaaaaaaagctacaatagtgaaaaaagagaggggcctggggaatgcattacatgcaacattgtctgatggtggtggcagtcatggcaggcttccttagggaaatgattttcaaatgaagagctgaaggatgaataggagtttgccaggcaaaagcgggcgagtgtgaagccttgttctaaggggacaaacggaacagcctttgaggctgggggccagagggaattgggagaactgggggaagtccaggaccccggaggactgggagtgtgaggaagtaggagatgtggctggagagagacgggcagcccaggtcaagaggggccttagagaaagttagatctaaataagagtaatggggagccattgaagggttttcaggaaggcagttatgcccctagagtgagkgcttacggctggcaaagcagtaaggccaaaaacagaaggctgctgcaggccagaggggacaatgaatgggggtaaaagtagggtcagagaggggtgactggaaatggtggctgaggtcaataggggaagatgctggagccagaggaagggagctgtcccacaggtggatggcgtgagtggccttatctgtgggggccttgtctgtgctcctggagggacaccctagggttgggctgtccaatacagtaactgctagtcatatgcaactcattatatttaaactaactaaaattaaataaaatttaaattttagcttgtctgttgcaacagcctggtttcaagtgctcagtggacactgcagctagggactatggagctggacagtagagagaaagaacttgtacatcctcgcagaaagttctattggccagcgctgtgctacgagcagcttcygggcctscaaagcaacttgaggggaccatcctgggcctttccctgtgtaggtgtgttctcccaggtctgagcaaaggtctgagcaaagggcagaggagagcaatgggtaaggcagaaaattgggacaggcaaaaacctgccacaggacaggagaattcagagacaagagaggggaaatggttttgttacaaaacaattctccaaaatggaggtgcagaaggtccctgtcctcatggggcacacacaggcatctggtgagtttggaggccaagaccaggattctagctgggctttrccagtcttgtggccttaggcaagccatgctacacccctgcacttcaggttcatcttccattaaatctaggccctgcctccctcctgggattggaggcagatcggagacttcactaaaaggtgccatcaccaaaggccatgcacaagaccagatgagtgctcagggagggcycttagggatctggggcaggcaatctttgcagcaggcaggactgggccacttcctgaagaatgggagaaggacactggggagggcaagcctggtgaggcacacggcctgtgcaatggcctgggggtgggactcccatgccaatggrgaaagcaggtgagggggcagagactgcgtgtatgaggcagaagggagagggagctgcagggagggccggccaaggggacccaggaggacaggaggcctgagaggggagccagaggcagatctgaggggaccagcccatgacgggggttgtgcagagccgggattggaggatggcgggagccagctctgtggggaaccaggagtgtgctttccagacctcaggccccagctcttcccccatcagcgcctctctcctggtctgggacccttaacgagcactccagctgcctgttatttgatttgcttgctgtgaagaaagaagctggaatgtcccaaatggagaaaatcagatgacacctaggactgggcagccgtgtgcagtgaatgagaagggagtggaatttaaaagagccaaatgctgggccgggtgcagtggctcatgcctgtaatcccagcactttgggaggccaaggttggtggatcacctgaggtcaggaattcaagaccagcctgaccaacatggtgaaaacccatctctactaaaaaatacaaaaattagccgggcatggtggtgggtgcctataatcccagctactcgggaggctaaggcaggagaattgcttgaactgggaggcgaagtttgcagtgagctgagatcgagccattgcactccagcctgggcgacagagcaagactccgtctcaaaaaataaaaattaaaataaagagccaagtccatcttctaggcccaaggggaagcagaggagggtctcagcagccacctttaaggtgagttttgagagatgccaggtagactccctaaccccagtaataacatcagaaactgtaatagaaatgtcctgtagttatagggtgcatacaggggccaatgctatgcgtgtcaccactatatctctttcaatcctcacaacttccctaagggactgacattsacaccacccccttttacagatgagaagactgatgtcactgtacctccctcccactatctgtgattcattcctttggwtgttaaggaatctcctgggagaggaagtggttgaaacttccaagctaaaatgttaaggaaccccaggcagactccttcatccctaaaaataacaacaattataataacatgtctcatgtttatacggtgtgtgattttggtgcaaaagtaatttcagtttttgccattgaaagtaatggcaaagagatgtaggggacagatataggggmgggatcaaagcagcagctgaaagattggggctgtggatggggtcctttaggactgaaatgctgggatgaggatgggaagagactcttaaaggggatgtacatgtgtgctagggtgggtaacctgtgcacagtgtcctgtgctgaccacagctgactggacctcagtatatggacagactctggatccaggtttcctcaaatgcagccagcacaaggtggtaccagaggagtcaggggtgggatccagaccccagcaggcatctctccttcaccacaccttcccctttccagacaattaactaggtcagcagtggcccatacatggcttgggtgtgccctgctctccattccagggccctcagcagacattattaatcaattgctgcacactttcccatggagcttacatgcagcctcagaatccttttcaacagtgttcaggaagctgctacttactagtgacrgttggtgttcaagacgaaaagctatttcataactctagattttgtttttttaataacaggtgcttactataaaggcagggagaattactagagctctgccgcttctccaaaggtcttcgaactagcagatagctctgaacagactgaggacctcaggaggcagccaaccctcataggaaggtggtggggaaaaccaaaagcatctcaaacaccattccatctgccctaagcacagctttacggtttgataactcccagaaagatgtcttttccccttcttcttaatcactctagacttgccccactgctctctggaaagcctcctcgaaccactccaacccaatgtgggctctctccctgctccaacttcctgttgctcttcctaggttgtgccagacatttagctcagagaaggaaaatagacatagcatgtgttgttggctttccttatcccaaacgrtagcagatactactcatcgctcaatacactctttcccattcagcctaggtaggcctcggaatccttctcgacacagtcctccagtggcacggagaacagcaacccaggctgccrctcccgtccattagagtcagtgcacaagaggaaatccatttgccattcatggttcaacccaaccacattgtacaacggtctctccatgtgaccacacatgacccgatgacagcgatagaggcatgctgtcttgggtcccttattaattctagcccaggactttgcacataatacgcagctctcacaaattagctgttgatgtaaggtccccctgttagaggctggggaaggtttattagtcarctctcctcgcagcgtccccggccctggacccagcaataggctcagcatttgctcagggggtgtttctcagcaaccagcagaggatgagatgattgacttctgtgtgtccaggctgcatgccttgtcctggctgggagagcaggaaaggctcagtgatgtgttccccactgggcagagaagctgggggcacccaccccctcccatcctctactcccaaggtcaggagcttcatttttacctgccccagctggctgccaaggtttttctttacagagtcggggggtggcaaaatggtgaagcaggcaacaccatagcatttgaacccctgccactaactgtgtgacctgagcctcagtaccctaatctgaaaaatggagatgatgacatcctccttacagggttgttgtaggattaaatgaaatcatttggctaatggcaactgtaaccattgccacctcgctcatcattggaggaggtaatatggggcttcatgcaccttgtctacaacttttattagtagctgatatttattgagtttacgctgtgtattgagcttacacttacactgtgtaccagggactattcaaagacctttacatctattgattcactaaatcctcacaataatcctatgaagtggttactattgttactattcccttcttacagaagagagaatagaggcacagagaagttaagcaaatttcccatggtcacacagtaagtgagtagcatagctaggccttgaaatcaggcagtgtggcccagagctggcatcctcagccactaggatgtacttgtctgtatgaagtaccatacctctctaactctgctgaggccagtcaaaccagccaggggctggggatctgttcagtttggtttggctcccagaggcagtgtttactgaactgccttggcgtcagggccgtgccaccatctttgttgtaagaaagacattatgagagttgctaattacatcaggccttggtgatgagtactctgagggaagcccttgtccagtcttggcctctggaatgcttgggcttcccagggtggatgggtttgttcttgtctctcggactctgaactggccactaggaagcatagcagcaaatctagggttcagccagtggcaaaggcttttgtatgagccttgatcccagatcctatttgatcactctgcctttgctgktcttctaccttactgtatactgtctgtctgtctgtttgtatcagctgcctgaatgctcccttttagagccasagaggggtaaaagatctgaagtaactaaacattttaaagttactctcccctccttctcactgatccagatgtcctcaaaggcttgcccttgtacgggtgatgctggttgcattagaatcgcctggggagctttcaaaacacgccaggccaattgttcccaatacctgctgcagatgtctgtgggtagggcctggctgtaagtgtctaacgagctcctcgggtgatcgtgttctgcggctggacctggcaggccctgagaawragagagagagagagagagagagagagagagasagagagwctgtgtggcccagtgcctggagctccctgtrcagtgaaacccagacccccttacccgggtcccaagcagtgctcaaggggctgaggggcagtgatgaagctcacggtgagatgtcaacaaaagtctccgtgtgcactgggaggtttgaagaagggcaagcagcaggctttttgctgttgttttccaaaaacaaaatcaactgaggtttgccctccagraagcctcagaagtccttctcccacctctttgggttgggttctgcccctcccagaaacagtctattgagccctcagtcagagggaaatcagcaggcttctccaagggaaactgaggcctgggtctggggagactagggtggatggggtcaccagctgcgctgggtgttgtctgggccactggcaggccccagcagcagcccctgctgacactcccgctctcccagccacagccctgggtgtggggcctccttgcagagatgctgtctgtggcggaaggggtgggcctgctggcagggggtgctctcctggtccttcaaagagcaagggccagccaagcacaaaggggcagaactgcctgccagagaggctgggcatggcctttgaggggacactgggcccctgtctccctgcctggcggctattgtaggttttcctgaaaccccacatggctggggcccacgtaggctgggcctctgcctccttggccctttcccatcctcactcccaccccagccttgcctgcctcytcaagtctgggtcattctcctttgagcattcgtccaggcatttccctctgcccacacgctccttcctcctgcccaccaccccctcccttcaggcgcttcggttttttatccgctctttgggttgcagcaggagaaccttgctgcccctaaaggctgttgtgggtcctgagcttctgccatagagggactttgcacccgctgccctctgtcaggctgcagatgctctgcgaaggcacctctttagcaccaggtcatgctctgataaggtggcctgtagggcaggtcagaaagggtgacctctcgggacagggatgaagaaagggggctgggttaaaggggcatttgccagggctcttccaggaatagcttcatccacctccccctgaactggcacttgaggtttcctggagttgggggaagctctgtgacatgggaggtcagagggtgctccggacacctccagcctcacccgactccatagaatcaggaagggccttcataagtcaggtgctgctctaggaatttcctacagcagccttggtcctcaagcttacacacctcagtgacggggagctcactaccttatattgctgactgttccctggtaggacatctctggctcttaatgtcrtcagaggcccagccaatctctacacccaccaacccacaactccagcatgtcttgaaagcacctcaaactctacrtgtctaaactgagcaggaaatccacccctcaccagcatcccttcatatgtgagcacaatgacctccagccacacccaccccagctctcctgcccacaccttctcagcctctgcagacctgtcctctcctctccatccctgcctgccctccccagccygagctgcccccctaactcttctgctctcacccatgctgtyctgactctcttatccacacagyagccagaggggaccttttaaaaaactaagtgtaatcacgccgtctcccaattaaactcttcagtaactccctattgctctcaggctagagaccgcattgctaaatgygacccatatggccttcaggtgcagcccttgtcactctctccagsctcatggctcacctgcccttgcttctggagtccagctacatggtggcacgctgtcaaggctaggagcacagactctggaaccmgattgctgggttcaagaccagctctgccagttactgsctatgtgaccttgggcaagttattcaagctctctgtgccttaggttatacctctgtaaaataagggtaatgataataagagtacttttatgagggttgtttttaggattaaaaaaaagttaagatataaagtgctttgagtagtgactggtactccagtaatagatcatccaatctccttgaaagagccaagtttcacctctcacaggcatagagtcaaggtgtgggctctgagccaggcttccygggttcaaattctgcctctgtctttccaggctgtgtgctgtcttgcaggttacttggcccctctctgtcttagtttcctcgctcatgtaatgggttgcagtgagtgctggaggaattaacattaagctggtgcaaaagtaattacttttaattgccattgaaagtaatggcaaaaactgcaattacttttgcaccaacctactccatgcaagatccttgcctggctcctaagaagtgcattattgggttagctttcagcctctcccctgtgcctgggcccctcacctggtgagttactgctcagcttcagatcttggctcatgtctcacttttctgccatgagccagactagtccatgccccggctggctctcagctccttgccccttttggccacagctctgatgacaatggctgccccacattgatgtgtggtttgtaggctcttctgtttccctccctagagtatmaacttcatgggagcagcctcagtctgctttgcataacaaggttcccaacattaacccctagaacattgtagatagtcaatrcccatttgtgaaaggcaggaaaggaggaaagaggtccccaacattcaccccaggacttctttgtggtggggggcccctgccttatcctgcaccaggcctagagatgacccctggacccctgagatccttgaggtcctgggccccttgccaatctgcctcccatgcacaccatcagttctggggcccggttccttgactcctygcggcagtagcagggccttgggttagctagaaggaaggacttcgtcatacgaatgctgcaaagctcacataggggtatgtgcctcctgtccctgacttttttcctgaaccatagagcctggggccacatctgtgtgtggttctggtgagacagggaggcagagggagacagaggcagtatgtggtatctggaggacccgcaggcccctgtttcatggccctgggagtctgtgatcaggtgccaagtccactgcacgaagagaactgttgaggtagggagaagacagctcctaaggcacccccgtggcaccccctccctgtccccagcacacaggcccctgcagcagcccatgcaagtccagttctggtgggtgtgggttggatgtcttgatttcctccactttgatttcaccctgccaagctgcctgtgccctggggcatgtggctacgagtgggcctgtccctttaacccctttggtggagccagccctctcctgcagtccctgggatgtagcccatggggccagcactgagcagccaggtcctgcctctgtacctcctcacggaaatgccctccctcccccatgcccatttatcccaattctgccaaagcccacctcctcctgggaccacaaggatgagtcctagagggctgacctaaaagtaagtaattcggttggagtgtggattgagacatctgacccgggaccctgacatctgagggccagctcagtctgcaacggggcagccagcccagcagcagttatgctgcaggatgatcaaaaggcctctagcagatgggatcaagtccctgccctgtgccaggcattgtgatcagagtgctggcacaggkkccggagcttygtctgctgtggtcattccagtgggcacctcctcttccttcaactcctagttctcagggtcaaaaggcagggctgcaggtcagaccctcctcactcaccctccctttccagaagaggggctctgagtttcccaggaggaggaggagggacatggcaagtgcaggaaacttgaccacttgtcgcagaggtgtatgccatggagccagggcagcaggggtcaggccagccttattacagcaggtgggaggaggcaggcctggcactggctcaagagagaagtggccttcacctggccaccaaacaaaacaagctggcaaaacaggtgctcaccctcctcacatctggatacctctgtttatttttttgcctcatctcattttatcctgccagctgtcttgcgtagtctagcagatcacttagattatctccattttatggatgagaatatcaaggtccagaggggttatagattttgcttaatacacagttagtaggagagttgggactagaccccaaggctctggcactcccaagtgtagtcaagctgatatgatatgatttcaacactgccaagctctgcctacaatagattcttcactggagtttgggggccatctgtgccaacccaaaagaaagtcccactccagcctccaagggaataggaggcatgcactaataatgtcaaaaatcaattattaaatgatattttccacctaaagtgcttagcacagtggctgatatatggtgttcaatgtgcatagctgttataattaatattaactcttgtttaataattcaacccaaaattgatagatgctccgtggtttcccaggcacttgcctctgcgttatctcattcggtctccacattggcactcaggaagctggcagggggtggtgggtcatatccctattttgtagattccccctgaagggacgtgccaggctcaaggtcacagctgcaggtctcacctggcttctccctctgggctgtgtctatgccacagcttggacccaccccaygtattgcagaggcccaggttgagctaggacgttttaagagccctgaggctgagacacagggagggagtgttccctaaacccaagaccaggctggagccacattctctggggggagtgagtagctgcctggcattttccctttgatactgatacaggcattttaatagctgcaaccgatcaggcgggtgatgtttcagctctggccacatagggcattccaggaggccccggctgccagcaggggcaaaacaggaaggcttctctgccgagggtagctgagggtccaccctagggcctcatcttgggggtgtctcaccatgggtctcaaagtcagatgtcaagggggccaggctggtggcctaagtaggtgaagctggctttggagagagagtactttggtagcctagatggcacacatccatctgaaaggggcaaccaccacacagcaccacctgattgtacatgctcagtgttgacaggtctcccattgtgcaagagagaccagaactggatgtgaaatctcctgatgtgtgaacaaccaatatttattgagcacctactatgtgccaagccctgttttaggcrcagtgaatagaacagaacagaaaaaagtatccaggtccttgtcgaacttacattccagtgctacaaagagacaataagtaagaaaaataagcaaaaaaaaaaatcctaaggaggaaataaaacaaagtggtgtgctgggggaggaagaattttggaggaaggggtgcaggaggtgaggaaggcctaayagcaagccaggtaggtagctgggaagagaacacccaggcagagagcccagtaagtgtgaaggccctgaggtagrgaaagcccagcatgtatgagagcttcagaggcctgtgtgattaccctggctgccgtgttgagaaaggtctgcaggggcacgggcagaagtcrggcattcgttagaaggttatcacagtaattaggccaggtggtagtcatggaggtggtgagaaggggtcagatctcggatgcgtctggcaggtaaagaacaggaattgctaatggaatgggtgtagggtgagagaaatagacatcaatgataattgtgaggttttgagcaactggtgggatggggaagctgatggtaggggcaggtccaaggaggagttgggagagtctatcagaagctcagttttgccaggctaattctgagatgcctatgaagggccatatcaagccagcagccagatagatgcatctgaagttttgaagaaaggtataggttggagggcgtcattctgcatagatggctttgaagccatcagactggatgaggtaccctagggagccagtgtctagagaaagaagtgagaccctggatgtggaccctgtgacttccaacatttagacatcaagtagataagaaggaatcagcacaagactgagagggcacagccagggtggtggaagggaaatggggagagtgcgtgtcctgggagccaagggcaggaagtgccccgaggargaaggggggtgagcaaaggctgcagcctggctaagaggaagcatgaggactgcccamcagatttggcaacccggaggtcactggcaacctgcaggacagttcttaggggacagtaggggaagagccaggtaggagtggtccaggagagacgtaggaggcagcgaagattgtcatccaggagtttttctagggaaagagctaaccagagtcaaaagaggattattctcttttccgtttttatgctgggaataacaacagcatatttgcataatgattccgtgagggtgggctaactacagctaaatccagcttgcagcccrtttttgtaartatatattttttatgggagcacagccacactgatttgtttccaaactatggctgctttggcctgcgatggaagagtggagtaggtgtggcagagatcatgtgtctcacacagcctcaaatatttatgtttgccggcccctgatgtaaatgatccaatctagaggaggggattgatgaggcaggaaggcaggggacttgctggcgacaggaggggttggccctcgtggaagcacagatggggagcttaggaggagagaagggtgctggcaggcgcagatgcagatggayggcacgtgtagtggtggctgcctctggaagccctcttctgcttgcttttcttctcaaggtcatcagttgacaatgaagttgggggaggggrcgttggtggtttggggagaggaagtgtgaaaactcccaggacagtgcaatggtgaagggttgagggaaccacagaatgattgctgggcttccgtttgagatctggatcatgaatttaaagtaagatcagtcggcgaggttgtgtgtttctcccgctttaccctgctgcctgtgtgcaggggtggggtaggaggagacgttggatctagccaggctcgtggcttagtgaacagggygggtgtcaaggcagtggagggtgcagacagggggtggtgataatcactggccacagaatttgagccgggcacggagggaagtgacacatggtagtgatggacagtaaaaagttggtagracccgcaggttgaaggccctgtgggattcgagggtccctggggccggggtgttaggtccttgggaaatggagatctgtgggcagagtgttgaagcctaggctgtggatgggtcatggtgctgttgagatttaatactctttcaaaataaactctgggcaggccaagaaaacacttacaccctgaactgacctggttttctagctgtgcctgtggtagctttgcctgctcagatgcctccatcccctccaatcaaggctcccgatttccgggtccacctttcccacctgccttctctcccaaactccagagctgcccatgcctaccctgctgggytccacaaactcgccatcttcccacaaygtgctcttgccgctgttatgtcctaggggtggcatcttggctgcccaaggcagggcctggctcccacaaccaccccaaatccatccagtgcccagttccttcttcctcccacatctctccactgggtgatgaccatgacatcctccagagaggacctcagcccaagcggtctcactggtctatactcaacgggctgctggagtgccctttataccacccaaatttgaccacatgacctccttgcttaaaacctttgaatggttcctccatgctagaatccttacctgggcacacaaggcctggttattagtcatggttctccagagaaacagaagcaataggctgtatatagatgcacagaaagcgagttatcaaaagagattggctcatgtgattayggagatgagaagtcccttaatctgccatctgcaagaaagaggcccaggaaagccagtggtgtagctccacttaaacctgaaggcctgagagccaggagagccaatggtgtaaattccagtccaagcctgaagggccaagaaccagttgtggtgcagggggagtcaatgttcaagggcaggagaagatggatggtccagctcaagcagagagagcagagtctcccttcctctaccttgttctactcaggccctcaacagatcagataatgcccaccccctatggtgaggacactgttctttcctgagtctactaattccagtgctaatcgacatacytagaaagaatgttttcccagctatctgggcatccttagcccaggcaagttaacagataaaattaaccctcacagctcccactcccgactcaacacccaggccctctgaagtctacagtcacctgcacacatctgagtatgcttctcccacaccaagctcagctgtttgctgatggactgtgactcattctctattttgcagtctcacaattagtagaaaataaacataggatctattgaataaaagcattgaacttgaagttagaggacccagaatttaagccctctggggtttacttgttcaaggcaattccctttccctttctgggacttagtttcctggattatacaatggggctgatttctagcctgcctgttgcacgggtcagtgatgagggtcaggtgaagtctcaggaaatgtgaaagtcacatggaggtctaccttaggttgggttcccaagggaacagtctccaaagtggaggtctatgagtagatgacttacttatttgacttattggcatcaacataggagggggagtgagggaagcagttgggcagaggaggggctgagctgtgatacagtcatgacagaggccccagctggtcctgtgggagctccgtagctggggtggccctagagtcagtccaatttgaggcagaggggccaggtctgcattcctcctgtctatcagtaattgaatatgggttgcmtttgggggagagtgtgaccctgatcaaggctgcttccttgagctgagagcagctcccagaaagaggctcagccatcagcagccaacactcccaacagctaaaccactggtctaatcctgggagcctggatggcccaccacagcacccatgagctgtggtgctttatggctgtcaacaagccccagaaccagtggcagggatccatgttacacattcaaagtctctgcccctgccttaatgacctgccttcctgccccccacattcctatcccatgtcctcactcagatcactccagccacacttcaccccttcctgttcctcagatgctccatraacaatcctgtctctgrgccttcgcctctgctgttccctctgactggaacacacttcctccagacatcaaaggattcattttcttacttcctccaaataccgcatgactcattttcttaccttcctctgggtttttgctcaaagtcccctcaaaaagaggaccttccctgacctcctggtataaaaaaccaccttccatcattctctgtccccttgctttactttatttttctcccagcatttatcactgcctgttacacattttttgtttttctattgatttttttcttccacragaagttatgcccctctaggggtgtgccccatgaggatggagcaggggcaccacccactcatgccacaaattctgtctccagcccaaccctgtgatggcagcttgctcagtgctgctgctgagtgggtgacaactccgatggttacaacctttagccaaaatgctgccaactcctctggtcttggcttgtcagtcatttagccgacctgtgtcatgtgccttctgggtgccaggcccccaggtgattggtggggagggatgtggaggcaggttcgtacagtcccttacaggaaagcagcattcatgagccaggctcagagctggctatcaccagaggggctatcaccagactttggcctgggggctcatttgtttgcccagcggccgctctgtgcccacctgtaccttggcctcaacattcatcctcctaattgttactcagcctcccctttctaagtgagggtccccactttggggtgtttcccctcttctggtctaccttgatctcggcccccttctgccctcagagccccccatcccatctgtcactgtgttccctccccaggcatttgcactcaccttcctccagcaggtggagcgggctttgtgccaggaggcgtgagttcacacctcagatccactacatcctggctgtgtgaccctcagcaaatcactctacttgctctgaatccttgtgaagctttctgaccttccctccccacccccaaaccagaggcgataccacccttatgacacctcccatattactttcttcacctctcttgtggcccacactgagtggcaaaatttcacagtagtgaggaagcaaatagctctggctgtcatcctaactcgtcaaccttgtcagggtagggactacagtasatcaggtgcagtcagtcctggccagccagarcacaggcttcatgtggccaggtctttcagttagtttttcaagagaaattacaaatgcagatttgcacatgaaaccacccacttcaaaatattggcaacaaattcaataataataatgatttaaagctcactgtgggaaccaaataaaatacactgaaaggcctatttggccctggggctaccagcttcctatggctgcatgagcatcacagtgtgggtttgaatcccagctctgtacyttacttcagccttgaccttggccaggtgcagtctcctctctgtgcttcaagtcccttacctgtgacatgaacatggtaatagctaacattcattgagaacttcctgggtatcaggtgccattctttctatgcattaatctttctaacttcgcagtaatccaatgaagtgaggactcttattagcccagagtctgagaactgtgtgttagtccagtcagcctggctctagaaatatccctgttaatggctagtctggccaactttgttgcaagaatcaagtaagagtccttatgagacccttgtcacattgccctgtgcagtgtaagcctgcagagttgacacacaggggaatcctgcatgcatggtcattacgcttgctcttctccacttgccaccatgaacatgacaactcctcgagggtcggggtgttctacctctctgatgctcccacctctttgggaccttccaggtaggctcagtgatttgaagggaagtgaggaagatatttggtggaggggtgcagagagccttgccatccccctactgctgcacccctgcccagcttgcaaatgctagctttgtaagggacaccagaagaacagaaggcactgtccctgcccaggggtccatcaggagcccagtccaaggcagraaacaattagcagagagctgagaaaagcatgtcattgtgcacatgagcatgaggtgcaggaagatgcaactggtttataggatcctgtgtttggggttaatttctttaagagtgctccaaagacatcagacgctgtgattaccgggatgggctttcttgtctgcttgttattacccagatgcccggtggccagtggaaggccattaactgcctgtctttgatccaggaagagttctgccggtttccccctcttcctgccctcctcgtcagcccacagctgctttccagggcttggtgtctacgagctcctggtgactcctcttgtctgtctccttgtacagaaatggaagctccactcaaggaggcgccgggaggccccaaagacatctccaggatgtaactgcccaccaggtaagcagccctgcaaataggtgaccgcggatgttcctaagactgagaccagaggctcttcctggtggccatgctctagccacacctcactcaggccgtcacttttcatttgaaagacaggagtgacaatatctgtggttgccttccatctgctcacagattggcctgcctgccccrcatccatcagtccacccaccattcatttgttcatagagtattttatgggcctgatactctttgaaccaggttgtggtgaagtcrgataagatgatgggcatgactgttttgaaagttatgaagtgctatgcagcgtcaaagggaccatcagccccccaaggggaggcaccttgcttgctgtgttcatcattgtgtccccagcttcccaggtatacaaaaatgtttgttacctgaatgaatgaccctataattgtaagaccttattttctatagctagctggattagggcaatgtgtgttcactatatggcctctaggctacatgcaacacacacatgcttacatgcaaggaatgaaggcacaagccaaaggtcgcaaggtgatactgtgtaatacagtgaactggtctaatctagaacaaaaatctgctttcgccacttactagctctgtatgggtggagccctgacctgtctattctagtgctttcctctgtatccttgggcctgttcctcaactgtgtctattcacctgtgtaacagctgcgtactaaggacctgctgggcaccatgcagtgtgtcgggttcaagtgcattgtccaccatgaatgcaagtgataagttacagcttatgagaaattttctaggtgcctgttacttttctaggtgcctgttattgttaagccatgagagtgacagatgaggaagtttcactgtttccctgaggaactagaatgcactgtacctctttagaggtggggaaggaaggcctaaagaagagttgcaggagacaaggtatcacatttaagtaatggcagagagttttggtcygctactggcctctgccagctcagcrtgtggcctcctcgatacccacggtggcaggtggcactagcagggtgctcactgggctctctggctggccctcctctggcctcagaagccgagggacccaagtaacactcacccaggtccccaagccagggaagagaggctgacagatgttaagcatatgggaaacgarggaccgcatttgctggagagtgaatgggctggggtgggagtcacagttccaggatgctgccctgggagacaaggagaccgtgaaaagattcagctggacccggtgagaagagggtcgtccgggttaattaaaagggtgtccagaagccctgggaagctccctccctccctctgggcccagaagatagggcccgggggtctgggaaagctttcaggagaggagtgccaagattaatgagatggggtggaggcaagggttgggtgatggggcctgggcagagagaccgttcgcatcagggctcatgggacagcccatgtttccaaggatcatgtctgttgcccttataactcttgggcaatgacaacygatttttgctcagcgtatagaatgctggtcaagggcaggatatttgaagccacagaggatgtaggtttgaattccatctccaacatggaccagtcttatgaccttcagagagttatttaacctccttgtgcctcagttgccttgtctgaaaaacagggacaatagacaccagcaaggtagagattcctcgagataatcctgggaactgcttagcatcttctctgattcctagtaagcatgattatgattattttctcaactgcctctcgcacttcaaagatgcagagaaatccttatcaaatgccatgtcctagtgttgggggcacatttgtggccaggcagagacttgcctttctcccttccctgccttattggggaaagcacatcagttrtctgatggccttcaagtccatcatcagagtgggtggttctcaagaggtttcaatattgtgcctcagaaagtcaggctcaggtagtcctgggaggctgggagctggggaggaatgtggcaggagggggaaggacttggaagagtgcttctcttctccctgcctgctgggagtctgtgtggaacccackggtcctgggcagtgaggagaagaccatgaagcagctcagagggtcaggggaggaggaaacaccatggggagaagaaagggcttgaccttggtcctctgcggggaagggacagcagcaagggctgakttggccaggcatagaggaagagtrggcaggggctcctggaagggatacccctgcatgttgagaatttctaaaaaggcagtttggcccaaagcatacatcagagccagtgggcaatgcctgaagaatttaaagagaaggccccaaactcaggcaaaatcagagggaactaagatgctgttccggcctttcgtaactgagtcagggaaggactggaatggccacacggaagcatttcacatcatggaatcacagcaaaatctcctaggatgggctgggtcctgctgggtcccctgccctgcctctctctgactgacctgaggcttctcatgccttggtacagtaacctcctcaacagcaaacccaayctattataaataatagcagttactgccactgtgtcccacttgagcacctactatgtgccaggcacaggactgagcactttatgtgcattggtaaccttcctcaaaatactaaaagtaggtagaagggaattcagttctaacactctggaatgtctgaacatcctcaaattcgcaaagagaacatcactgtcattcttgcccttacatcatgcatttccgattatctcctgagggtcggagtttataaacaactttaaggctcctgatccttgcagaaggactcatacaattgtcaagtgccacatacaaattcaaagcttgatttacttttgtcttgcagcacctaatactgtaccccatacatagtagatgctctgtgaatgttcaataaatgagtatcagtagtcattgctgatgactggctgcttcctcgtgttctccctctgccatctgattggtttcagacaccttatccctcaccccaccccaaatcttgcctgatgctgaatttactgctattgggacaaaacaaacacactcttcctgcccactgcggttgctgagatggaagcctcgatcctcaaagtggtgcctgccctctgtggccagctaggccaagccggagtcctgcggtgggtgtgttcttccttgtggcagccttggggccctgggcggcacccagaaggcctgggacacataatcatgggcagaaaacctgcctctttccctttctatctgaccttcccagcatcctcctgggatcctccctgtcccaaaatagccatctactggctgagatctggctgcatcctgcttctgggctgcatgcgctgtttgccaagggagtgatgggcttgcaggcctgagaaggatgccaaaggtcaaccctcagttaggagggtcatggctgccagaagttcagaggaataggtgtgggccatttgcacagcatatggcctggtgggataggagaatggtcttgggaacagatatacataccatgagacttcctaggccacttgagaaaaatacaaagaccaaggaaactttcccattatctgtcccttttcttattaacaaatgaggagcaggacattatagtctagccagcgaggaaacagctacttcaggcccgccacgctggggctgggtggggctggcctgtgtcaagtccagggtggggcaggcagtgtgaaggatgacacgtttttcacccagagggaagaatggctagctcagctgctgaaggaaatcacttcgctgtcggagcctcatctccaagggaaagggtaggccagagtcatgccctgactgccaggccaaagggctttggactgcagcagtggtggcatgggggtgatgtggtcaggcttgtgcactagcgccatgaccagcactgcaaagaggacggatgaaagcggagaagtcgccttcagccagcctaatgggagaagccacagctgccttcygggtcagtgtgctggtgaggggtgcatgaagtgcccaggagccaaaggagctggggctctgggaaaacttcaccaaggagaggccttggaggttgttcaaaaggaacaaataagcaagtaggaaggcatattgttagggcatcatagactccatatggtgtccacatagacaccataacaggagaccccccaaatacaaggacttagacaaggtggaggtggaggtctcccttccctagcaggccagggctgggagctggctctgccatcttcatcttgtggcatccttctctggcagatgcttcggttcttgccaccccatgaccaacacaaaaggggaatgggacaagtggagtatgtgctcaaaccctcaagagcaaaacttgaaaaaagagacacagatcacttctgctcacaacccattggccagaacttagtcacgtggttacccccagattcaagggaggccaggcagtatttttcatgggtggcgatatgcccagatagaactttattacgatggtaggtgggaaaacagatatcaaagaacaactagcatactgcacagaggacattccaggctggctgagggactgtcatggacaaaaactcggaggagcaagaaaaaggcagtaagtttcgggatgacatgcagttgaagaaatctggagctcagagcagtaatgagaaatgagggtgggaggagatgtcaagactacaaagagtcaggctgaggctgcccggctccctctgtccagtaggaggcaaatgatttcatccagagggtgattgattggtaatggctgcctgattgattggggggctgtgctgagtcagcttctgaggctgtatccaggttcagcagaaaatgtggtaattgcttattgatgtctgctctggatacaggagtggtgggggagcagtgcctctgccctggctgtgctgtcctcacaggagatgatgtggcatcagagaaggtttggggagcagggatgtcacctgatacaatttgtattctagaacaataactagcagtgatgtggaggctggcctggaggggagagcagccccttccagcaacaagagtctgcgatcctacgaatagggctttattttcttatgagctgctatttacctttgggttgtaatggcctctccagccttggttgtttttccacagctgatgagagctgatgcccacacatcctaaaccctactctctagctagccttgccttattttccctggcaccagactttgcccccaacagcctcatgacatttacatgggcaggacctgtagccagagctttggtcacaaaccaggctcctcttacctcccctgtgctgcagcagcgcagaccccgagccccgcttctttgtggtccttcttatttcagacttgatttatttcagatcttaggaatctgcagaccaaagcgtcctttgtttctatcaatgaagaaaagattcaagagttgatggttattttagggagaatatttaaactaaaggtatactgtttcaggtagctccaaaaccctgctttacatgcaaataattgatgggctacttcggggtcattcttgctrtttcttaaagcagatcccctggggccagcctactaagagatcctmctgttygattgctgttctcgtcaatattcagactcccccttgttctgctgcagccagagtggtgtgctttcccctgcgatgttagcctcagtcctccccacccccatctcttcctcctgactttgcagccccaccgcatgtcccatctggcctcccagacacccaggtgcaaacccacaatagcaacatcagtgcccccttcgccttcacccactgcactccatcagccaggttctgtcaactccactcctctgctcaaaaaccatccatggctcctcagtgctcataccccccatcccaaagataagcccactttgtctctctagcctgatctctgaccagtcttccgctgtcctgcttttctttcagtaaaactgggctgctcccctgccagaacttacagtgtcccacttgcayacaactcatgctattctggtatctttgttctcagtttctacctagtgaactcttcayccctccatgtcagctacatcatccctgcagctccttccatcctctcctccccacttggcctcggccatgagttctgctgtttgatgagtatgttaacrtaatgcctggtgtatgctcgatgtacaatccaggcaaaaccacccactgggacaagtaatttgtcctaaaatgagaagtgcaaacagaccaagatgtatacacctgcagaggtttctccctgactgctagcattaaccatttgctttagatggtgtaggtgcttgagagcagcatgtagtatgagtctcttacacagcaagagtagcttttgtgggtttccagccagrgagagccttcccacctacaaaccacactgggcagcttccttgccatctccgcctggatcctcaaacggcacacaatgaaagccagcaccttccccccacctggccctttccaacattctcgacctctcccagcatctaagccatgacctgggcttcaggctgaacaccaccatttccctcacaccccgtcaatcaccaagtctcattcatcccactctgtcaatttcctccacctccaccgtcatcacccttgttcagggtgctgccacctgacctcctccaaacccttctttacacagaagccagaatggtatttttaacattgatgtataactccagataaccaaagcacttcagtactttccatcacccttaggataaagccctaaatccctaacacagcttgttacctgctctgacccccctcgccatgatcccttctgcattcccagcaggccccctggcagcactggtgctgctggttgtctgaccacatttggagtaacagactatggctgacgggagccctggccaagccagacagaacgttatgctttagaaatcagccagtccataaagcttggactcttggctccaaacgaaggcccttccttggctgttgcagccccatttcaggcaactggcctgctccacaaggaaggttgaccatcaccttggagagggccctgggtttaaggagcacccccacccccmacagccatagctctctatgcccctcatggggtggagggtcaggtaactggcgtgggtgaggccaaaatgaccacagctgctgggagaccaggtgctgcgcggctgctaaaatgctccaccatctgcscctggaagarccttttctctcaaggccctctggctctgcgtttcagaaattcctggggaattctccaaagttcatttcttccccatttcctcccaaaagcacttccagatccccagccctcctggacgctgctgataatgtgtttctcctagatccgctctgataacactggggtggtcggctgagatttgtagggaaataaaaataaggaaatggagggttccggaaaggccagaagagccctggactgggaatcagtcccagaccttgaaggactctgagcagattactctcctctctctgggctttggtttcctcgctgatataaaaaggtgaatgactgaaaaatcatttggcagtatctggtaaagtaaagaatcgtgtccaataaagcagctcccttcctaggcacttytgagagaaatgctcgtctgtgcgtaaaagaagaagagatgctcactgcaacactactgtagtaagaaaaaaggaaaagaaaagaaaagcctaaatatttgtcagcaggagtgtgcagagatatgttgtgcagtattaaattgcagtactttcatcaatgaaaatgcacacacagtaaacaggataaacgagaccttcagactcagcaattccagggctggatctcctcctctggagggaaaaaagcaaacgacaagagaatatttacaatataagtcatttatctaaagttaaaaacataaagacaacacaatacaatcttcaacaactatatgcatagatagtaaacacgtaaagaaatgatggaaatggtaaacatcaaattcagcagggaggagggactgggtagagactggggtgcttagggaggttcagctacatgggtagctattaggctgggtggtgggtacgccaggttcagtacatattttttgtaataactttattgcgatgtaattcccatatacaattggtcgatttaaagtgtacaatttgatgggctttcttacattcacagagttgtgaaaccatcaccacaatcagttctaggacattttatcgtcccaaaaaagaaaccccattccttttggcagccatcctccattttcgcccgccctccgacccccagccccaggcaagcgttaatctactctccatctttatggatttagcatartgttttcaaggtttatccatgttgtagcatgtatcagtacttcattcctttttattgccaaataatacattatattgcttttaagcctctctgaatgtctgaaatatttcaagataaaacatatttaaatcataaagttaatgaacggatgttgttgaattagrggatgttgaaggaatccttcatgtctgcctctaaacctaattggcggtctttaccagcaaggatgtatcattgcttgctgcctaaatcccrtgtgtgtgcaccctcagccacctgtgggctggcagcaatggttctaaccctgccaggacccagayccagggggtcaagccctgctcagctggactctgacacctgaccccctctgtggtgctctgaagcgyccttgctcttcctctgcctgtgctcagtgtcacttcctctgagatgtctccgttgaatctcccagacacagctgggggccctttttctcagttcctagagctagaaaactaactcaccatggggtggctatttggtcccctggtgagagagcagcagccacgcttacagccctgcaagcttctcaagcttctgagcatcagtcctcaccctaggaaaatgaagatgttggtgcttgcctgatagactcgaggtgatagggagataagttatgtatgaaatttttcaggggtggtgaaggatttgcttttatgcctctgactcactcactggacatgaagattgtcctgggcacgagctgtgctgtctgcaggaaggagcaatggactggcttcaggacttgcaatacccactgccctgggagaggcaggctaacccagcagttacaggtgtgggctctgacttcccagtaaatcccagtagtcccagttctactccttgttagtcatggtactgtggatgggttactctcttgacctcacataaaatgggaatgacagcacctaccttgttggactgatgggctcaatgtggggcccgacacacacttggcgggaaatgattgttagttgccacgatgatggtgatgacgacatgagtggaaaagggcttcaggtgacatggggctgtgaggagaggtcatagtctttgcccagttgcattcagccatgtgaggtcccgaaggcaatggcacgcttgccactgaatgcaaggaggtaatgtggtatggctgctcaaagcgttggcctactcctacttccctgatctgccctgtggaaggctaggcccttccaatgctatgaaaaatgctggatgttctatttatgaracactgtgctaaggcactgcaagagatgggtgaaaggtatacccacccttaaagatgtgatgtgggatttgtcacaggtttaggggccttagttggaatcccagctctctgtctagctctccagcacagcaaaagccacctaccctctctgaattttcacttgctcatctcttacatstaaataaggatcttacagggttattatgaaagttcttggtcaaccatggagatacaaatggagaatatttggcggacctcgtggcacaatggtagtgcgtctgactccagatggaggatattatgggaggggagttggactggtgcacaatccagttattttgtagaaggtagaccttgttgagtgctgtgggatataaataaagggctgtggacagggcaggggaagggtgaattacaagtgcaggtgaccattgattccttggaggagacactggaacttgctggtgatacttagtgttggagggccttggaacccccggtttatgaagaaagactcgccctccttcgccccactccatccagccaccatgcggagcaggagcttctggagagcaggacttgccttaaaggctgtgtttgtgccccttctccagacagagtcgggcatcctctctccacatcctgagagggaatgggctacatttgtagcagctgtagttgggttggaagtgattctggattttgcaggaaatccattgtccaaggaactctccagggacagtcagtaggagaacrmggggcaactgcaagtgcctcgaaggtagaccgcagcacgcactgcctggtcacctctccctgtctgccaggctgcctgtctcagagagaccagtggaagagtcctgaggaagaaagacaccatcctgttccagctcccaggggcgtcattcactcccacaatgattccatgtgtttgtatcacaccctcacccatcagaagcctttcccttagcacctgccctgtgagggtggaaactgcagccagaggagttaagtgaagaaggactgcccttctgggcagttacaataactggaagttacagtaactagattgagcacccccacctctccactcctcacctcagcccaggccaggaatcagcagccagacttctggactgcctaygtgctctttagggctccaggatgaacatgaactacatcaacaagcagcctgggtccacctgcgggtagagggctgctccaggccctgtgttcagtgccgtgggatgcaaggtgatcmggcaaagttccttggttcagggctgggcaagtgctaaacagaagcataggcatctagtttgggaaatgcaagaaaaggagtgactactcctgaagggaggaatcagaaatggctgcatggaagaagtggcatttgaaggaatccctgaatggcaagtaagatttcagtaaatgagaatgtgcatgaggacattttaaaacaatgaaacaacataataaagaatagagacctgaacaactgtgttttttccacacacacccccacaccccacaccccactstgggaaatgaggaatgatctggagcggttgtagtaagctcctgcggagggatggagtaggaggtacggctggaaagaaaagttgggggttggggaggcagaccgtggagggagttggwcaccaccctgaaagccagcttctatttggtgggtagcaggaaaccacggaaggtttctcagagggatgtgatgtatccagctgtgtatagctcagtgtagagggtgaattaggggcaggagagaagctgggaatgggcagcaatgatctctctaaggcagcagtccccagtctttttgggaccagtggccagtttttccatgtatggggatggggggatgacttcaggatgaaattgttccacctcagatcagcagacattagttcaattctcacaaggaacctgcaacctagatccctcgcatgcgcagtctgcaatagggtttggggtcctgtgagaatctattgccaccgctgacctcctgctgtgaggcctggttcttaacaggtcacagtccagtccrgatctatggcccagtgcttggggacccccgctctaagagaagacacagagaagcagaggaagcaggtgaggggagtaacgagagggaggttgcagaggtaacattagcaagttctagctacctactaggtgtgggccaaggaggggttgaggcaattatgagcctctgagcccaggtaactaataataaccatggcatatattcaacagatgaccttgggccttgtgctttaaatacaatatmacttacattctgatcaagcaccctatgatgtaaggctatggctatccacatttcaaaaatgaagaaactgaggctcagagatgttcagggtttgcctgaggtccacggataagggacagaggcaggacttgaacccaggactttcaatgccagcgcctttgccctccggacaaggcagagcagaaggggggtaggttggagaggaagggtcaaagttctgtttgggacaagctggaggttgggaggtgggggatgcaggatgcctcatggaaatgctgagggccctggaacagttcgtccagagggagaggggctagaagcccattctgagcttgtggacttagagaagaaagaccttacctgtagccatcgtctggggacaatgctcagggaagtggccttacctgtagccacctgccagcaacactactcacagaagagagagaacaggagtgcatcttgctggagagctggctagaagcactgaggtgggagactttctgccccaggacatgcccagagcccagggccctgtgccccttcacccaggactcacaatcctgcccgcagcacacatgggtgctgtgcagcttgtcccaggctgctgggggcagatgagctccctgccctagacccagtggagggtcccttgatcttgccaccacctgctctgccctgaaggagaaggttctgccacagtgacgctaaaggaatgccagatgctcctttggaggaaaggagcagcaagtgggaagagcccgcgacctctgcttgggcagttataagagactagaaggtgggacatgccagacccatggatgcagtccctggctcttcctcctggacccacccaggctgcccactccctcgatgactacccccactcttgtcataacccagccagcctctcccctgttactccctggcaagttcctgttcagccactaaggcgacttgggtggcctctgctggcagtggcactcttgtccccacacacctggccctcttcactgcaccctcccaccagctctccaggttacgactcacactgccctattctcctgatgaggaccctgaagctcagaattctttgctcgaggatacagggttaggcagtggcagggttgggactggaaataagctctgaaacatcagaaggcaaatgccccccagggacccaagtgctaccctggagcacagtgggaaaccgaggactcggcagtggccgtgatgcttgtccagggagcatggagtcagataaggctggaggacattaattagtaatgataacaacaacatctattaagggcttactctgcgcctggcactgtgataagcactttattgcattgtctcatttgatcctcataattactttatgtggcaggtactattattatctccatttccatagaagactggggcccaaagaagttctgtaacggggccaaggccacagagctagtgtgtgttgaagccagaatttaagtagtctgagtctgggcaaaccagagcagcatcagaagctccccctgccaacctctagctatctctctctctcactccctcactccccaccaaacagtttttgagcactggttctgtgccatgccccatcctcaggagacagagaagagcccacagtccaggaaggggaaacacacgggtaactcagtggctgctgcagagacccagggctccggtggggctaggcggtgcccagtgtgggctacagtccyagggccgcatcctccaggattccagccctgggaggccggccccaakcaaggcggggccraggcagggacacaggtctagaaccacactgttggtggcttgtgcagctggcatttggccctgagacatcagatctgggactcagaagggaccccagagctcagctgactcggcttcctggtgagaggccctcctaccatgcaaaggggagctggctatgcacatataagcaggggagggaggggagggtcagagctccagctgctcattctctttccagctcacttcacaaactcacttcctcccacccctccagcctttgccatctgtctgtgtggcaggtacaccaggcagggcactgttggaatgtctccagtaggcaaggtgtgtggctgacaagagctggagatgggcaaacctggggcacacagagctacatccttggcaggctggctcctcagcctcrtggagaccctggggagcctcctggagctagaatgaggaccaagtatgggcagaggctccctcagtgcctgcctkcctctttaaaccccaactggggaggaaatgccwgccacagaaagatgcccagcaggcggtgggggtataagtggatgccagcttcccatgtagttatgtgagctgtcacggggtgacctggcataccatgacaggccggagggagggtggggcgggtcccaacctcccaggggcagcaggtactgggcagctgtgccgtgtgttcccgagacctgcctgtttgtggtcatggaggggtctccatgccagggctccggctccagggtgcccagggcccaagagctttgacagcctgaatgtcctcttcattttcctataggcttagaasctggatgtgagtccttctcaacaaagaacttactttccctcggggtgttcgggaatctggacaatgaggccccatcagcatcccatgggggaccttaccaatgatcctggctggtgtcggttctgattggtgggtctctgtacggttctagttccaaatgcttgaccacatcagctccagctgtatcattctttgctcattggcactcagaggcactggtgtgtcagccaatgccacagactcctgacgccttctgaggccaagagctacagccaagctgggcacctggttccggattcatctgtccattagacagcctgtccttcctgacaggtgacacccctgctgttcattaaaagacagcaaaagatgctgccacagaaactgattggaccctgaagccaccacccaccacacaactatttctagggatgaagtcagatccagcctcttctgcgcttaccctggtacattttcccactgcctcttctcctcacttctgtggagggtggcagaatccctggggagctggaagtgggccttgaccctcctgcttcatcatcctccatgttgtcccccttgtggagtggccccttaaggcagtgggatcatgttcccgtggaacggcgatcctgccaaataaataaataaacgcagagaagagacagatttcattatccaaaggaagctgaagctggggccaatttctgatgttcattttagtggcactgtagtggggctggatgttcctcagagcatttgcccaccttaaaagccccctgtgatgtgacgagccactttctcaatcttgggaagctccaagatctcccagcccttctccagtgctgtggccatcctggtcttgtcacccagtgaacacaggaggccagggccctgtgggttggtcacccctggacattccacccacagtgccttgggcagggcaaggtctgmgcctgctccaaggcatccaggcagccccctcctcaaggggccacaggagacagcagcagccacagccttgtgccttcccggtcccacttgtgtcaaagctatacaggcctagacaggatctggtaggagcctgggctttagagacagagcctraggccgagagaaggcaaggggttcttctagggtcacccagccaakgctggaaacacctagactaacaaagtggcaggattatctgctggctgagttctgggatccaactgtgttacaatgggcaagtgacttgacatctctgagctgcagctttcttacctctaagatagggatcatgacaacctctacctccatgctgtcctgagatgaaggagatgtaygtaaagcacgtggtacagtacctggcatggggaggagtttaatcagtggtattgagctgctggtactcagctctcctgaaccgcaggccaggactctcttgaccacccacattgcccttcctcctgagcctctgaaacaccactaccttggggaccggcccttgccagaggaatttattcagacaggggctcctctaagctgctttttgactgcagcaaatgctgctacctccactaagcccctgctgtatacagagcgccaggcatgcaggtatatacaggcctttgtacaaagggttcagatccaccttgggaaatggggtgaggcgtggcttctgtgcacactgtgtggccctgagtctctgggcctcagctcccattttgtaaaatgagcctgagacagcctcactgagtagcttggcgaagccagtgagttcctgcgtgtgaagccccattgaaagtgcgaagtggattgctatttgctacacacgtgccagttgttatttttgcatttacacaataatggacaagacctgaccctgtctctagaaacccatcccctgattgggcctctgaacagtgtccacaggaaatatttcaccagttatatcctgcaatctggatgtgtcagctatggtatttggagaatgcgatggtcttggaagcctccaggggagaggtgacccattcattcattcattcgttcgttcgttcgttcaacaaatacttgtgaagygcttgccatgtgcagtggcaccgagctctagtgatatgaggaccaacctgacagaggtcttgacctcttcctgcttccagtgtaatgagagaaatcaacaaaataagcacataaggaaattaacaagaaaatatccactgattgttatgaagaaaataaattaagacaattttaaaggattccccccacggcccactttactgaggtataattgacaattaaaaactgtatatatttaaggctgaccatgtgatccaggggatattttcgatagggcattgtggggggcagtgttatctgtgagaaggtgacatctgaatgacaaggggagcccaccacgcagagctaacagatgatcctgagcatgagaagtgctgtgcctgaacttgtcacagcataaagcactagaagagtgtccatgagataaattgattaaagaattaaatcagaggttggggaatgagcatgctggttagcagcaaaagccggtgcaaaatccctgaggtcggaatgagcttggtgtgtctgaagaagagaaaggtcagagtgtggccaggtgaaatgagtgacagggagagagcagagagagagctcagggagggcgcgggccagtcctgtggcgcctcgtgtgactctggcctgtggtatttgtacatttcaccctcaatgagccaggaagccacaggaaggttttaggagggggagccaccggctctgggctacattttccagtcctcttggcaccggcagagaatggattacaaaggcagagtggagaggagccaataggtgtcctggacaattgcggtgtccaggtgagaggcagtggtgacagaggaaatggggagagtgtgcagattttgggtatgtgctagaggtgacgctagcaggccttgctgatgggctggctgtcgggtgagagatggagagaaaccaggcagagctgaaggcttcttgacttgagctgttgactgggctgggctgtgaagctgctggagctgcagaatgcttagcccaggtgctgggggtcaggggcaggtttcctggagagatggggacagggctggagggacagacagcggcatcgaaggagcccggtgactcggtgactcggggtcctttaagttgcgtgtcccccagcgtggagtccacttgctagagtgagcagtttgttgaattgctggttccccttccacttcaccagcttaggagcaagaggggctggatggaggaggcagagcctgtggcctgtctgcctggctgaggggggccctctggagtcaratgtcctgagttcccctccccacctcagcagcttcacagtgcatttccttgctcactaaatcctgaaatactgggatgatggggccccctttgaaacttgagtgaggtaagtttaggacaaattaaaggaagtcctgcttctcacagcaacttaggacctcaggggactcattaccctgagaggtggtccaggctgggaatgtcatgggattcctgagggatctgggtaaaagaacaaaatgaggggccctcaaaggcccctgagaggaaacctgggatctgtgtgacctttaagttgacgtcagggaggaaaactggtctcttgaggcttctgctggcaacagagtcgggaaccatcctaatccaacccagcgttcccctgccccctggctctcagaaccccgggcgccagagctggaaggggccccaggctctgccccatctagtccttttctgtcactcaggaggacactcctctgtcacccctccgcctgaaaccctgcagtggcgccagtgccttcacgaccatgtccagcacaccccatcgggccccatccctccccactgcccccctgccccacttccctggactccctgcagcacagccagcctggggcttaggagcagggctctcatcaccaggcctctgcccctgctcttccctctgccaggaaccccctcatctccacctttgcctgttaactctcccttacccttccgatttggccttagttgtaaactcctagatagccatccctgattcccacccctgcccccacctccccaatttcaggtcacctgccactgccgaaagcttccttagagccagcccagcctccaagcataaacctatcccactgcatcatcagggactagtttcacatctgtctcccctctggacagttagctctgtgtcttcccagcacctggcacggaataaatgctcttcaataatcatttaaggtgtcaggctcagagaatggaattgccatgcacaaaatcacagcatcattcatgtatcattcaacacatattactgagcactcactccatgccaygcctttgctaggtgctggtaacccgagggtgagcaagacatgacttacggttcagtcagggaggcagcctccaccaattgccccagcaaatataaaattgcaatagcgatcagctccaccaaaaggcaatgcaaggtttcatgagaaactagaaaaaaaatcctcaagcgtccttgagcagagagatctggcaagggagtaggaattgaccaggtaaagggcagggaaagtgttccaggcaagggaacagcaagggcagagaccctgcagtgggaagggaggatgaggaactgaggcaggagcagtgtggcctgggcagggagcttcgggacagagactggtatgagatgagattcagctggaatatgcagggctttatggaccacgttaaggctttcatctttatcctaagagcagtggggagccaccaaaaagtattgagcaggaccangacctaaccagactggtattatgaaagctcagactagctgatatggtttcactgtgtccccactcaaatctcatcttgaattgtagctcccataattcccacgtgttgtgagagggacctggtgggagatgattgactcatgggggtggtttcccccatactgctctcgtggtaatgaataagtctcgtgagatctgaagctttcataaggggaaacccctttcacttgattctcatttctctctcgcctgccgccacattaagacgtgcctttcaccttctgccagggttgtggggcctccccaaccatttagaaccttgttaaacctctttttctttataaattattcagtctcaggtatgcctttatcagaagcggtaaaaacggactattacactggcttctgtacagagcaggaaaaataaccaagtgccctgacactaagcccttataggatgtccatgctctgtagcctctgtagccctgctccctaccccaggtcactacatgtccaaggacctcccctactccaaagcattggtctgtccatgctcattccggcactaacatcatccccacccaaacgcaggggctgggcttcagtgctagctttcctgggcatttggtacaactgtgctccatgaggctgtagtgtacactacactcttgtctccagtagccaggacaggctgtgcatgcccagatgctggcctcagtgtgctgtcaggggccagagtcagcaccagcacccaacagatgaggactgtttcacccagagtttgctcctttgaggagcagagagcccagctccctgccaggcctgctgggttccgctgtgtgagggtttcagacggggtcccggcagtgacccagcagcagcatttatgccagagcagcagcctttacatgcctccggtctacactcgtggaagttggtgtcaggacgcagtaaggttaatcctccaggttgcctgggctgcagaaacactgagagtaaactgtttatgttctccggctgctgagcctaaaggccttctgcaaagaaatcatggctcctaggctgtcagtgctggagggtgggggttatctcttccagcacccacgtcacagcaggagagggggcccagagaggtgagattctcaccatgtcgtgttgctcaagtggtcagaagattcagcctccacgtggaggccatcggcccacatgatagctggtgtgatgatgttaaactcttccccctcaacccacggcytaggagcgagaagaggaggaggagttaaagggtgagagtgcagaatctgggtttcagatcctggcaaccatgggttcaaatcctgcctttgtcacttgtcagctgtggcctcttgggcaaatttttcaacctctagggtcttttttcatctamaytgcrgtgtccattatgactgccactaaccacacatgactgtatatttaaattaattcraattaaataaaatttaaaatgcaattcatcagtttccccagccatatttcaagtgttcctgtggctagtggctactgtattggacagcacacgcacagaacatttccattattgcaaaatgttttctatccaacagctttgatstataaaatgaggataaygagaaggcttgttctatggatcgtggtgaggattaaatgagataatgtatataaagcaagctggtatagcacccaacatatattaggtgctcagctaatgtttgccatgacggtgatggtggtsatggggttggtgaagtccatttgcttctgtgtacattttcagtgtcctgctgtgtccacgaccagaggtgctacagcccaataaaaaggtgctagagttaggcagttgtgcacctggatttatttatcaatacgaaggtgttgawcatctgctgtgggccaggcgctgttatcatatgctgtgggcaggtgccgtggtaggtttgtgatatgtcacaaagtcaaacaagacatagtctttatcgtccaggagagatgcccaccagtaaagcatagaaaatacccaagagagtcagaagaaaaagaaaaggaatagcaagccctgagggcttcccggaagaggcggcatttgctctaggtcttgaaggaggtgtaggatttgagtcggagagggcaggaggacattccaaacaaagggaacagcatgggctgtcaggaggggcctgaaaagttatctgtgcttgaatgatggccagctcagtgtggctgtccagggaggatgggccataggcacagtgctcagcaaatgccagacactccctaagtatttgtgggatcagcaagtggaatgaagctcataactgtgattctgggcaagttatctgacctgcctatgcctcctgcctgctcacacttcaccagcttctcaccccagcccccagtaagcctgtggagatacagagagatgagacgagaacatgcttccatcgcaaacataaggtggtctaactttgtgcctcagtttcccacctgtaaaatagggtaataatattagccacttccttgggccattgtaaggattaaaagagttaatacagtggcatgtttagaacagtagcaagcacaaagtgaccctagagaagggttaactagcaatgttggcatagcgacaagagatatccttgcttttgtcatggagaagggaagtgttggctgamgtgtttgagtaggacttaaaagttcctaaaatcatgttggcccgtcatacctcacctgccttaaaggatttttgagaccgtaaagtacatatgccaggtgaatgcaaactggagagggtggtgccccagactgtcaattatagcagcaatggggargcagatgggattgagctttgctcctgagctgatttactgtctgcagtggttttgctctggagagcctgggctctgttttgggaaatccaggaggtgacttttcctaaggatcttgagagatgagtaggagcttgctggaaaggccagcaagagaaccatactatgttaaggtcctgtacttaactagttataggattctctatcctatagagacaaacaaaacccatccagacctgccttgcttgacatctgacaccctcaagatgcctccaagacttcactgtgctttcttgctgagcctcatcctcttttcttttctctttttcttttcttttctttttcttttttttttttctgagacagagtcttactctgtcacccaggctggagtgcagtggcgtgatctccactcactgcaacctccgcctcccaggttcaagtgattctcctgcctcagcctcccaagtaactgggattacaggcacccaccaccacgcctggctaatttttgtatttttagtagagacagggattcaccatgttggccaggctggtcttgaactcttgacctcaggtgatccacccacctcagcctgccaaagtgctgggattacaggtgtgagccaccgcaccagccctcttcctcttttcttacaccctctaaatacccccacccctgcagctacaccaaagtaggcatccccaacccactagcctgtgtcactccttcccctccctcagcctgcagcccctccccaatgggaaccagcttcaggtgcctccctgggaaacatttcttgcctcccacaaggtccctgcatccctcttagcagtaaccctgctccctgatttggaaaaagacatttcaccctttttccaaatcaattctgacctcacctgcagcagaatcacctagtcagctaaaaatgcagatgcccaggtcagacctacaacatcagaatctccaatcctgtggtctggaaatctgcatttagcaatccaggtaatccttttgctcaatgagttcagaaagtcactgaactgctaaatttcactgtagcgtatctttttgtttgcatctttttccctccactggacaagggtttcctggaggcagggacagggatagtgccttgctgtctgtttccccaaggcctggcgcaaggccagtgcccaggcagtcctgaatgaaccattcctggacatgacacggttcccgtgccctccctccttccagcccatgccggaaataaacttttatgaaggcttttgtgagtagtctgtgatctctctgggaggccatgcatgtctctcttaaccaagagaggaacctagaagaagagcagcccagccctcggtaacaaggggctgggggtggtcccaagacrgggtcctggatgaagaagggtctggtggcactggaggggctgggggagagtgtcctggttcctaatcaacaggaagggcctctgcctccaggatcacttttcagcccagctgcttggacataacccgagctggggttggggttggggggaggggcggtgacagacaggctgacggggaggccagcactgcgacagacggccagcccagcacacctgcccgcccaactcttgtacacccccactgccccgggaaggtgcatccagggagaaggctcagctggtgagctcagaacacccttctgctttcttcccccaccctgccctccccttcttctgctctttccaagcttagggacattcaatccttcctttgatggacagccaagaaaagacttcttccacatcctaaatttgttagcaccagctaatcgtcttaaccttcctccctccagtgctcccaataggcgcctccttaaacacacagggtgcttttttgatyctcagaggggagcaccgggagggaccaaatccccacaggggcagaggaagtttccctggaggtccctcctctgccgtggctgctggtgagccggggtgtgcagacacgtggggcaggagcagtgactgcagctgcagccaagcctgaggcttggcagcttagaacccgctgattcaagtgggggtgcttcccagcgggagccacggccctcattaggggctcaccccagggtgctgctagaaaactgaagttagccaaatcccaggtcgtgcccagcagagggacactctttcttgaccctcgcctgcttcttcatcttctctattgtgtctctctttagcctcttccttctcttcctcctcatcatagcttccatctactttacagggtgccggaccgcatgcttagggcctgaccccagctccttcagaaccctaacagctagaaattcttatgctcattttactgatgagaaaattgaggctcagagaagtgaaatgatgtgtctgtgtatataaggtaatcccatatgagtcagggctggggtgtggaccactgtccaaactgttgctgttgaccgccataccattctgtctccaaaacacacatttctgaactgctcacacaggtacacaaattagataaaagtgacctactgcaatctattaaatgaggtcaccctgtaaacatctcttgcaggaccaggcacatagtaggccctcagcacgagtaccccttccttcctcccatcccctcatctctctccctactctgtctctctcctcctgctctttctccttgcctccaggcttatgacacaggtgagaagagccaggacagaagagaatgtggctatggcctacagaccttgtcctggccctaagcctcccaataaataacagggtctgtatataagcctccggctctgcagcatctcagcttgggaggaatggcgtttgctggcggagggattaggagccctgggaggaagggacaagggcctccctccaaagcagcaggggaaggctctgattcactctctttctcctttccatctgtggccccacagaaacagcaaagaaacctaaagaaaacctaacaactttgccgtcaaggtcctcagtggatgtggggctggtctgggagggaggagttccccttcctgcaaagggctggaccctgacccgaaggcataagagacccttctgagacctagcatgcttggaacacaggcaggaaactgcccttcttgccccctggsccacctccttcctcttcccagcttgtctaggtccctagaatgggggttgtctgrccagatggagtctccagtcatttgctcaagacctctgagtcacggaggtgaagaagccactgggaccagctgagactgaggggctctgggggaggggtcaggacaattgcagaggctgccaggaagatggatcagatggccgcatctgatccaagtgtcacaaagcagtccaactgaggttgctggcgaagtgtgagcaagctaccggcctgagctgaattaaaatcatcctatacctcctggatggcttagtaataagaagcaaagctgccacttcccaaggacttattaagtgcaagacccttacatatgtgtatatgtctccaacaaccttgcaaactggtactattagttccactttataaagagactgaggctcagagaaattaaaagaaacttgcctggggctctggagctattaagagttgctgggatctgaacctaggtctgtttggctccaaagctcatccccgaggatacccctgagaaaaccttcgatacagaagatcactcaccgtgtaagaaaaacactactgagtgagagcaagaacagccaacaggtgtggacccacgcaccgtcctctcacctgtcgcctgactcacctgccttccccacgccacacttctgctgtgtctttctggaggcaaagggacaaggatgcttcttggatcagaaagagatgccctccccttatgaaaacaatggaagcattccccacagaagagccagctggtgccaagggggtcacttaaggacaagtgagggcctaagagtcccctccacaactcaccttctctttgtggctcaggtgctacctagcatggacatttgcatagccaacggctgcagcctacagcctgcctttgcttctgtggtgctgtccccatgggatttcctgccgctgcctctgtactcagacacccagggtgccttgacacccccctgcaccacctgacccatgtgggcaattcatctccacctcccctctggctcagacaggctggaattctcttaacgattttaccaaacccaaagagaagtgtttaaaccatttttttaaatgtcttagaattttcaaaggttctgatatcacagtgcttacagagaacgggtttctgaccctaaactggtagaaggtcacttccagatctcaaatccattattctgtcccatcagagacagaagtggctgccctccccttcaatccctttcctgcttcctccaggaggggcctgggggctgtcatagaggcccagctgcctagcctggtgcaggggatggggagcgggggtggggggcgcttccrcagcagtgccccctgatcacttcccactgccctatcatggaggcccatggtccgcagtcaccaaccggctcagcagcccctctgctctgtctctggggagagtggtggtatgatgcccacacaatggcacgtttttatttttatttatttttaagaacaagagaggatattgtttccttctttttcacatctcctttttatcttagccctggcctcaattctgtgggactccctgaccctcctagcatgtgggaacaactgtgtgtagccttctgttgtgtttgggggctgaagacaaggatggcggctcccactgtcttcccagcctgcctcgacctgtgcccagcgcagacctctgctgtgattcccttagtgactcctttacaggtgttttttctcatctgcagaagtcaaaatgtccccagccactttccaggcctccccacccggtgtggcctgcccaggtgattccagcttccttgaaccmagcaccttatgggatggggctgaaagtgggccccacggccagctcccgagtaaggtcagaggtcaggagagtaggacgagttggtcatcctgggctcctcttaatgatttattagccactgttcccattaggagctgttagcacatcaaagcgggatttgcagagcctgaacacatagtgacggtgacagacattagctggtggctgccctggagccataaaactcccactgggtgagctggaggtggagggaggcgctgatcactttggttctcaactacagcaaaggcagacgagatccaaatgtccatggatgagatctaaatgtccacatttgtaaaatgaatttgtgcattaactcattaaatcactgagtttggaactctaggtaagtttagactgtgcgacacagtaygatacagrgcaaaaggcagattctggactccacaagatctgggttcaaatcccagctctggcatcaagaagcttcaggaagttgggttctttcaaagcctcggccctgtctctagtgggatgaggataacaatcctcttaagagacatcaggagccgggcgcggtggctcacgcctgtaatcccagcactttgggaggccgaggcgggcggatcacgaggtcaggagatcgagaccatcccggctaaaacggtgaaaccccgtctctactaaaaatacaaaaaattagccgggcgtagtggcgggcgcctgtagtcccagctacttgggaggctgaggcaggagaatggcatgaacccgggaggcggagcttgcagtgagccgagatcccgccactgcactccagcctgggcgacagagcgagactccgtctcaaaaaaaaaaaaaaaaaaagagacatcaggagaggacctggagccacacgttaaactgcctggcatggggtgacactcgagaaasagggtttcttaccccatggcrcatgtctaatgcaggggccttccagcggcctcctgcgtctggaggaagccacctactgagaggtctctgccagcctgctcagggtactgcttttcttagtgctgtcttttaccaatgggcaaagggcgggctgttgtccttgtgatgctgaggggggctgaggcagatcaggttccctgggaagctgactgtcagccagcagactctacatacacaccattgaaaggggaggggaagagagagaagggaaaggcaacagaccgggcaaaggaagatgatgagctgtgccaactctcagtgatggcctcagcccacccaggtagttctggaacggggatggcccctcagagttgccccaagggggccaggccatgaagggggttcttggacaaggtggctctctttagccaaggcactcctgcagaggactgacatctgagagctatctgcaggcagcaccctagcatctgaagggacaagtccttcattccctaaaggggaatctggatggcacagcacagcaggcactacaggggcctttctacaggggccagcacatgggccaggggtcctgagagcagggctccatctccgccttcactaaggggaaccatgcacccctcaggagaatcgaggtcctgggagattctgtggcattcctgcgtatgcttcacaactgtagattcgagaaaacagggtgttgggctcaatgaatacatctgttcagctttggctctgatttctgaagatttctcaggttcagagaagtgagagaatcagggaaatcaggaagggagctccccttccaccctgagccaaaacaattttgccaaagtctggacaccccaaaggtttcccagtgccctgggggaaaatgccaaactcctccctgccctggccttcaagatcccttgagttctggcccctgccttcctttcctgcttcatttcatgtccatttattttcttctcctgaaactccagggcagagctgcttaatagaacttcctgccaggatgaaatattttctccctgcgctgtctaatacagtagccacagctacatgtggctattcaacacttaaaatgtggctagtgaggctgaggaactgaactgaattttttattttatttccattttattgtggttttttgttttgtttgttttgttttgtttttttgagatggagtctcrctctgttgtccaggctggagtgcagcagtgcgatctcagctcacggcaacctccacctccctgattcaagtgattctcctgtctcagcctcccaagtaggtgagattgcaggcttgcaccaccatccccagctagtttttgtatttttagtagaggtggggttttgccacgttggccaggctggtctagaacttctgacctcaggtgatccacccgcctcagcctcccaaagcgctgggattacaggtgtgagccacygctcctggcctatttcaattttagtttaatggccacaggtggctgacagctgctgtaatagacatcacagctccaaccacagaggatttttttctgtttcccaccccagggcctttgcacttgctgtgctggtgtgcagtgaccatcccttggactcyctygtgccgcctcttcattatctaggtttcgactccaacaccacctcctcagaaaggccttcctcagtcatccaagctaaagcattttcccaaattccagccccgtctactatatttgcatattgtaacttctcatagcagtcatcagtgtgtaaatttttcccatttatttatttctgtttgttgtctatcacctgcggctagagataataataataataagccaatacttgtatggtgcttattatgtgtcaggtactgrtttatcatttcacatatgttatctcatctaattccttcaactctcctgtgagaaaagtgctgctttgtccccattttgcagagaaggacactaaagctcagaggtggacttgcccaagctcgactgctagaagatgtcttttctacctctatagtgccagcaccaacrtagagcagtgccagatatatcgagcaatggctcagtacgtggcccttgactgcctgtctggctgagactcagcagggtggggtgactgggctggtgtggacccaggaagtcctctgacgagccttgyagccccacggaacccctggttgggatggtgggctgggggcaagtacaagggtggcgccaagagtggcctgcaggtcacttgtcccattttgggagaccccagtgggctgggaggggagaggaatggacctcgctgggcaaaactggcaaacccttctcctgggcagtgaatgatgctagtggccaaggtggactcggcccattgctgggsctggggctgcggctttcccagtgccttgacagaaagggaccagagctatggagaccacccagactttttgtctgcagagagctctgacatccgcctggcctccccagcaaagcccttgcctggggctgtccagctggggcgggggagcggggggaggtayggggagggrgctctgtgcagcccagcagtggggagatatcttcctagcgatcagcatctgataacacagcctggtctccccagggtgcccctgccccctctaaaaagcatcttctcttaattaaaaagtcagagccttctgtctggaagggacattccatgaggaggggaagccaccagagacgcctcaccctcttcttggtcctgctgtttccatttcctatggatactgcacccaccccccgtcccatcccccacctggcaccccaggcttctaggtgtgagagagcttcgcacaaggagcctgaaacacaactgccatttccaatgaggcctcttatctgctgagtgacctcgactcagcttcttaaccttccagcctccgattcctcattcctgtgagggaacacatgtgcccctctacgattgccataggatctagggaagcacgatgctctcaaaactttcaagactttatacatatgaggtcaacgcaagtataaagaaccataacgatgttcacacaaaggtttcacacaggctccctcccttaggctcagaaaacaatgtataaaaggaaaactgctagatgtacaaagatattcactgcagcatagaatataaaaaacacagaaacttcgtgatctagtaaccaactcaaagataaatcacgttatatgatctttaaacgcagccatgttaaakatgtcgtttccaaggctgccctgatgcaggaatgtgtctgccttgtcatggtaagtgaaggaagcagtggaccatattccgtgcacaccgatttctgctctgtgaacgtaggtatgcgtgtggacgaggatcagagaggggaagagaaaatggaaacagttgagagtgggcatgggggattatggatgatggcttttctttcacaaaatgtcctttaatgttcttacagagctgtttgaacaataaatatatgtcagaaaaacaaactaaaaaaaattttaaagcaaagccaaatgtaaaatccaaagtgttgccactcttctcagttcagatgcatccagttcctggactcctcggcctcccgagaaccccacatccctggcacgtacackggaggccatacagctcactgtgcagcccgggcctcaatcttcagcctacatggtatggtgtgtgagatgtcagaacttggcttcatcctttccttttccctttgccccttctcgtgccacatgcttaasgccctttctattcaaaagacagtggtttcagccrggtgctgtggctcacacttgtaatcccagcactctgggagatcaaggctggtagatcgctggagttcaggagttcaagaccagcctaggcaacacggcgaaaccccatctctacaaaaaattttaaaacaataaattagccaggcatggtggtgtgcgccagcagtcccagctactcgggaggctgaggtggtagggtcgcttgagcctgggaggttgtggctgcagggaaccaagatcacacgactgccctccagtcttttgagaccctgtctcaaaaaaaaaaaagtggttyctgtcatttctgcttgtcaccagactctggttagaggttctacatcctcagttatgaaaattctttcacttgcagttgtactgagacctgccaaggatgccaagtacgtttcctcacagggacgagctgtgattgattggttgtggttgccaagaagtacaagaaacagtgctgaaatagatcagttatgtctgccatgggtcctagatagaggaatggtatatgtcctgtggtatttgcaattccagaatagacaggtactcagcgcagggcttggacatctgggctttcatctcaaccctgccagtgcttccctggagaaccttgggtactgtacagctttgtcatgygtgtaaggaaatcggaggctccccgttctccaggctgtgtgctggtgtggaaagaggatggactttgcagtctcatagacccaggcaagaatccyagctccaccgtttacttgtgatttgaccttgggcaatccgtgtaacctatggagcctgggtgtttacacctgtaagttagaactcagataggctgagttataaagattagaaatagtaaatagacacagtgcccagtctactgctggcacacagtaagtgttagggtagctgttttcctggccacctgtgacattcagaggggttggtggtgccgttcagccagatggcatggaagcaggccatggggctgccaggctgccacccatgagactgtgtgtttctttatttcttcctggcccacagttacacatgcacgccttcaccatgccctcctggactartgacagagctgcttgagacaggattcattgagagacagggacaaaaatgatgtttcacttgattgtgctattgtaagttaaaacactccatattataacgaactaataacatattataataacactccatattataatgaactaataactaataattagtaattagctaattactaattgctgtatatgttgttaattgtgtgcaatttaaagtaagatttaagaaaaatagatatccaggggtgattaagtaccttactaattgttaattattccctgtccctgcttcacggagtcctgctttacytccgggcctgaggaaagcagcctcctaactcacctggcatcctggggccggggacttatgtggggcttgtcttcagctctgggctccatgcccagtagaaggggggagggatgcaagagggagggatgcaagagggagggatgcaagcacacttgtcattgtttagtgtacccaaacagttccactcttggtcaaactaactctcacgtacaagttcaatgtccaaacactgttatgacattgctccttcacagatctgtagtcagatgatagccagtgggcccacccatccattcatttaattactcattcatgcatattcagcaaggattgactgagcccacactctgggccagaagttctgggctgtggaattggagcagttcaggcctggaaggtgcccagagactgtgtattgcgaattagcagcttgaggaccaaatgtagctctttcacaggttttgtttggcctgcagagtggtttttaagtgttcttaaattagtagyagcatttagaaatgagaagattttgcagaaaatatctgattctcagcttttcttgaatagtttcaagatctgccaatagtaggtctgcaacctcaactggcaatacttggttgcagctgaggggtatccagtccattttaggcacacaggcaagcccttagcactttgccacagtctccaccatgccctatcacatgacacctggcctacttcatttatttatgtgacctgcctggctccttgtaggcattggagtttgtgacacctaatctccctcaactcttcttagagtagtgaytaaagaattaaggactgtgcccatcataaatcttacaacctaacaaaagacaaggtagaaaaacatggacatggaacatggaactgagatccacacatagaaatgagaataattcactgaatattttgatgtcgtggggttgtggtaaatcaaagccagctgcgtgaaggagaggatgtgaagccgtgatgtgcgtactgcaacctctgctggagaactgtcgatgccttttggatgtggagaagggagcaaggcttgcacaacagatgatttcctgggaagggcccaaggtgaggggctgggggtggagcaggaagtccctccccttgagaagatatctctaggtcctgtgggaggatctcactgtttctgggagactcagtcaagggtgacaagttcaagtgtggagactccagattgttatcaaaatagagctgaggggtcagagccagcaaagtgcaacgggcaaggctcatccctgattgatttccacctcgcccacacaagggctgacttgatagagaacttttccaccttccctrggcccactgtccctatctgtgtgtggcagcccagcccctctgacccgtgctggaggcctggccaggaaactgttcagcctgagaacagtgcctgcccttggcctgaatctgtaaaattgggactccagtctctaccagcaagacctacccccaaggtttcctcactcaggacttacgattctgaccccaacctggaagcgacaggggcccacggaagtaagaaaatgtgcaatttgtcccaacagttcaaagctgatggcttaaatctgtactatttcactcaaaaggtcacccagccctgtccagcctgctctgcttagctcagctcaccctgagccctgcrtgggttccaggattttaagggctcatctgagaggcagggcaacagcgtgattaagggcctggtactggttcagagcaagcgaagtgtcctctgaattgacagctgctcccccactgctcacattatgacctgagctctgctccccatcagatcagtggtggcattagatcttcacaggagtgagaacactattgtgaactgtgcatgtgagggatctacgttgcacactccttatgggccaaggcggaacagttttatcctgaacccatccctcccacccygaaaaattgtcttctaggaaaccagtccctggtgccaaaaaggttagggactgctgccctagaatcagcctgcccctcaccagcttgggatgcaaggcaggagrtgctgcctctctctgtctcagcctcctgaagtccaccttaaaaggcttataagggttaaacatggtaatacctgtgaagcattaagactggcrcctggttggctgggcgcggtggctcgtgcctgtaatcccagcactttgggargccaaggcaggcagatcacgaggtcaggagttcgagaccagcctggccatatggtgaaaccctgtctctactaaaaatacaaaaaatagccaggcrtggtggygcatgcctgtagtcccagctactcaagaggctgaggtagaagaattgcttgaacccgggaggcagaggttgcagtgagccgagatcgtgccactgcactccagcctgggtgacagagcgagactccgtctcaaaaaaaaaaaaaaaaaaaaaaaaaaaaagattggtgcctggcacatgagaagagctcttattagccattcttctggttagaacacagtgggcagtatcatatgcttctgggattggatgccattatttctgacttcataaccataacaattgtcatagctatatttattgagtgcttactctaagccagggacagtgctaaatatcttacttgtattctctcatttaccacccaaatccagtgaggtagatactcttattacccccattttatagaggatactgggctcagagaggttaagcagcttgcccaaggtcacacagctagtaagtagtaaagtagaaatttgaacctgtggctgtttggctccaaagcctatgctcttgtccaggattctgggcagttccccattccttctaagtaaaaggaagaacagtgaaactacgasactgtgtgcatgtgtctagttgaagttcctcctaagatgggcagtgtctggatggagttcgtgatcagtcctcacygggggactctgggagccaacttcaggcaagagacgagcatggtctgaacttagcccaggaatgaggccacatggtcctcaaaggaacttggaagggctcattgaaggttttcattctcagcagtctaaccatctccccccaccactaagtcttgttgactcttaatttgcttttgcagctgaagcaataaatgtaaaggttaagaaagaaagctttagggtgtagctgattccaaaggctctgccaatttaccagctgtgtgacattggacaaattacttaacttctctgcacagccacaagagccccacctgcaaaacggcgcataatagtaccgagactgcctgtcagggcagttagatgatgcatgtctttggggctaagggcatgcctggatttcagttgtacgactatgggccagaactttgacctctctgtggctcagtttcctccactgttaggtgtggacaatagcacaccttgtatagttaccttatggggctactgtgaagaggaaatgatatgtgtaaggtgcttggcgctggtaagaggttagcatgatgccagaccaaaatgggttattaatattaggttgatgcaaaagtaattgyggkttttgccattmmwwkkaatggcaaaamccrcaattacttttgtaccaacataataaatgtgactttaaaatcaaaaagctcatcattcagagatacaggcctggttgtcaaagcaagacctatgaagcctgcagcccctcccaggcctctgaggggtggcattcgrcatgagtctgacctgagctgtgacccttccccagcccctcttctctgctcctccggcagtcgccgggcagggcactggccagcagagccatgatgtgacgtttgagcttccccaggcagggccttgcacaggaacactggcgagatccggtgtcaggaagaagtcccaggtcataggtgtgatgcccagagacttgtcttccttcagggacctgagtgacccctcaatggaagaaagcagccctggcttgggactcaagggctggggctggaggtcaagggtctcgtcaggaccacttgcccctcccagtccagtcgcaggtcacaaggcccagagccacaggcaggggagctgcccagagggctgcagccggaggagactggagtttgggaattctgtgcgagcttccagacagcacatttcctttctgcatctcagtccctcactcagaaaatggggctgctgactcctactccagcctttcagggctgttttgtggctcaaatgggaaaaggtaaaacaaagccmtgagaaggaagaaggactgaatgtcagccacagagtgcccccagacaggagcttgcttckgagtagagaccaacgtggggccagcctcaccccaggaccagcgggacacccacctctaagctggacrgaaggcagagtcagggggtctgtacctggtgggcagcgtgggggctgcastctcactctggggttcccggcctcagtctgcaggaagcagtagacgcagtgaccagcagatgagccctgctccagggaaaagctgccacagcccccagcctcaggacgaagtgtcagggtacttggatggggcggtctcctgagctagaaaagaagccctcaaggtcagggacagcgggtgacctttacagccttctgcacagcagccatgcatagctggtgttgagcaggtgttgaaagygggcatgagggagacacagctccagtgtgccaagatacaatcttctttaccccctcataccgcactgagccrtgcttccaagcrcctgccttctgctgaagaatgagaaaaataattctgaggaactcagccacttcctgctcaacccttagcctttcaggttctcatcagctgtcgagacaccatttccctctctccctttcattcacccagaattacagctgggtgggggaggggcacgggggtggcctggcgccatcttctgtcgggttgtcattcctcttgccaggggctgggcatcaccctccatccccctgggcagaaccctgcagccaggtcccccatgccctccttgcctgtggccttctgcggccattttcctgagccccaggctgctatcccccattccaagggatgtgggactctggcatcaagggagctgcagggatggtaaggggatctcctgtccctctgcctgctcaaactgtctcaccagagccatctccacgagggctccaggccccaggcatatacccttacccattgctagctaggctggsgaacggcttccctggaaacacaggactgcatcgggaaggagaggaggctggaggaactttaaggttttgttgggaggagaaagggagaatggacgcagaggaggtaaccaagaaagtctgctacttaggcacaccctcctgcgtccacagagaggagtaaccccggstgctgggcatctgagcctcccccgtcccaccagccctcaggcacttgccaaacaatgcaaggagcaaggaagtgaagggggcacctccagattgaaagcaggggttagccaagggcagagtgtcaagaagcccctggagccagaccaagtgccccgccaggctgccaggtgtgaagtccacttccatggagtttacaggaaggtggccactcaggwtgctgtcaggtggctccaggggtggcagtggcatagctagtagtatggagtcctctggggacctcctggggccagggcatgaactaagctggaggggatcttactggctcctgtcccttccttgctcrtacattccagtctctctgccaaccttaacagctgaatggggatgggatagagagctgcaatcaatgctagtccccatgcctggtatgagatgtgtctggggagtccaggacacccagcctctccacctccgtctctgccactccccaaggctagactcagtcctgcctgattagttagaaaagggtcctcctgcttcgtctacttgcttcccctgagtctcacctccaggtggctctagtttccaggatgactaataggttccatatcatgtgccaatttctgctgattgatagtggctgtgttgcaaagaattgtgaaaccttgtctaggctcattaaggagctgtgattgattatcagtgtcagccatgagtgcaggcacagagactgtaggtgtgtgtgatttaaactgctgcccacttctcccaggacctgttataccccatcaacctgggctggaaaggtctgggggtgtcttgtggccgagagatgtcatcataggacagatgtgagctgtggcgtgctggcaaacgcttaagaagtggctcttggggtaaggtggggctgctttgtagcttttgccaatttctgtggtgtgaatactcccaccatggccaatttccagctgccagtgtgaagtcactgggcgccaagttaggaagagatgcccacagttggctcttgcaagactgcacaagttggctctgagtagtcagacatttttcctaagaaatgtaaagcttctcaaagctttgctaatggtgggctgttctgtgaatagcactagaccaggattcaggatcatttaccagccatgaataataggcaagttgcacccttctcagagcctcagttttctcatctataaaatgggagttgggttgtggtgaactgtgatataaggaagtgctttatcagtcacaaagcatgatttgtcaaccatgctcccgggacatcaaataaattcagttggtctacccagaaatctgcctcaggcttccctagaaactcagggtttgggccatagggctgtacgtgacagggcttgagtgttctctttgaagttaaccccagaagacacaggctgccttaaagctcaccggtgtcccttcacaggccagtgaagggactgccttaaagctcaccagtgtcccttcacaaattgcttttcatggtttttaaagttactcatgtttcccttcttcactgctctttgaggcagaggctgttccttttatttctccatgtgcctccttcaagcttcgggggcccatggtcccgggaggcaggcagacctggggccaagtaccagcccagtgatgcatgtgttctgcagccttgaacgcaccataaactctctgggcctcaggtttttcatctgtagagtgggaacaataaccaacaatacttcactgggtcattgggcagaccgagtgaaataagggtcttagcatagcgtcaggcacagagtacatactctgtagatgaataacagacaaattactatttgtccgaatgaggtcttgggtggaggtggaacaggccaaactgtagaagaatgggatcccaagagttggcaaaccacaggtcggtgaggcctgggccacgggtragggcgtgcgtcctagggactgaggcacgggaggagccccgaggcaggtctggtgccattagtccagcatggggtttctcatccttagcacgattcacacgtggactagatgagtctctgtggcaggaggctctgtgcattgtcttttcagcagcatccctggcccgtacccactacagaccagtagaaacttcccagtcgtgaaatcaaaatgtctccagacattgtcaactatcctctggggagccaaattcccccgagctgagaacccctgctccagcaggcagagtgtaaccaatatcattagtcacccaaggtctgaggggagcccgtgatgcacagcacctgtcctggcagagatgggtgggtcgggcatgtggcagagctggtggcaggtggtcagctgcaggcaccaggaggcatgggtgggggctaggaccccagcttctaggagcccagcggtcaagcagggtcagaagatggttcagatgacactgaacttgggagcaccctgccactcttgatgccccctgtccaggaccaggactggatccagcgactgggtggcaccaagtccagggtcgagggggaggggacttacctgaccactttagaaggggctgagggcccagccgccccttccacccctgagaacttcatgacctccagccaggagaacacaggctttgcagcaagagagaccaaattcaaatccaggccctaccatatggaaataaaagttaaacaatcaacttaagccaggcatggtgactcatgtgtataatcccagcactttgggagcccgaggcaggcagatagcttgagctcaggagtttgagaccagcctgggcaacatagtgaaactccatccttacaaaaaatacagaaattagccaggtgtggtgtgtggtctcagctactcgggaggctgaggtgggaagattgcctgagcccagggaggctgaggctgtagtgagccgtgattgcaccactgtactccagcctgggcaacggagtgagatactatctcaaaaaataataataaattaaattaaattaaattaaaattttttaaccttaagaatcagatgccatcatctaagagcaaggtgaccaccttaggcaggttgcttaacctctaagcctcaggttccaagtctatggaaggggtgataatgccaacttcacaaggttgttataaagacaaagtgcggtgttatagttaccatgcttagcactgtgtctatgtctgccgcataatgagcactcagtaaatgtcgattgaatgaatgaaggaatgaaaaaatgaatcctcctacagcaaacctttctcccttaaaccctcatgtttgttttagttctcatcactggaatttctccagctttctaacataggaaactgttggcttctcagcgggaggaaatgagttattcatctctgtatcatcagagctttgcatcaggcctggtagataataaatgcttaaaaaaatgaagttttccttcctcagaggacaatgagtatactttattcatctttagagagccacagcccagcacagtgactcacacagtaggcattgttaagtgtttgttgaatgaacgaacatacaaaaagtggttgaaaaagggcacgacccagaatgctaccccagaattcttcatgggggtccatccctatgtgtccattttggggaagcatggccgccttgctcggaagaggtgggtcaaaccccggcggagaacggtagtggcctcagcaggaagctgaggcagtgcgtgacagacatcagcagggaggtctcaggcagaatgtccccaccctggatggctgttgtgaccctctcctgacagccctgcttgcgggctgcttagcccacctgagggggctgggacaatcttcatagttctccctgctgcaagaaacaggttcctcctgaggaagcagcaggtgcatgggcggagtccaggtgtcttcctcctctctcaaaatgtggtagtacgggcagtacctcagcaggatcagcatgagatatggtgtgctctgttaggaagaccccaggatggggagtcaggagactgaatgccggtctcaccgccatcacctgcccacaacatggccctggatggtcatgaatctccctgggcctctctctctccatctgtactgtggggacttggtaatgccttggagtgactccatcctttggtgcctggccagggtaatgggcacagccaagtggcccacatgggagagcaactagtgacatcaaggcactgctagattttgcaaagccatcagctccccagcatcttagagctgccaggcattgaacacagcatcaggggaagcatctgcttggaaacccagggctgtcccaatgcaggcctgtttgatgaaaattggcaggggcaggacgggagttgggttttccaaggcacctgaagattttccagtgggtctcatgaagaccatccctaacaggggaaaaaaggtgtgtgagagagaaagtcttcttttatagcacctgtatagctcttccccttctatggcacagcattagctcacaaagaggattttcctgtttctgaaatccctgtaggggacaggtatgggkagtggcagcctggctgagcttggaagagccaaattcccttgcataagacaaaggtgcctgtaaaagacagatgagagggttgagtctagagaagggggctggaggctgaccataacaggcatcccaggggcaggtctggagaggacttggtctgcaggcaattgcagggtggggggtaggttgctttctgaatgagagacagagagagaggcactgtagagaagggtccagagctctaccatttactagctgcatggccctggggagtcgctcaaccttcccatgcctcagtttcttcatccgcaaggcgggaatgatagaacctattgcataatggaaaacccctcgaattgtgcctggcacctaataaggaccatagaggtgtatgcagtgacaatggtggtggcagtggtggtgatgtaaaaaccctcaaaatcttcagtagaatttatatcctccaggggtgcacccagcaaactgctcctcctgctacccagctgagccttgagtcttgtgccagctacctggctgcatctggtgacacctatgcagccgagagtgctaacaacaggccgggctgccctcagagctccagtctgtgtcactggggacatctcagagctctagcctgtgtcactrggggcmtcaccagagcctgccacagtgggagccagggccccgtcaggcctggcaggcgcaaggcatctgccctccatgtggctgaagcatcccaaaattgccacaggctgaattttgtcaccagcctgcttctcatgcagaggacatctcccccarccaggaggcacagatttcccagctaagctggcccctctggcaggctgcgctcaggggatattttcagattctgggtgacattcctctgccactcagcctaatggctcccagatgctccccctgctctgtgctccctcccgcttgttctgggccctgcatgcaaggcccrggcctggggcttgctcacccaggctctacacctcttgactttttctgttgcttttaatctaaaacactgtgttcctccttaacgtgatggcttgacagaggccagcatgaaagaggctgtttcctcctggatggtgaccagggcagagaagccgacagataaaggaggagagaaggaagccggctctgggaatgggaggagcacggggaaacataggagcctttattggccgagcataaaagaagcaacaggagtcgcagctgagttaacgtggccagggcactaggggccgggcagacacaccaggcccagctgggaatcaccgggagggtggggtttcgtggctcatgttccgcagaagcgcctttccttccctatctttctgggactgcttttctaaaccttccctcccgctccccacccctattccttttttctcccyctcggaacacttgaatttgtcattcttggctgttgccagtaatgagatagggctgctgctgcggccgtgggagggaggtkgggagtggacaccagaaagagaaaggaacagagagaggcatggaggagggtggggccggagcccgagagggggctttgagaaagaggctgtgggtggcagaccctggaggggtgaagtgcctaactcactgctaaacagaaaccaggacgggccaatgggcctcaggcagggtgcacagtggccatccacgcccgcccctgcctgcctgctggccctccctgacgtgcacagtgaggacacgggcatgctaacggtcctcatctctacgggatctgttatttccgcctttctcagtgtgcctcgctgcccactgtcccgtgttctgcaaagcagccttgtacacaagttcaggcaggtcccgtagagcccgttttgtggggtgggaaactgaggcagaagggccaccggcaggtccccagcagggctgagcctggggcctagacctctggatttctcatccaattatgaaaatatggagatgaaataaagggggaagagattatattggtgaaagtaggccaggaaaagacaaacttcgaagaccagatggaaacccctccgctgatgaatccttggacactgcttccaaggcggcctccccaccgccccctacagcaatgacactgacccaggcattttctctctctctttcaggacctcctgtaagtactcaagccgagggtctcgtgcatctgaaaggcctgtgtcacctgctggtaacggggttctgggtgggggcactgaaagctgggcccctgctgtcttgttgggggcctatgcaggctcctgaggggtccctccagaatgcctcttgtggggaggaggctaccattttgcttttcacccacttctgcacccctccagggcaagacaatggctgcccccagggcaaagcaggccccaaatttcaatatgaaagagtggctttccctctaattagctcagttcctttgtccccaaagaagctattggagtcaaaaaaaaaaaaaaaaaagcaccaggtattagaagaaaagaaatcatctctcctcagttctgccccttgaaaggtcycagaaaacaggtcatygagctggctgcaagcatggtctgctccaggggactcacatccacacccctgagtggggcagctccattctggccactttgggcaggtggtggtggtggcggcggcaatggttatgtaagagagagcggtgtcagccggktagactgggagacagcacataaattataggcatcatgccgcactccttcctggccttgctaggaagcccagggtggggcagggagtggagccacttccagagaacctgagaagagcccaaggagactgcctccctcaagtaatggatccagagaacaggagcacctgcctttgatatcccaacaaaagaccagagggcgctgggggagctggagataggaattgaaagggcccagccctcgcatcagatctttctcaaggttgctgaaatcaaccctatcatcatcccttccttggagaagtcatttccatagttgttttcctcttgatgtgtacctgtgggagccgcctgcttcatttttagtaaaggccattatcgaagactccatttgtgccctgaaaggcccttgcacccacactgaggatcccatggcccctgacacatcacagtgaggcaggacctgtcatgtcattacttgaaaggaaggataatktattatggcacgtttggtgtgtcagatcttaattcctatcatccatcttccaaaataaactctgccatatagagctttcacctgtgggaaatgtgctgcwtttccctgtctcattctgaggaagccacaagagccctcaactgcccccaccctgccttggggcctcctgcrcacacctcacccccaggggcaggatgctgcagcctcctgcacacacctcacccccagggccaggatgccaggacagctctgagtccctgcctgacttgagggtcctttcctcagtaggaattttgcattctgagagcttgtgctggcccgacccagggactgttcccagacccctttgggtctgtgctgaaggagcccatgaggtggaggggatgagtcttcactcagtctctgcccacagagtgaagaagaaaggcccaggtagctttccccacattctgagcccagctcagaagaggagccctgaacctttgcccagtgctggctgaaaccacaaggcaggaggaggaggaaatgggaagctggccagggcaggaatcacctcctcagccctgttatctctgcttcctgcaaaagaagaatgctggtggccagasagaggggctctgagatgcctgtctgatgccgtctgggtgtatcctgggggctggctctgtcctccaacaggaagayccagatttctgygggcacaaggtcggccagtgcctgaagaacataactgtgcaggatggattaaagctrcagcaggaaccatttaggtggaagtaaattttcagctaccactgccccacccatcatgcccctggcagacattgctaatcaattaggaggctttttaacataatgcattagtcagttactcccaatccattggcatcagtgctcaagctgacatctattggccatccctggattcaatttaagggagaatttcctaatactgggaactatgagactgaaaacagatgaccaagggaagtagggatgtatctttctctgaaggaatatagggaaatatttgccagcagctgccaggccttgctgaatatgatccttgctgaaatagtagctaacacttactrtgtgttagacactgttatgtttttatggaggcagtgtaacatagtgattatgagcatgggctctggggccagaccaactgcaatcaaatcctggcactgccactttttgctgtgtaaccttagcaagtcacttaacctctctctgcctcagtcccctcatctgtaaaattagaacagtaatggtgtctgcttcatatggatgttgtaaggtatatgtgtgtatgtgtgtgtactgtatatatatattttttttacttaggatatattaattcatttaatcctaaaagcataaggcttccctagatgatgcccaaaggtgttttgcaaacctttaatttttttttcttttttagaaaagaaaagaaaaaacttttttgggtgagagagtgagaggcagggtctcactctctcacccaggctggggagcagtggtgcgatcaaagctcactgaagcctcaatctcatgggctcaagtggccctcctgcctcagcctcccaagtagctaggactacaggcgtatgcccccacacctggctaatttttttaattttttttttttttttagagacggggttttgctatattgcccaggctggtcatgaactcctgacctcaagccatcctcctgcctcagtctcccaagtggctgggtaaaccttacattttaaggaagaaattatgattttgtgcatttttattaatgaattttattgttttatttatttctaccccatctcattccaagaaacattttagggggattgacaagctacataaggaaacagaaggtgaggggtggagaacagaggcaggaaagcaaagggaatccggagccatggcactgcaacatcctgtgcacatgagccacacacttggctctgagcttctcggtggtcagagcaaagaggaaaacagagctttggcaagggtcgggctgcagtgaggtaggagcacgcctgatgcttgggcgaagcacagtttttcctgagaatggggcctgaaataagtttccctcatgtgtcctcgtaagggtggcacgatgtggatgatgtcggttgtaaggacacagtaagcaaattgccccttctgttcctattcagagtagacccactgcatgaggttggaccctcctcaccctggcgcgttcccttccctgggatgggaggtcactaccccacttctcagcccactctgtgacattaggggacaggaagtttagaagcaagaggaagagggcattggttgagcactaaagctctggtttaagggacgcagtgcctgggctgtccttgtgggggcctgggaaagcaggagtgttgccaggttcctggtatccgcaggcagattcattcattcgtaaatgtgtcttgaggattactgagaggtccacattgctgaggcactggggacacattcgtgaatgaaacaggaaagtccctacctcaggagctcacattttagtgctatggggcaaaaccaacaacacggcgggatggcaactagtcctgtccccatgaacgctgtagccccacattccccaaggactccccaccgactggtgggtgtcactgcaccaccattgacgggatgtcctcaggaacaaacgttagaagggttgacttactcctggtgctgcctgaacttttctcagcagccctgcagggatggacttgtctcccagggaacaccccaagacctactcctggttctgcctttggtttatgggaacagtgggatgtctggaaggagagaaactgtatgtgacagcagggtctctggagggagaaaccaaggccagccccatgcccgtctctggccagtcctcctctcttctaataatcatagtaatagctgcatttatttaggatttgctatatgccagccgctgtgctcagtgctttacatacattctctcatttgatcctaacagataggtaatgattattcttccattttcaagatgaaaacactgaggcacagagagaccaagatacttgctaaaggttacccaagtagtaagtggcagagccaagaggtgaacacaggtgggctttcttcagagccagaactggaaggaagctttataagccttagcgatcaaggctcccccttcgttttgttcataaaataacaaaggcttacccaagtggcatgccaaggtcacacagctggttgagacagtgttcaacagttaggtgttacgatacctgcctgacctacgtaaacgtcactcttcatttcagggtcccactggaagacccggactcccagtaagtcacttttgtttcttctttcctttgcatctcttttacgtgcttttctcagtctgaggactggctaggttgggtggctggtttttctccaggtgtatctgggtgacaggccactctccagagtccctgatctatagcttagggtgaagtcacctcagctccttcctcctttgagatctagagaggaccctgctggggcatctttagctacagcccttggtgtgcctttgccccaggcagacaaattacagcatgcagatccttccaaagctgcagctgacttccagactgatgaccctaccatgagcagctgcagggatgggcagcccactggcacactgactatccccctgcataccagctgacattcaaaccactgttcctcctatgcctgctgataagagagcggactcaaaaactttgttttctctcaattaccaygtcccaattctagagaggctgtgccaagtaaccatggggactctgggacaaaaaakatagccatctcttattgaaaccgtaagaagagccaggtactgcatttatcatgtttcacacattcagcttgttcaatacctcagtgaaatgggtatgattataaacctgttttatacatgagagtcaggaaggtaaaatagtttgtccatctgtccaagcttcaggtggggacctgttagaggcccgtatcatcacacaccattccatactgctgttgcttgtggtctgtgctccaccttcaaaacccacctttaaagtcttttaagactttgctctgtggagtctagcctggggcatggatgagttgagtagtgggtatgtgtaccgggtatgtgtaccatgggccctcagatgtggagtgacccaggtaagatgctgcagccggtcagggggccggaatcgggtatggagagcaccctggcctgaggctggcaccagtctgccctgtctccctgtaccaaaggccacatccatgagattccagacccttaygttcctccctcttacctaatgactccccttttagacatggattatactgtaacctttggactaatccaacagcttctaaaattcatgcctagcagtggctttcttaatgaaatgcatgtgggggaatgttcagacttgcaaatggaaactctcccagtaagagccccagcacaaaggaggacgggtgaatcggtcccatgaaatccaaggaggggaaacatcagatgaccgaggggaatgtgggcagactttgtttctttcttacaacatccacctttaaaaagcatttagggggcrattgacagagcargggctgctgcacatagtttccagtccctggccattccacacccatccctaacccaagcattttatggccaggactgcaaagagcattagttttaaaaaagaaatgaaaaagaaaccaaaacacacatcctgaaatatcattcaaaagcccaagagtgagtggaccgtggggctgccacagccgaccacccgccctggcmtggkgtccttcgcaggcagagccaatttcggatccacgggtcatggtcttgttgatgcttccgtgtgaagggtcctaggagtaacactcaaaaagactgtggatgtgagcccctggtgtacaaagcaaaaggtgtggagtacaaacatgctgatgaaattcacctgcccacagctgtgctaggctttacacaagcagatgccatttattcaacatcaaaggccaggcactggccacatgcttctcagagacagcatcatgtggcatcctcccagcaactccatgagaaagaagctcttatcacccccactccacagaactgatgctcagaaaggttaagggaagagtcagtgcttctaatctgcacagctaccctgccattctttagcaaaagtgaaacattttactcaaagccaccgttggtcttgaccttatgtgttaattttaagagcctaatttcagaaataattgcttctctctggtgtgccccacatacatggtggatgctcattgttcctcaaggcrttgtgcctcagtggggttagcagacgcagagtcacccgagaaatgcccatgcagtcccctcctgtccagcaggctggacaaaccacctgattctccgcacyctattgctttccayccttccaggctccyagcaaactctaggccccaccccaggttttatgatgtctgcatgcatatgatggcaaaaaaatattttctaccaaaagggggaggaamaaaacttaataagcagatttccagagtgagatgtaacccctggctacaaaacaaagcatttcccttggagcatctgcaactcgtgattcggctgaatccacatggctcgtggtccttcctgtcagtactggaggtggccgagaggagggaggagtggagaaagactccagaggttgctttctcaaaccaggggctggggaggagcactgctctccagctctggcagagacagaccgaggaaagtgattcacccatctgtcacatgggagctgccagtcaccctgctctgtgccttgaagttgygtttgataaagatgaggcacatcctggccatrgctggaattgatgcaacagtgaagtctaagggagcaagggccttggaaaggcatagggaaactgaggcccaggctgggaccagactcctccttccrtgctctttccacaacactcatgcctaagtacacatagccatagcagtggctgcttgctgaatagtccttgggagctgcatagggagtgtacctacatgatgcttgggcatcatacgggatgtcgtccccgctgcaaactgggttagctgtgccctaaatcaggtgcacagtttgcctatagggtccttcacatgctagcctggttccaaccacatctgactgtttctgcctccttcatcatcagggggacaaaggtgccattgggatgcctggacgtgtggtgagttggcccgtttgtacctgctcaggtggccattgcttgcttctccgtgctggcctgtcctctaaaccatggcaatgtgctgtctatcccaggcccaaggagggggtcagcactttcccttccccaagccccagtgtgctttagggagggasaagaaaggagaagggaagttgtattccagtccttcagacctcacagtatggcactactctccagagagctgccacagcaaaggaaaaacctaataaagttgcatgaacaaagccctttgccagtcacctgctgggaayggcaggaacaaactgagcctcgacattgggaggactgccactccgccccccaaagctggcagctcacccttagattcacagctgctcctgcaaccacccctcrgtggagccagggttcccaggggccttctctgtagacagagatgcactaagagatggtgaagacagggcttggtcccaggtggcacctccaagtcctcacgaggaggctgagagttaaaacattcctgtttcttgcaggaaagtgaagatagagaaggggagatgagaacgtttgatggagaggstgtttcccagaaatgggaaggccagcctcagcccctgagtgtctacaaagggctataaaggcagtagtctaaggcagtgatggccatgccccaccctcaccactccccagcctgggctaggacagtggcctcagccactctccccatgtgactcctaacttcccatcaacctctgcctcacctggctccccaggacccctgaccacccccatgtcattctcagctttgcctcagaatctcatgggattggctgtaggagtgggtgtagcatccttgtgtgaatttgcttgcctggtgtgagtctgccggtgctcagaggttgagaaaaggcatccaaatgatagctgacccttgctagtgctaactgcttgctggcgttgtgctaagagccttatgttagcttactcagacttcacaagaactgcatgaggtagacatggtttccacccctactcttccgatgagaaaaccaaggctcagaagctaactgtccttcccaagktcgcacagtcaggaagtggctgagcagaaatctgaactcagacagcccaactccaaacctgcgctcttgatcctgacaatattactactccccactaaccacccacccccactggccttgcagctctgaggagggtctgatccttagaatgaagccccagaggcctgggatatttcagagttcaggrcaagtgttccatgtcacagagctttgctctccccagcgcccacctaaggcctgtctatggaggcatgcrggctgggagccctgggccgccccacgagaagctctcccaccacttcccagagcagagcacagtggaattgctgcccggccctgtctgttttcttccgttctctaactccagatcctgagtcctcccaagccgtcacaggctctgtacagagcagggaaacgtgattcaaccatcctttcccaagggcctgcgcatgtggacctgagccagtcacctgcgtcaccatagccctctgagcccctgtcttccaaatgaagatgttgagactcactgcacccaaaatagggtggagttgggttttgtgcccaagccaactgtgggaccccaaagtccctgctcccagggaagcttcaggagcctctcccctgagtgcagagacaggcccacagggaaggctgcaaaatgcaaagtggcagctctgggccttcccgtcctgtccgtcctgtcctccttcttgggccctgtggacacctcctcccaggaagtgtccacacttccctcccatagcagtgggggtagaaggaggggagctgcaggaggtctccctacttccttcttagcaggtctattttcaagctactctggctgctggtgctattttaaatgagacaatgggcccatttggctgcccattaggggtcctggcatgagccacctgataagcagtgaggtggccagtaggtgtgacatgcctgggtcatccctggggttgaccagaagtggccccactggcctgtccagagcagggtggattgggactgtccatctactggtcactgttgttacaagggacccttggccgcctaaccagcctcctctgcatcactgaccyrtgctccgttcttccagaggtgtgtgtcctgccttctggcctcctgtgattctccacgccccctccctccaccttgcccggccaggtccaaggactccaggcttgtctagcttggcaaagctttgttcttggtgttcrgctggacctgcaaacctcctagacaccagcatcacaacacagtcytggggcaattcccccgatccccaccccaacctcagagtgtcctggccagctggggccatggcttctggggaggatttcctgacttaggtgggatcttgttctcttttctctatctctgtctctctcccattgtctggctttctctctctctctctctgtctctctctctctctctctctctctcwcacacacacacacacacacacacacacacacacacgtacgtgcctcaagagggcctcttacggccccagccactgtttctcagttatctggagcagctgcacattgcagcagcgccttccacatgccacatgctgtgcttgttggacgtggacctgccatgtgtcgacatctgtgttttgctttgtttcttatttcacagtgatttcttctgtttggttgttgtgctatgaacatggattctcgtgtgggtgcctctttctcatcccctcttttttctctcccctcctttcccttcctgcaccctgtgttgcatgtggctgccccagggagtaaagggccaaccaggcgagaaggtgagtccacactttccccttctgccctgcacccagcctcctcctccaggtggactcttgatgggaggctctcagccctccccmccatgaaagccgcagcagagggtgctggctgggcctgctgccctcactgcctctcacggccccgtttcctaacagcttccrtaacatcgggcagcagtcttgggattcctgggcggcggtcccagctttcccagctgaggaggtcttccctgccttgccctgccctgacagcatgaggcctcatcgctctggccaatcgctattttgtgtagctggaactgcccagggggacccccgaggctatggaatagagcccccctgggaagtcagaaatccagaagccatcctggaacatcagycctggggggttcttgagagatttctgagagcaacacttcttttttttttttgagattgagtctygctctgtcacccaggctggagcgcagtggcgagatctcggctcactgcaacctccgtctcctgggttcaagcaattctcctacctcagcctcccaagtagctgggattataggcctgtgccaccacacccagctaatttttgcagttttagtagagacagggttttaccatgttggccaggctggtctcgaattcctgacctcaggtgatccgcccacttgtcctcccaaagtgctgggattacaggtgtgagccaccatgcctggccaagcacaacacttctaaagagttcactctgcaggtgaggaaactcatctgatgcccaaggaaggagcagggctggcccaagatggcacagcaatagtgatgagcaggggctccaagccagacctcccggtgcccggctctgtacttccctgtctgtaatgcagtatttctgcaatagtttcccatctccaaaataacaatctcaacaattataatacagttgccatgtattaaacacaaattgtgtcaggtgcgggtttaagtattttgtctgttttcccaactagcactgacataaccttttcagggaagctttaatattctcatttacacgaggcacagagaggccaagtcacatgccccgggtcacacagctagaatgtgacagagatggagaggtgccccagtgtgtctgactccaaggctggggctsctagctaccatgctattctgtcctcrtattggaactagactgtcagctccacattggcatgaggctaaactgcctaggagaaagacacatgaccccttccatggaccaggcattgttttaagtactttacattatcacatgacatcttcacatccaccctatgagacaggcgctatctgtatccttacagatgagaagacaggcacggggacattaagtcgcttgcccaaggtcacacagctggtgggtagcagagctgatcttcagacccaagcattctggctcttaaccatgacactacaccgccttgtataaaaattattgtatcattgccatgacataaacagttactaacttgaaatcatccctcgcctgcctgtaaggtatgacattttccaaaatgcgtttcccgtaagggcaacagagccgctctcagcattcctgttcccagaggaggtatgtgggctcagagaggttttgtgacttttcctggcagagtaggaccttgaacttagggacacacacacgcacacatggcacttgtctagctagctcagccacccttgacagcactttgagctcatcattcagcagcatctgccttcctctcagagctgacattctgccctggccttcacccctccatgtcattctgaaaccgggactagggaatttgaggcagctcaacctttcagggtcagggatgctgagttcacacagcacgcatgttgctcgtgtccccctcctctgttttcacagtcccattctcgggcaggtcactgttcagcagttgcagggtgtgcggccagatgggtatttgcggagggggagctggaaagcatcctgggctgggccggggagagactcaggcctgggcagccttgctaagtctcccctctctccctgtgtctccctgtttcccgccactccaatggatcctgttcttctcgcttccccggcctggggtcccaccaccctgtctccccggaaccccatgtcctgtgttctcactgacacctcttctcctttccctcctgctgcttccccctactacctgcccttcccaacccattctgaatgcyccstccttgcccctgtgccctctgtgttgactctgctgatcccctcgtggccctccacgtcccctggcatccctctcctgtcccatggggccggcctcctgctcctggccccctgccagctccttccctttggttcctctctttcccgctcctcttctccatacctccctgcccctcgctccctctcccccttcctctctccccrcaggggtcccccggagacgctgggctgtccatcattggtccccgcggcccccctgtaagttgtttttgctcttcctcggggtgttggggggatgggtgagttgatgaaaagggcttttaggctggggatgaggggacagcgagggcggctgtgcccctgggtggggaggccaccgcatgtgatgtggtcagcccagccaggcctcgggtgccgatgttgatgttaaggaaagtggyctggctaaatatacctaaattacagtcccttgggagggttctgagggacctgccctctagccacgaaactacagcagctgcaaggcggccctgctgtttacagacagaagggagaaagggctcgctctcctccggatggggtgatccggctttcccgggaaccagcctttgtttctggaagcccatggagcagatacgagtccgggttcactkacccaggcacgcactactggtcttgccrgagggccagcccacactcaccctcacagatgcctctgtgtgcagtgctgggtcctgtgtgttcactagcaccctccaccccgtggctgggagcttgagaaaaccagcgaggctcccctcacatgtgcttccttarggaccaaaacaggggtgtgggtgatgaagccagcaagatatcgaggctgtgggaggaagggcttgttattttcccagagccctgaaccacggggctttaataaaatcaccacacgtcagggtggaaaggatcccagggatggtctaacacagccctctcagaaggggaaactgaggctcagagagggggagcgccctcccgtgtagaggctgggcaggattagaaccgaggagccccggcctcaccacagcagcaggccgccggctccaccttctgcacttttcctgacccgccgtgctcagtgaggggtgggagcagagggctagcctctgggagactgagacccacagcagagggagaggggccagagaaygaatggctaacttacatccaagggagggggcctgcagtgagatgaacagccaagcgaggggttgtggcgagtgcagggagctgaaaggtagagccagtttgagaaggagagcaggggcaggagagccaggctggcagacatgtcaggggctgggtcggaggcagaacttgagtggccctgggctgagtagcatggcctttacagcaaggttttcttctgggttcagaccataatgaccacgcttaacacttcctctgtggtggtcttatcttaagacttttacacgtattcactcacttaatcctcacaaggactccatgacatagggactgtgatcacctccattttacagatgaggaaactgaggcacagagaggctgagtgacttgcccagagccatagggctggcacrtggctacactggtagctgatcattcagccagaccatctggctccagtctgcttctggttcctgctgcagtcatagacgggccaggcctgatgtcactgtcgcatgtgctcctgggctcacacggtggctgccccgatgggcttcaagcctcctgtgtcctggaggaggtgcagcaccaatgccctggccaaattggtcctgatgaaggtggtgatgggaaggtcatagaaacagaagacaggctcccaggttctaacatcgaggactgagcccggtgtgttaggaggacaggggagtaacacagcatacaggccctaccctatgctgccatctccgtctgccttctggtctggctactgatgttctattgtgtggatcctgctggtcctctcacaccctttcagcaaattatgtcaacaggctaccaaaaagttattgaaaacctccactgctgtaggtgtgttcagggcagtagagcctctgctcctcccggcctctgcccagcatggataacctaatcagaaacatatctactgcactggatttgactccagtagtgaaaagcaccttctgctcaggtagcaatgacagcttctgtttcccaggcacctgtcacataataggtctccttcacagctgtgaggcaggccccaccagcccattttacagaggagagaacagtttcctaactcgcctgtggtcacccagctagtaagttctggagcttgggtttggccaggttatcctcatcccaaagcctgcattcttgcctcaataccctgttccatgtttgaaacgctacgtttaaaatgatatttacttcaggagaaaaaagtcctccaggtgggtgcctacattggcaccaggaaaggttttatcataccaggagtcttaacgaagcccagcatcctctgactttggcccccatcacccagtggctcgagctatccctgctgagtccccactacagcacgggcagccccctcagctccttccaggaagctgccctgagctaatgggagcagggacgggggaagacaaagggtccatttgtcattaaggggtagaagtcaagtgggcacccttggtggcagccagggatgatggagaacatgaaactttccactcagccaggaagggtccagcatagatgctgctaataagaaccagccttgccactcttaggggccacctgcctcccctcttggagtttgataaatggtccaagcaaagggagaaccctccaagcactttggaggagggttcactttctaatgaagtgagctggaatacagtgttggggcacgttgactttaagggaggctcagtaaatcgagggggagcctggacctccaagatgctggctggcccagcaggccctgggcagaggatctgccagtcctaggaaatgccctacctcaaagtgtgcccattccctctctgagctctccagcttctcttctggggcgaggagatatctgaacttccagtcctcatccactaggagccaccccacaccaggtagacacacctactgagtgtgtctcaattcactccattcatatttgttaagagcccagtgcctgctaggtgctgcgtagaaacctgacctctgtcagcttgccctctgggcacatgatctagtgggtgacaccagtgatcacataatccatgacaatgcagacagcaagtgctaagccaggggatggttagagagctgtgggacaaggaggaggaaccagccttgtggaaggagggcaggcagggaaggtttcctggaggaggggataataactgcagtcaaggacccatgagaagcccttacattatggtcaggggttgggctttgtcctgagggtgtgaagagcctgtaggttgtgttaggctgacgtgggacatgaccagatttgcagtttacaaggttgtagaaggtccagcatgcagcatgtttagaagagactgcagtgggaggctggctggaaggcacttgcaacaaccaaggcctggactggagcagaatcggtggggctggccaggagggctagacttgcaagctattttagaggtggaattgaaggatttcgtgatgataaaaaataaggattgagggagaagcaagaactcaagatgacaccacatttctgacttgagtaacacagtactctttcccagaaggaagagcagattttgccaggggagatgagttgaatttgagtgtgatgagttagagatgccgtaaagtccaatgggaactgtcatctgctgctggaagtcagagcatgtggtctgctggagctgtcttggacggctggcaagagtggaccatgcacacctcacctcctcccagctgctttcagtgacctcatgttggtagcttgaaatcggctatggtgggtgtatttataccacagacattggcaggtgctctatgaggcagggctctcctctccaccctcccccactcagctaatggttaaacatttgccggcaaggagtcttgttggtgagggaggcagaatgaggctgcccctgggcagagacacaactgaccatctctcaagggtcaaataagagaagggagacttcttggtaggctttttccaacaagaatcttctgtctgtgtatttgcaagtaggagaaagacagggaggagtagacataggggtctgctttcagaagtggggacctccttcggctcccttttcactctgaccttgaattaagggagaagatttcagagatcaatgtaaagcttatttcccttgttcttgttcagaaggatgtaatattaatccatgaattaatgtacaaatacatctattttgtatacatttaatgtgatcctaatccctgtgcgtgtcttatgaggttggaaatccaacgaaattctactagatatcaaaatgtattacaaaaacaggacaatctaagtaaacacatgaacagaacagaatggggaggccaggaataaagccaaatgcatgtgtcaatctggtacatgatcaaggcttcatttcacaataggaagagaaagctcaattgttcaagaaatgacgctgggacaaccaataagccagttagtaaaaggtaaaatgaaagacagttgtttggttttyttattattaaagccaatttattcattatattggaataaattccaacgagcgaaatacttagatataaaacctgaaactgtaaaatacaaggacaaagcatgagtgaacattttataattctgaaactggggaaggcccttttaaacatgacacaaaacccaaaagccataggagaagattaagtttgtctrtagaaatataaaacacaccagaaacaaaataaatgccaaatgccaaattagaaagaataatcatgacaaatatgactatcaaagagttatttttcttgacaaagtgcttcactcaaatcagcaggaaaaaaacaacctactagaaaacattggtaaagaaacaggcagagaaatattggaagagatgtctaacctcaggatataattgaagagacataaattaaagtgcagttccaagtctcaccacatgcctttcccaggcccagcccctccagaaagtggtgtcccagtttccacttggtccgtgacaacattcttccccagatctctgaaaaagccttggttagccctggatttgatcctggttggagacatkcatcctgctaccagggcaggctctgtaattaacaaactgtgtgattatccctaccacgtaaacattgtccctagcgggatggaagatgtttcttggaatcctcycctcctgaccttttcttcaggcctcttggtgtgcagagtagtttacagaaagtttacactgggaggcttcagagatgacattgtgtggtttccgggttttctccttgttttattcttagcatcacttatccttgagaggagaaaagccaggggcccttccgatagatgagtgggatctcctccctcgtgcccttttggwtggctgccacaagcccatcctaagcctgyrgcagacttcaactcactccctgttgarccagcgcacccaccctgatggcagggtgcccatcctacccagctgacgtgttccctgagcacaggccactggacacttatattcgtggcttcagggaggaccctagcagcctggagatgttttagggtcatagcatgtgaatccagagaaatcttctggagaggatctgattctaaaactgctgcttgacaaggacaaactttcattgatcacaagacatattgggctcaaaagcaaccttgctctattctggagcttccctgttcagttcagttcaacaagtgtctgatgatggcagctaccatttcaataggctttacaaacataattaaatgtaatttgatgatcctatgaggttatactgttacctctattctatagatgaggaaactgaggctctgggaggttagacaacttgctgagggtcacacagtcatagtcggaggcaggattagaatttagtctgccagtctagaaagcccatgcctgggaagagattctggctgtgtcagccaaaggagaccccaggctgagaactgggcatgtttgtttggtggtgaacggcgggtgagccagtgtgtctgagcatggaatagatggaaagatgtggcaggaaaggaaactaatatggttgatggggatgggattgagggatggccttgaacatggtagaaaggagccyttgctggtwcttgagagggagagtgacaagactcacgtttcttagctctccatcacccctgaccacctggccatccctcctcagccctgcatcatcacagccttgtgcttcttctaatctcatcacatcccctttgtcctgaatcttgatcataaaccactggatcataaatcactgtrgtcagtgaacctgcttctagtctccrtcctaaatatttatttatgttgcactctgcaccwccaggaaaataggcatagattgctctgcatcccacaaagattaggggatgctcagagattgcccaactgctaggagaagcctgctggctagagtgagaggaacaggagcaatctgactagtctagcctgaaaacacacattttgaaggtcaggttctgatatcyaagccatccttagataagtggccatgagcaatgactgtgtaaataaaaaagggcttagaggatcrccgtccaggagttccatgtgctgcrggctgagtctccgctggccccactgtcccatgcgtttgtttacaagccatgcatccacagcggtgaggagctctccaggagccacttcccagaagtagacccagaggatgctggccccttcctgttcctttcccacccccagcccctgcaggagatttcctatgatgttccatttcatctttctccatcttccctcccaacccactaaccacagtgagtgtcccccaaggacgatcacacaaagtgagagggatgggagcaaagatgaactggaggcctagggattggctctgtctcytccttgctcaatctcatgtgtctcttgttttttttttttcagggtcaaccaggmactagaggtttccctggatttccggtaagtggagaaggctgaagttagctgtgtcccaggtggtctgtaggcctgattgggttaaacttcatctgaggtcagccccggttccactctttctctcccaaaccctggtcattaaggacttgcttctacagccattcatggacaccaactcaggacagtagctcagcagtcaggtcatgatgcaaggaataaatacaggggagcaaatacacaaattaaggggcagcaggacaggccccaggtgagtgaagtcacaggctgataaaccccagcattgacctgggaatatagaatggacgatgccctgtgggagaacaccctgcagctcagcctgtgcctgagctttgagaggagatccagcgagggggaggcagaggggtggccatctgggtgtccttgacctctgcytatggggcctaaggcaggttctgacaggcagagmagagggagcagttccccctttctcccaacctcaatgcaggccagcccctgatttctaggaacacaccacctactctgcactcaggrcaagggtgaggtccttgacattaatggggaggccacccattgggttctctcttgcgctgtgcacctggcatccaacattctattattctcaaccccatttcaggatgggaagttgaggcctaggcttacccatagtcacattaacaagtacgtggtcaagcagggccttgagctccaacttatcagaatccagaatctgtgcttttccccactgcccaggcagcctctttggcaggagtcctgtgatgctcagtctttacatctggcctttctggtttcagggtcccattgggctggacggcaaaccggtaagtggacccgctctctcccctcactgcaggtcagtgatcctggatctcttggtcattctgcaagatattgaatccttggaaaatgctttacttagaaagaaaagtcctggggctgaaggttgtcactagtgggaagtggagggggccatttgagtcacccctgaccccagtggccttccccagggcacaggtccccagctgctgagcttggctttcgaagtccaggygagagccatccctagaatgggtgattctgggtggggtgggggtgagatcaggaggcartgaggagagtggagggtacggaggtcaaatagctggtctgaagagccyggccactcatgcacacgcttgcccctgctcccyagcacctgtgtctcccatggccctgtcctcgaggtcagggtctccctccccgattgagaccccacaygtgtgctcaagtccacgtggagactgcttcccaccatagctcctctcttcgttcatttcaatcctttggacttggttccctgacacaaatgttcatgggagaaaggagtcccctccccagtcctaggagcaagtcagctggaagggagcatgacccatccaaagccctcagggtggacggaatgcagccccactcacagccatgcctggccccgccactcgcctctctcagttgagggaccctagcaccacccagttactccccaactgcaggccagygagctaagtgcagcccaggggtgccagcaatcatttccactcatgtcacgggaccaggcatcccccgaagctaccctggacatgtgaatggcatgagcgttggggtctagggagactacccccacccctgctctctgaagggcaggcagctgctagtgaggcccagcgaggggcagtgagcaaatgaccttgccttagggactgggtgaaggagtgcacaagccagaaggtgcagatggagcacargggacagggaggagcacggggggcagggaggagcacagggggcagggaggagcatgaaggacagagggtggaacttctgggctgcgaacagtgcacctggtactcaccctcttctccttccagggccacccaggaccaaagggcgacatggtaagagcccagctttcctgccttcccgagatgggtgggggttggcccagcctcacaggcacagccaagcactgcaaagtgggtcccacagggacaacaggaatggctgtccrtgctggtcactccccagctgtgtaaaccacatgccctggatcctcacatcaatatgcagggaggagaaatgggcaggggcttctccatctgaagcatgaggatgggagatccagagagagtgcacacctggctggtagcacacagaggtcggtgtccagcttactgctctcaaaccacactcgcatgggccttgggagacaaggtttcatctgcactcacaggggacactttctctaggagacaccatttctactgagcctgaggtccctcaaggcctcataaccccttccgggtgctggctgtgccctgagccaccccaggactccaggggttcctgccccactggggctggtggtgcccagtggatcatctcagctgggggtgccacatgcatcatcccaaaggccccttcccctctcccttcctgggagtttctgtttggaggttgggccacttggcaagtcaggagcaggagmaaggtcttctcttccatgtcacagcatcccgcggccaccacccagatggatctgcccagggtacctggagtgcctcaggccccaaaaaggtggagagacaacatttggcccagctttctcctggcccctaccttctgcagagctttggaaataaattttctgtctccacagaccatcccttccagaagggaatgaggggctgcgcactctcacggtgggccagatctcagcagggactgatgggccattaagagctaatgggcccctgctcccacactgtggagtgtattttggttttcaataaatccctgctttaaaaaaacaaacaaacagacagacaaacaaaacagccctgggctggggtgcatttctgcctcctaagatccaggtcgcacctactgtgagggaccacctcctgctccacaggttggtgggccaggaatttgtgcagggtggtgaaagcaacgcagcaggctccccctgtccctgttcagtgggggcctggctcatgccttgctccaagcgctggtgtgaagacaacccttgacccatgactggggcactgccagggcatggagggaggcaggtaatcatgtgggtggaaagggggatggtggagtgttggctgcaaggcctgggctccagcctagctcttcctaacttgccagctccctctgggccccaacctgtcctcttgactcagatccaactaatatttattgagggtttgccacgtggttggcactgggctaagcactttgcatgactgtctcaatcctcagcgtaactctgtgctccaggtcttgctagaatcccctttgacaggtgtggaaaccaaggctcagagagtctaactaacttgcctgaagtcacacagctgaatgtccaaaacaagatcgaaacacagttctcaaattccttccctccctttttttattaaggttttattacctycctccctttctgtttccctcactctttgtcagccttcctgccaccttccttcttttaatgcattttttatggagtatctaaaatgtgctgggcactkcttcaggtgctagggatacagacgggagcaagagagagactgttcttgccatctgtagctcacagtctagtagggagacatccttttaaatgatcactcacataactaacaagttgctttgcaatgagtgctataaaaagataatccttagtgccctggaaatcttggtataacaaaaacctcacccaggccaaaggtcggagacggcttttctgagaaagagacttttgaactagtgcctgaagaatgagcattcaaccgagagaaaatagaaagggggatgggaatgtgctttctggacatgggagaatagcacgtgcaaaggtcctgaggtaggaaaatccttgacatgtctgcagaaccggaggaagggcactggaggcagaaggccctggaggcagtggcagaagagctggcgctggaatccaggttccccagcaaggtttcctctccatcacagctgcctccgctgcaaatgcatttccccccgcccctaccccattcccaggcatgctgtgcacatgcatggagtagtggagacygaggcaggaagaaactgccatgccacattgttatagaggcataaagggcttggggtgctcatcccttcagcctgagcttctttccctctctggcagccttatgctaccgtaaggcagcccatggccccccagaagtaataataatggtcatcctctaggcagcactctgtcatcctcataacagcttatcatccccacttcatgagaggggaaattgaggcacagagtggctaagtacattgcctgaggccacaaagctcctaaatacaacagctgagattcagacccatgcagtggagtcttacccctcgatcacacctcctctcagcagccagcactttgtcctggaggaaagggacccttccatggggccgcttttcctgccctcattctgccacaccgtccctctgccccacacacttgaccgcctgtccagggatcagagctaactcaacagaaaaggcaggcccaccccctctctcrtgagcccacatcagtgggatagatcccctgtctgcctcatcaaatccagcaggccacagagcatctgattcctgtttggcttggcatggstacccgagctgttagttgcccaccgctgtccagcatcattaccttgccctgctcttcatctgtctgtctcctgccccagatgctgtcccctccactggcgtcccactggggcactggcactcaccctcattgtttaacctgtgtcctcacctctcaaaagggagtcacctctgccycacccccccacttcacattattcccaagaacctgaaataaggtgttgaagtgttgggaggacacagttgtataatagtgtagttggggggtggacaagattgggggtctgagactcaggaatgacataagggctgtaaagcaaggcctggactgagtccaaatctcacccaccacccacagggctgtcgagtgaggagcgccaggcactcagaacatgcttggcacccgagaagcagacaggcgccttagctatgcctcagtggcggttagcacaggcctgstggcaagtgctaagcacatcaccggtggccatggcccttaaaggggcaggtgctgcctggctgaagataactggtaccatgtgttgttggacctcgacataattaagagaaacttgaaatccaaatttttatttgcactctgcttgctctcttaagtattggcaactagttgaaataaaaccatgtgggacaaacaaaatccctatgaagaccacgattgtcccctgggccaccgtttgggatgtctggtttcaattgtccaagtctctgcagtcctgaaactccgcctgcccctcccccatcacacttatatctctgtcctgacagaggatgacctggtcacctgtggtctgggcccgggttccctgccggatgaatcatgtgctgcagaacttcattctaagcactctgccaggccgagcgcggtggctcacacctgtaatcccagaactctgggaggccagcatgggcagattgcttgagtctgggagtttgagagcagcctgggcaacatggcaaaaccctgtctctacaaaaaaatgcaagagttagccaagcacggtagtgtgtgcctgtagacctagctatttgtgaggcagaggtgggaggactgcctgaacccaggaggcagaggctgcagtgagcggagatcacaccactgtactccattctggacaacagagcgagaccctgtctcaataaaacaataaaagaccaataaacacttggccagccacatgggctgggagtgccacatggatggtcccaaaggccacttctcccttccagtgatgctcttgggagtttcccagtttggaggtggccctgttggcaagcggggagcaggaacaaggctctggcacatcacagcawgctgcggccacctcccagatggacccacccttggggatctgcagtgcttcaggccccaaagagactggtggctcaaagggacctgcttatggctctagccaagtctagaagccctgactcccaaggtctggcccagttctgagcatttggcagtggaaacagctggaccttggccgtcagacaaacctgggctcctgtcccagtgccacctttcactgagccatggggccttgtctctgtcacctcactcgggagctggagtggacacaagcatctccctcacagacacatacctgaagagccagcctcagggtggatcctcagcccataaggcatttgttttctcctcttccctccaccagccttggtgcagcctcctaagagagccagagcatgcggggccctccccagacagcaagggtccctcccaaccccagctcctttcctagccctgcatggacaagacaaccttgaaggaaacttcaagacccctcatattccttggagaagtccagaacatggcttcagttgccaacttcctgctttctctcttttgctgaaggtttctctaaggcccccattgtctgaggcaccggcccagcacccccaggccagaagttcttctggttcagtgggcttcactgcagcctgggaggcaggaggtggaatgtgctagtgtctcccagaggcttgatgcatgtgaggtagggggtcccatggagsagaaaactccctgacctctaggtagagcccctccatagctggcccatgagatgctggtggttggaggaatggatgaaagatgccatctgttcttcatcacagccctagtcctgcccactggggggtgaagcagctgagactctgtgaataagacatcttgaatgtggtgggcatgggaagacctggccatggctggtagagcccagccttcgggattcagccccaatccccacccaggcaggtgtccctgattgcctgtcttctgtctgcccactgacctgtgtgtgtttgcttcccacagggtctgacgggtcccccaggacagccggttggtacctcatccatctatttcccagcagagaagcttccggtggctgtgaccttagctttggtttctaactctctcatctccgtctctttgtagggaccccagggacaaaaaggagaaaaggtaagagcagtggaggtttcctagagtctccatctcaggaaatggcctcccagttggtagaaaggggtcaattatggttattttcaaacttcagttttaattgacagaaccaggaaagcccccgaggtgccgcataatagattcrgttgacaccgctccaggggacatccttttcttggagtgaggggtcctcctggaggctggtccgggtgacatcctttccaggggtcctcctggagcctggccctcttcagcctctttctgggcccctcccagctgtcactccatggtgttccctgacacctccatgagcctctgggattctgagaggcatcaacctgtaaaccactggcctggcctcctgccctctctgtcttgttgaatttctgatagagacactgctgtgcttgcccttgggccgctggtacaggggcctggcgctcccagctcagagaaggtggcttgggacccccatggtgccggctgctcccatccggtggctcctgttcagggctgtctggtgggcctgcctagagggtcaacctttcgccaggcatggggcataactcccgactctgccattatggcaagtggtataaggcgaagccccacccctaggctccctggggccacttccaggcaggccatggaagtttcttccctgctgctagccaggggcaagggagggacttagttcttctgcctcagagggctcagaccaaaactagagcaggagggctggtgagcggtgacatgtgtggcatgtcctgaagtgctgggggtgccctgagaaacaggtacccccaacaagtgcctaacaccacctttcccttccctctccttcccagggtcagtgtggagagtacccacaccgggtaagtgaacccctaaaatttagcagggcactttgatccatccctggggcacagcgcccagctcagcctcatctccctggggtctccagttactaacagatcatgggggarcaggagcacccactgccctctgcactcagcagtcagagaggggagcttgggatggtggtgcgtctggtgggaacagctgatgtgtctctccagccatgtgctatatggagccgctcatcacccgtgcgtgtctgtacatccgcccctttgtacgtacgtctgactcggtatgttggagtctcctgctgtgtgtctggagctctgtggctgctctgcacatggccccctgtggcagcgtgacttgtgtgagtctgtttgactccccacccaacaagcatgtgtgtgcgtgtgtgtggcggtaggrgggtggtgtctggcagcctagccgtggccaaaacagtgggacttttctattagtcactgtatcagatgatggtgtttcacatccaaacctcgatgatgggagataatcggggactgactgcagcaattcaaggataaaatctctccttggcctctttaaaarcagaggaaacccttctccaagcagggtggggatttcaggctgagatggktcctctgcccacccccgcctgctccttccttttccttgctccaccccaagacacagaacccaaaagactgctgtygtcctgttaggaatcttcaaacttgtgtcccagcagcagggtcgatcttgggacaggggagagcaagatacgcacagcttcctccagtaggagccccagtgagctggacccagaaaaaaatgcccctcattttgtggattggcctcgttgctcccagacctggacagcagggatggaagatgagcatctttaggcatctctccccgctgtcatgtgccccatggtgctcagcttccctggctgcccacccctgccaggcaggtccgggtggtgcgattttgggagtggagacagacataagccaggctcagtgccagcttgactctagaaggctgtcaggagggcaatgctagcagggcctagcctctgcccagaccctcaggaagctggaaggcaggcctgaggtctgggttcctgggccagggaaccactgtgagcctggtacgtgagaggctgggatgggtttaaggctacggcsgtgctgggcccgggctgaggaaggcaggccagcagcagcacagtcagagccacagcctgtcagcggcatgtgctccagggatgcaggggccctgctgttccggccagcctgatcctgatacaataatagaaggtcagctgtgtttatttgaaacgatgggctcacggggttattatgttacccgaaagaaagacaacatcccccagcacaaaagacaacacaactgcagacgctttggtagtgtgtctcccgttcttagtaagygcttggggtggggtgggggcagggctctctgcccctcagcccaacataaggaaagggaagagcacagtgacagaaggctgcagaatacccctggccacagggtgcrgtgaagcctgacctcatgacagtggcactctggggaacatgtcaagcgtggggtgggggcatagatttgggattccagctgaggggcagaccaagtttatttagaagagggtagaaaatcaggggccttctagagatctgttggctttccaaggggttrggttggggtggcaggtctcggggcctggaagacaccaagaaatccaggtggcccctcctccattccagcctgtggcttccccagggagggagaggagaggggtggggagcaggggagctggtgtctgtgggctctcccctcacggtccctgtcgccctgtctctgccacctccatcccctcccaaactaggagtgcctaagcagcatgccagcagctctgcgctccagccarataattgccctgaaggtttgtaggttctggaaggtctccgggcccctctccactgagaggcttcctgaacatacagcccaacattgcacatccccaggccccggcagtgggagcgggtggagctctgtgtgccactgctgtccaagaaggcagcagctgtgacctggaaaggccacacttgggctccccatccccagctgggcgcattcgcagcccragcagctcctggttcttaacactcatcccaggagtctcgtgtgatttaagcgctttcaaaaacaagcagctgatgacagtatatgccatctttgttttcacatgggctctgatrgcctcctaaagccacggkttgctcagcttcaatgggtagagggactggaagctgcaacaatttccagaaatgaaaatcacattagataatatgactgcaagttgcctyccgcaaaaacgtggttgagctttctggagatatctttgcccagcctctatcttccaggccccgcagccccagggtgagccctcagcagcacttaacatgtgcccacgctggcctcaccctcagccagctcaaaccccggggaactgggcttggcactgcccttgaccaccctccccagatgcgctgacaccagcctttcttgctcaaccaaaaaaagaacccaccagccgcacaccagcccaacttcaagtaccaatttcacgggcccggtggttccctggccagagcctctgagttggctcccttctgtcccccaagcagggatgggtggggctggcagtgcaacgttgggctgtgtgtccagcagcctctgcagcccagcatggccacggagggcaagcctggccatgtgggagccactgtcccattccgggggctgctggtcaacatcccaaactctgacctggaggccgaggccgggtgtggactgagggccacaactcctcctaagggacggctgtgccatccaagggcaagctccgctctgcatcctcaagccgtgagagtgccctgtccactccttccctcccactcctcatgtgcacgctaatctctcttctctcttcctctgctccggtccctcttggttgccctgccctcctggtgacttttggcatmgatctgaatacctgtgatctttggcctttgccctctggccctccaactcatctttctcctcagctgctgcctctcctcaattcagtgcgactggctccacccccggtcataaaaaggcggacrttccaggtagacacctcccgtttgtccagaccatgtgtggtttcccaaggggcccggcaagcctgctggggctgcagacaaagccagaacctctctctaattcagtgaaattaaatcagacaaaaataggcccacgtataccatagacatggaaatacacaacacacaggccccagaagacccacaactaccaccacacaatgattactcaaaacagccatcaacaagagctgtcagtgtgtgccaggcaccctgttacccatttcacaggcctggttatatttcattcaccaacagttttatgaattaggcatgatcatccttatttcacgatgaggaaatcgaggctcagagaggttaaccaagttgccaaggtcacacagccagtacattgcagagtggggatttgtacccagtctctctgcctgttactagctgtgtcatttggggcaagttacttgacctgtgtcccagccttctcatctataaaataaggataataacagtgtctatttcacagggttgttgttgatatgtaaagcatttggaatagttcctggcacagtttaagagacataattgttagctgtttttattactattatccatattttggagataaggtaactgaggctcagagaagtgaattgatttgcccaaggttatactaacagtaagaggcagaattgaaactggccttgaagcagaattgaaattgaagtcaggtcttcagacctcacatccagggctctctcagctggacctacctcctctctacttagaaatgcagactgcttagcatctgatccctcgtaacctgagtttggggagcaagggaatttgtggagggaatgtagtccacaacccacattgtgagcaagtgcttccttcttcttcctgccttcctaacccaaggaggcttggataggagcagatcacaaagaacaaagccatctggcctctgctcttcagagatcacagcttgattccaggctggctggcccrtggctgcccctgtgctcctcacctttctcatgctgcaccaggtaccccgcccagcacagggacgctagcagtggcagggctctgagctgctttctacaagcctgaccgcagagcctcaagcaacaatctggcctgactcaggagtcaggagcccaagggcctagatgttcaggcacctgattgaacaaggctgaaaaatccctccaattaacagctaaaaatacagagggacacgtgactccagtgccacccaagcctgcaggccacatatctcattacgcctggccaaatcctcgagagcctccgtgtgcccgagcactcaccagagcatggctactcaggaggcccactggcagcttagagaagtaccaggcccacccctgtcacccaccccaggctgtgccggaccccattccaggagagctgagtccacactctcagaatagccattctcctgggccccaacagcgacctcccagccttaggtgtatcagctgttcttttttgagcmctcactgggttccagacattgttgtgagaattctatgcaaattatctcatgcattccccacaccagccatctcactatcccccgctttacaaaggaagaactcaagaggrgtgcaggattccatccaggccactgcatgttactgcctcccttttcaagagcaagaggtggtgaagccagaactttctgtgctaccctgacctggtttccaaagtagagaaagaagacgaggcacctctgagctacctgctgcagattctgcctccagaatcaggttttttatgctgtcagccactatgggacataaaaatgcttgtccatttcttatcaataaaccaatattgattttacaggctctacaagccgcttaaacattgggtctaagattcactgaaaaaggaagctttatatgaaatatgatgtgcttagcagatggtgttggacgtcatttccaaagagcagaaagtgtagatggtgagccctttttgctgggggcttacttggaaagaatagggagagtctgcagttccaactttgggtcctggcgccaccctgaattcccatgtgactttgatcagrgaattcaacttcttggagcctcagttttctcttctgtaacataggacttgtgacgttatgaagattctagaatttcacagccagaaaggagctcgggagtttacttcagactaagcctcccccatcttgtgaatgtagaaacccacaaaaaatataaacacacaaagtacaggattctgaggaggttccgggacccaagcagctgaatcagatttgatgtggttgaaaaggaggctgcactggtccctttttaaggcctgaggcttagygaagcctttcttggttcagaagaaacactgacacctgagacttatcaacaaccaacatgcagccgggtgggggacctgcagtcagggcagctgccacagtgatttcaacacctgctcctctgccatggacaccctgagccctaaagtggcttctcagagggtgtggcaggataggrcccaggctccrgagtgacactgctagatgccatctgcctacaggttttccagccaaaagatggtgcaagcaggtcttgctgaaagcttacatttctcattcccaggttgtgcactcctatttatcaccaccacttccctctagagtttgcagcaagcatcatcagctgccttcctcgcatggggaagcaggagacccctcaggtgtgtcataggggcttgctgagatcctctgagaaaggtgggccggcctggaactccagccgcctgcatcccccagcctccaccctagagctcccacacctgccaggaggttctgcttcagcccatctgcagggatgggcccctcctcacaagagctaagcccagattgatcccagagaggtcatttagaaaataacaaaccaaggagccagacttggtttagatctaagatgactttgtgttgccccagccctgaaatctgggtcacgtgcaccaggccatctcctcctccagggggagcatgatgccatcgctacctccctgggctcacagtccatcccgtggacaggcatggtgggaaggcgggctcagagcagctggctgaggagacaagggaataataacagcctccccacgcagcataaagcacttccacacagcttccaaactctttcaatgaaaccaaagattgcaggctcaattgccctcccaggccaggcagatcaccttaagtaacagaagcaggctgtgtgtgagaagggctaggagggagaggacaaaagcagccagagaactcaggccccacttaacaggcagccactccttggacgtaggaatgtgggcccagctcagccagggttcccagtgtttcatcagaagccaccaattcaaattttatatgtaaagtctcttgctcagttgtttagtgagccaaataaaattccatgggctttgacctaaggatcccatttgatcctctgggtcagataaagacagcaaaaagctgagacaggaaacgagggctattgttcccattctatggctgagagactgrggcttagggagaactgtgcctcgccacacagggagggtgacagaggcaggcccaggctgaagattcaggccatctggccaggctgggagcaggcctttggttgggccaggggctgtctcccacccactcctctgcctctgcccccccgcagaatgtctctccgcagcaactcctctttggaagccccaccttcagggacctaacatcttggcgttcttctcactgccaccagcccctgcatgtcatcaccactaccacagcatcatcaccatcatgccaccgcttcctccccccatcaccactccttcccggcagaaatcacagcaggccttcactgggtgcatggcctgagggtgggggacggtctgcagctctgggggccttccctctaacattcgtttccatgaacctcagggcgaacagagccaggccagcatccaaggtccaccagggcccccaggcccccctggaccaagtggacctctggggcacccaggactgccagggcctatggggccacctgtaagtattcccttcctctctccttcaagacttatcccaagaactctctggaaacctccaaaccttgaataggcagtgggtcccctacaaaaagcagaaatgccttggcagggccattggatgtgggtgaaccatgcaaggggctattcatccccatcacactcaccacctkttgcactctggctctgaaacacaacctgggccatgttccctgccttccagggaggagaccgccaatggcctgcctgccccgttcccagccccagcagagaggaatttggaaagagaattcccaagggcacctctgatggctatccctgagccccttagcaaaacctgagtcaggcagtgggttctgaaggaggtagtgaggggtcatccaactacctggcaccccagtgaacatgccttccaggggcgtgtgcaggtttcacactgctgggccacctgccagctgagctgaaggtccagtcagccaagagccctgcgccaagcctgaggatgcatcaagcctgcggggcctgcagggtcactgcctggaggactccagagaggccaactggcacctctccaggctggaccacattcaagtgacaggtcaagcccagcggccrccaagtcacccatgttcaagccctggctaagactccactctttcccagcccaatttatacaacaaagccccaggacagaataactcagtgggtacctggacttcagagaaaacgggtcttccacccacccgtaagactaatgttattggagaggcaggtaaagggcaaaatgctttttaaataatgtttttcccatgtggtagaaaaaccaaaacaaaacctgtttttccttcttatgacaaaagcaccataaattaattgtgaaaagaatggaacatagacaaagaaacataatgtttgtgcgcatctctgatagttttgctgraatagagtcccagaggtggaatcactgggcaaggatgtccccaacaattagcaccctgtgtgtacggccacattctagatggcctgtttgcatgtctgggccccttggctgcccagctttcaatctcaaagcttgttatagggtcttcctgggccgggccacagctatggccgaacacagcatccaccttggctgggaaggccagcacaatgacccctgcaatgcttgacccctgaaatgaattttaaatttttccacaatttcgccccagcaccccagagaggggggttagtcttatttccaccagtttttagatgggaaaacctgaaaggaagggaaactcaggaaacggaaccaaactaaggcaagaaaaccaaaaagtgctccaaattcactttttgctgaccgctgccctttctaccccacccccctcctaacacttggggctctcatccactgaacccaagccaggtggttttctttgttaggttgtttataacaacaacgacaaccaaaaaaagaaaaccagagagcatgtttcttaacccaattgcaatagaccagactcaggcatcacggctttctccagcccacgtttgctgtccacacctacacccaaggctgcggtggagccagcagccttccctggcctctccctcggctcacaccacctcactgtggccagctgccatgcccacagcaccatgggcagaaggagacagagggctcctccactggcaggcaggaccaagggcaaaaccgaggctttgytgggcaaggccggctttctagggaggggttccaattaggaggtgggtgaatgaggatctggaccaaaccacactgtcaatttagcatgatgctgctgacctactttccatgggtgagcacagcagaattgcccgcggcccccacatggctgcaaagagggacataagcctgttatccccacgtgccctcagcaggtttcagatccccttctaggatccactagagctgttggctatagcatgcctattctcttgccatagctattgggagctgctctgcccctagggtctactgtaagtatggctagccccaaccagctctactcaccttttcttttttctttttttttttttttttgcttccacagggcttacctgggcctcctggaccaaaggtgagtgtccttctgggtgatgtgttgaacaggtgggagaattccctgcaggagggagggggaggcagcacagaaggtgactgaggcaggagcagagagggatctcagctgagagacagatcaagcttgacccacttacaaaacaccacccttctcaggaactaacttgattccaacaagaattgcacttcttgggtgctcacgccaatgaagctagtgctacgggctggcattgaaggcacagtccaccctctaaggagtatagcgtctagctggaaactctaagctcatgcccagaacaccgtcacaatatcccaataaaatagtgttttataaggtgtcagaatgggaagagacctctagggtaatccagtctcctgtgaaccctcacccagaagcccacaatgtcaaacaggctctccctttgaagctggggaccctggggctctggggacaagaagatgcccagtgctgattgtgcctaactatcttataaatgcagaagctaagagccctgtgggaaagtgacttgtccatgttcaatagaatcaggtctcctgggtctcctgggtctctacccaagtgactcttcccaccattcctcagcctctgcaaagtggagcctgttctcaagagtagaacaatctgtgttgtcctcagaggaagctaagagctattgctcctgggaaggctggagatgggtgttgaaggggcagtggaacttggagtcatcgagaggaagagggatggtattgtgtggggaacagcacaagtcaaagtttggcagtgggaaaacctctttaatggccttctctttgttttcccagggagacccagggatccagggctaccacggccggaaggtaagatggagggggaggacccaagtggggcaggactttggacaaatcagtggcctactggacctcagacccaagagggtctctcccttccaacctasgtggctgtgcctgtagtgaggcaggccaggttctcactggccccccgagggcctgataagtgggagccaaattactgggatccacctaggcagagttctttctgtgctgagccaggatgtaggacatggaggggtccagctcttacaggccagagagtcagaagcactcctgcacaaataaccccagtgaaggcagactttattaagtgctactgtcacaaggcactgcacgattacaggaggtggagagacaaatttcaggttgagagaagtttgggaaatattctgggagaagacagcctgagaactcaaccttgatgaatgggcagatgtatcagttatctattgcggtgtaacaaaccattccaagtttactgactctctgtcacaattctgtggattgacagtctgggaattctgctaatctcacctgggctcactcatgcagtcacaccacatgacagatagaagggtgggaggggacaagatggccccattcacatgtctggtggtcaatgctggctgtgggctggggggccctgttctccacatggcctcttatcctccaggaagctagacagacttccttacagcacagcaggtccagggcagcattcaaaatgggcaggtcccagtgcataaagacttgtcacgtatctgcttgtatcacattttctaatgtcttattggttgaagcaagtcacatgaccaagtcatgtgagtcagtgtgggaagagtcttaggctctacttcttcactggaggagtagaaagcatttgtggcctttttgtttgtttgtttgttttttgtttttgtttttgttttttttgagacagagtctaactctgtcaccaggctggagtgcaatggcgtgatctcggctcactgcaacccccgcctcccaggttcaagtgattctcctgcctcagcctcctgagtagctgggactacaggtgcacaccaccatgcccagccagtttttgtgtttttagtagagatggggtttcaccatgttggccaggatggtctcggtctcttgacctcatgatctgcccacctcagcctcccaaagtgctgggattacaggcgtgagccaccgcgcccagttatggccatttttaatctaccactgtgggccttccactagaaaatctgaatggaaacaatattttagataggtaaacaatttgagcaaagacccagaagcagtcattataataactgtaatagcaataataattttatggtagtcactacttactgaacacatactatggtctaggcactatctttcaacagaaactgcattatttttagccctaaaaccactctgtgaggctggtatgactattctcctatttaaaaaatgagaaaactgtgtgtcttagtccatttcatgttgctataacagaataccacagactgggtcatttataaagacaagaaatttatttcttaccattttgaaggctgggaagccgacagtcaaggggcccatatctggtgaggaccttcttgtgtcatcccatggtggacagtggaagggcaggagagggcgagagaacacragcaagagaaggctgggcttgctgttataacaaacccactgtcgcaatcacacacccactcccacaataactaacccacttccatgataactaacccactcccacaataactaacmcacttccatgataactaacccactcccacaataactaacccactctcatgatractaacccacccccacaataactaacccactctcacaataactaaaccactcccatgataactaacccactcctgcaatcayaaacccacacccatgataactaacccactcccacaataactaacccactcttacaataactaattcactcccacaataactaacccgtgataactatcccactcccgcgacagcaacattaatttattcatgagggcagagctatcataatctaatcacctcttaaaggtcccacctctcaacactgttgcattggggattaagtttccaacacaagagctatgggggacacattcaaaccatagcactggagctctccaaagtctcctggctcataagtggcagagcaggagttcagttccaggtctgggtccttcccatggtaccacctgctgtaaggagtgcaaccctgccctccagaccctggctgggaagctgctagagccttccaggaggagaaaagaggcaggaaggaaaggcagcagcaggagaggggcagaaatgttgggaagggaagaagcactccctccaaagcacattcctcgcacactgcagtcatgaggttgccataaccacatggctttatgggtgcctggtgaatgaaatggcaagacctgagagatctttaattagttctacataaactaagacatttgtattgtatcaggaagtggaaatcagcccccgcagttgcctctatccactcacacagactcataaaatttactgcctcctggtgcaacgcgggatcagtttttcattagcagcagggccagctctttcaagctgtgaaggagttgcagggcagcagagggtctccaggcatcacggcgatgcccttggctggcatcataccatgacaggtgtctgcattctgctgcaaactggaagagtgattcatccagaaggggcatggggtctgctgtcctgagtacggagaatcctctgcttggggttaggrtgtcctgacgctagagggcctggtcccaggacagtggcaatcctagactcagattgtaggaagaaacatgtaacccaggctacattgaatttgcagagaagaccagtgtagccctcctgatgggggagcacttccggtccccaggaagcgggagatttgctcagagcctccctgctctagtgtggaagaaggatcatactttcttttgcatgactagaagtagagcaagtgccaatgaataaactctacaagaagagtaattccagctccagaagagggagcttcctaatcgccagatgccttgggagggagggagggagttctggtcaccagaggtgttcaattagaggctggataatgactggtctgggatgtgtttagagaagtctctgtatcagctgggacactgaaaatcccttccagctcagggaagtcatagcttcatggggacagagttggctccatagccttaagagaggagcagctctgagccttgatccctggccttgagaggaggctctgtctctttgaaccttcgtccatgtcttttctccatccacatccagggcttgtcagaagcatccccactcctaggtctcatgaggcactgaggagaagacccttccccttcatgctggactcttgcctcccaacccttctgtctctgccagaccaccctctctgctcttctccggtagcctcttctcatggaatctggaggggctgtgaggccatcatgccccatcaccgcctctctgggtcactggaaggttcccattgcttccactgctcccaacctgtcactgagtcttttcagtaggtgccactggagccactagccttgcaaagccaacagcccatggctggtctgggcaccctttcctctgttctggcctttactctgctgggacccttatcttgccactaactctccactgcctccaagtccaccaaaggtcagagggctggcactgggaactatgaccagcagcaggcagcctgccacsaaggacttgaggtcattccttgggaggctataaatgcctatcccactgccccagcctcactgggacagcagatatcttgacccccagtgatcaccatgatcaggcagaagtttatttcccctctgaatcttgagatgaagtgatttttcatctttgggcagtgcagcaatatttcacatctctagtttagaaagttcatttattccaccttattcagttcttaccatggctcagtggttagaactcatcctgattgtctaaatgagagagactttgcccaaggttgcacagctagtaaacagccatgctggaatttgaaaccaggcctcatcaagccctgtggccagtctgtctttgcaccctggtgcagaagttgaatatctgctcaggggactcaccccaggctaagctaactgcacagaccaaccctcccaacctccacctactaatggtttctttgggatgtggagggctgtccccctacctcccttctattgcccatcagtcctctcttttattctctcctccatgctctgctctctgcttggagtaaggcctacggaggaggcactaacacgaagggtggcttggtctcaggggctgggaagatgagtttggcctcccctaccaccctggggaggagcagtgccagcagctggggatgccaagctgagacaggggccatgtgactgcctcttgaggtcaggatgtgagcgggacctgtggggtaactgatgggccccccacatgagcttccttgcttcaccccagagatctgacccacttggagggacacctttctgacaccacaggctctcagtctatgaagtttgytaatgtccaccaccacccccagcagctggactgggcctggtatcctmttaaaagccagccagacccgcaaggcaggcttctccatcagttccttgagatcaaagcccagtgtggccagcagcccctgtgctgcccccatgccccagtcagggccagccctcctgcctagacactgcgagtattgttgtgcacccatgtggtatctatttgatccaaatttatgacactgatctactttaaatatgttgcaagatgcaaagcgtgtttaaaacattacaaccttggctctctttcaagggggttgacgagtattgtcagattgtgtgtggatcacaaaacctggtgagagcttatcttttaagtacgcagaactggtctgtctgtctcactttgggggcgcatttgatgcctgtggtggcctggatgttaagcctcatggtttgcatgaaggaccatggctgaaacacacattcccctctttcaggctgtgggtttcagaccagaggaggaaatgagarcttcaggctagagctgtttgcaactgcagctacccctcctggaggccagtggggctccccagaaacaggaatgccctggggaggagagtggatgggccctatgatgagatggctagagggctggggaagggcacagggacagaagcccacccacccagccatctcagccttcattctgtggctgtgctggcccttccycttgccccttctcaatgcttcagccaaagggcatgaggattctgatctgccagccagagcaagggcccgtgtggtggacacacttctgtagaatgataactcgtgcaattgtaactaccttactggcttcttcaacaagccaggctgtgtactaggcactttgcatgcatcaacttattgaatccttgtaacaaccctgtgaggtaggttttactcaattcccaacttatggatgagcatactgaggttcacagaggccattttccccgaggtccacagctaggaaatagagaagccaggtctgtgtgatcccaaagccttgctctgaatggctttactatctgcctcttagcagccctgggggaccccatgatgatttccagtagaccttcccccatacccctccatgaatggaaggaaaggaggtggcagctgagctgttttcgttcttgtaagagaaggctggattcaggcctttctctgagtctccaggctccctgggagcatgtctgcrgagtctgcagcagagaacagggagtacttggtgtgttgctcttgccaaagaattaaggaagtggagtgctttgcccattggcactgactccatcyaaataagtccctcagggagttgggatggtttcaggactcccaataaagcctggaggaggcagcttgccccaaccttccacgacagctattcctgaaaccttcctgcacccctccggctcctgtaggacctgagtagcccatgcggttcccactcccactgagtgctccgtgcagatggaagccctagatgcaggagcctgctagtgcggggacagcattttctttgaaagctgtgaaatcctagtggggaccattcgcattaaagataagaaaactaagatctgggcctctgatctgagaccttgtggagactaaagcgaccccagcccccaccctgagcactctgggctttgtttttcatgcactccaaagtccaagattaattagagctgacttttctttttggaactaactacaaaatcaaccgatctcaaattgagattataagccagctgcccttccaaagccctggccttcaatggggcacccgaccccggtaattccccggatcacttcctgccggccctaattacaggaggaactaggatttccgcggttccggtcctctctggtgtggaagatggctgtagcagggaagcaggaactgagctgcctttttcccggaaggaagacctgggaactctttatagggagaaaaccgttagccctccacacctggcttttctggcctagggaaaagaccctggtccaggcttgaggcttgagctgtccaccgaccgccccccacccccacccctccccgcaaactccccacactctcaggcgggccttcctcctcccttacagagaacaaagagcctgtgccaccagatgcatttgctcagggccttccaacccagacctggctgcagcagaaaccaggcctaatcttagagaacttcatttacttccccgtgcttccctggcctgaccttggctgggagctgaccgtaaagcccccttccttcctctagactgtgctttcttgccaagtccctgcccagcttgttcaacaaacagtaaatcgccaattaagaggccactcccacaggagcagagcttggctggtttatgctccaaggagctcacttccattctatcatctctgtaaaggatgcatcctcccacctggaatcttggaccagaacagaggacctatcaatgctgtgtggtgctcaggtgcagtgcccagctggggagtctgagtggcagcctcaaaatcagggatgggacaggccttcaaggtcattcaaagcaaacgcctctctacccacttgtgctcccctagagccttctcagccacaatgactacaatcyatcccttcctgcattggttcttggcactgaggttaaaaagccagccttgcagaggggtggctggatgttggcccaggagtcacagcttctgccatcacaccatgcacgtggccaagaccttttgtaaggctcagagcacccacttccccagcccaagtaaggyggctgagagcccccaggggaacttctgagtcccttctggggagacaagagggggcagagatagaggaggtgaattgaggcctgtgggctttgctggactgagtgagccaggccctccaaaaaccaagacagtgatgagtgagtggatggaaactgagcacaattactaatacactttttaaataggaaaacctaggaggggaattagaaaagaaggagcccttagacaggctcacacaaagacatgccccaaggaacagtcctctgaacagaggtgggccactgtcctcctcgggcaataaccacgccctccccctcccccgcctcctgcctcctgcacatgggccccagccacagcgacgacgctggagtccttgataatgactctcacctccccatcatccaggaaccaatgtttttggctttaggagaagccattccccagttcagaggtcaggcaggggcaggtccctggagacaagccccagggagtgagcctaatgagagtggagtgagcggcagagcgaggtcagctgggggaggccagtgggggcgcccctgcttcctgccaagcaagggggtgggagggagggaggccctgccatggggatcaaggaagcccgggtcacttgcgaaattaagagaattgacccagagaggagggaaggggcgaaggtcagccaccctaacaaggagggctgcctcccgaggaggctcctggggctctgatttcccctgagtacctgattgtgtctttacacactcacatcaacaggggctgaggacaaccccaattagcctggagactctcacgctccggggttttgctctgcacagtttcttccaggattggagacagaagcccagagacaagcttgaagcagacaccacctcctccctgcaggagcacccctctgggcaggaggaagggagagcagggacccactgagacccctcctagagctgcatttttaaccaaagctaagagtccctccccaccccacagagcctttttctggagctgccaaccaagccaaatggcacctccccagctttggcctctctccttccaaagggctgtgcaggggagcagagaaagggctggggtgggtgggaagagacaggagcaccagtggatgggaggtatctgatctaaccgcactttgcaaccaagaaccctggaccagtgggagaaagtggcttatctgtggtcacctgcactgccagcccagctcctcgaaatggaggtgggaagaagagggcagaggcattgagggaaagcaagagaaaagacagagaaagtagaagagagggatgaygggggcctctgaatagtcaaggactcccaagctgacctcccacctgcacccacaccagaggactgtgggggcctctgtactgagtcaaactggtctggtcattcagaatgctagcaggggaccctccaaaggaaagaatgacaggagccctcagctggtactactgagagggcttggagaccgctgtggcgggagtagccagacttcagatgaggtactgtcacgccctctgctggccacagagcggctgtgcacacaggcagtgagcttttctgggcatcctgcgctgagcggcccccacactctgacccctgcacccctatgatgggccacagacctaaggacccccaccaagcaaagaggggctctgctcygctttcagcctgcaaaggctgtttggtggaagcagacggaacatcagtccatctgatacttgggttggccaagagaaataagtaccttggcataacagacaacagactatccaaagccctaggctgcatgaccttggcaatcatacctgtcctctgtgagccgcagttagcttacttgtgaagcaagaataacgtccactcccacattggaagggattgttggagatggaagagaggaaggttgtaaagcttttcagtccagtgcagacacatggcagctgcagtaagtggctgtgcccttctctctcagtcccacaagaaggaagttagtgtctagagcaagccttgggctctagattttcagccatggtaacttcctgaatttagctctgccatcccacctatggttcaggggtcactggtggggtcatgctgagagagggctctggcattgggaactaaagattctaggccttctgtagaatttagagacttggcccaaagaggataaaagtgaagccatctcaggcagacataaatttgtgtgtgcmgattacaaacgctaagtggtccctgtcgcattgaggatgcagcgctgagttataggggatagcaaaaagcttcatagaagagataaaagggccccactcccatcaaacagcctctgcaggctgaaaacagggcagagcccctctctactcagaggccctcaggtctgtggtccataggggtgcaggagtcagtgtgcgagggcagctcagcccagggcaccagacaagaactgggtgctctatcaaccaagactccaaatgatgaatagggttttaagttgaaatggaagaaagacagaccgtggaaatgggtagtgttttcagggacacagaaactagcaggacacagaaactagtgatatcatgacatgatatcaggtgatgaggctaggaaggaagcaggggtcagaacgtcatgctcaggaacctggtccttttcctactgtcaacagcaggccaaggatgttttaaggcaggggtctcgctatccagcctgtgtgttaagaagcttaactggacacttgcrtggaagacccatcacggaggaagagggtggaagtcctctagccttggtaaggagaaggatggacsaggacctcctgtaagatggcaggaaagggagagtgtggacagctgagaaggaagccagagaacaccagatcccctctgcctttaagcctatgggaactgcagcctggcctggcagccacagcagtcacacccaatggggcagctgggccgggagcaggattgtcacactctgtgttgcccatccacagcgctggccttcagatggaggaagtggcagcaggctggctgcagtcacctgttgctggacaccatcccgggccccagctggggcttcgtgctcaggcactgcataggattcaactcccagagccaggagctgccctccccactcccctgatgtagccgatgatagtcctgactcacctgctcttggcctcccacttgtccctggctgtcatctccaactccacctccttgtggtgtgtccttcttcctgatctcaccttactgtcatagacttggcatttttctggagaagtaaagatgttgaacataaagatagggcagtgccacgatggtagagygaccccatgctgtcccagaggagcaacaatggacaggtgaccctacctgtgcctctggacaagtagggtcagaaatggggtgcagataaatgggcagggacacatgcccttggggagagttagacccagaggacttggaagggaaaggaaccccagatgaaaagagaagagagctcctgtytggctcagccagaaggtatcatcctagcaaagctgctggagtgaaaatgaggcaagaagtcccaggcagggaccagagggaaggtgtgcagtaggtaagcagccaatgggtggctcctgcccctggtcccgtcccacagcccaagttccaggtacagctcaaccacagrgtggtaggtagatcttgggccagtcacttctcttgctgaacttgcattccactaggtaagcctctctgtctgggggcctttcctgctctgtgacctgtaattggggccctcctgcaagttcacatagctgaggacaggggcccacacagctgccaccagggcagggtcctcagagctcaacatgaaccggacagccatcccagcctccagacaagacattctcaccgwcatccttgcaggctgacaggccccgagtctggtcctctcctcatgctttctcatttcttcctccagggagaacggggcatgccagggatgccaggcaagcatggagccaaggtacctcccccttccccacatcccaggcagccccaaggcccctcccccagtgcccatccctctctcctcagctctggggacactctggagtcccagctctttgggcctccttctgcctgccctggttctcccagctgcagcattgtggtctctcatcagtgccccctgatgygggcggcctcctcctgggcatccctgggtcataaaaagccatctcaggtaccactagctccactgcagtcctaagacccaagtggagagtaggggcccccaaaaatcacctccacttgagatttgctaaggggcactttgggcatcatctatctctcaaagtgaaatgatatcaggtgatgtgaaaacagggttttcatatcagctttcacaaagctgatatgaaaacagggttcactccagccactccccagtccatgagggcagaggtgcacagagctgactgtgagggtaatgccaaccaaacactgggggcgactgtccctggtgaaatcagcccctttactttgtcatctattctgcacccctctcccgtggctttccattctcctgccgtctcccttcccatctcctcctcctcctcctcctttcatattccaacgaagctcccccttccaccccagggaccccctcccagccccatctagtgccccacagtccccactgtgcctcccaggagaggccaggagccatgcaggtggttgggaagcccagggagccccgcagactgagctacacaragccccttcctcagggtccattctcgtggcgtcagctcagcgcccccacctcccaggtggggttggtggttgcggggttgggaggagtgagcggtcctccttctcatcacaccatggggaggctgtccactgccccccgccccctgctgccccctygctgcagaatgtcttcagacctttttttttctctctctgccagggggcgcccggaattgcsgtggctgggatgaaggtcagtggactgttgtaaccaacacatcagggacagggtgggagagaagagagcgggcagagctggaaatcttagactcagtggggtggctgccagaccaatgagggggcatacaggatttggaaacatttttctcaaagtaacatttgtgccaggtgcataaccttgagccacagatgtgtaactaagccttgcaagtaagtagcaatggtttcctgcctcaactcactagcctgccaatgcaccaaggcagcaggaaggcagcccagatctttcctttatgctctgtaattgggcagctatatgcttccaaagcttcagagagagcaggagttcatctccagaacccccaccctaactgcccatttggttggcaggcagatgtgaggacagcctggaaaaacaagtgctcaaattctatcttcacagcaggtgcacttacagggggcaccatgtccaaaccaaatgtccattccttcctctctttcctcctgggctgcctcacttatgctcccacctgccacacccctcacctggggaagaataggaccctctaagggtcagtagcctgataggcctcctttggcctgggacctgatgcctgaacagagaagagccggggctggccagatgtttcactaaccccaccctgactgcccccaaccccacctccaccaacaggtgccttgctcatttgtttctgctttttctgtctctcacatttgtttctctttttccacacagggtgagccagggatcccaggaaccaaggtactgatgcagagagaatgttccgggctgcacagagcatcggtcatgggcagaggtgggaggggctgctgctgttttgctcttggtccccctgaggctggcctgggactggggacctggctaagcagagaagggcccactggtcaggagcacactgcaaatgcctccccctccctgggtcctggcctgcaggcatgccagctgcagcaggcagtgactattgtcccctgcacccacagggttctctttccctcttgtgtgacaataagaggtgtgacaataagatatgtgacaagaaaaaaagtttgagaaatgctaggttagaaatattacacaggtttctttgctgcagaccttctcagaacctttaatttgctaaatgtgcattgaggagctctcaaaaggaaatatcttatgtggcattttcaaaacrtttttgaccagaacacccttttttaaagaggaaaagcttaagggacaagtattctggaaatgctggtcaatgatcactgcccatcctacccctcactgcctgccccatcttcttatcagtgactttctcttcttaccccaaagggagacccaggagcagaagggaagccggggcccccaggtttgctgggaaagagggggcagagggtaggatatcgtgtatttgagtgtgtgccccttcatcctagcctcaccattcccctactctctggccttcctccatggctggtgtgtcgcctgcagcgtgctgttggtgcatgtgttccgagatgaggggagtggcaggacggcctggccaagcttcagaaacccacactcaagagcacacccactctcctgggcagccttgattacccagcagaaagcctagcagaaggaggaacttgcctccttccacctctgctccccaaggatccacatcctttccttctccacatggcctgcttccgaaggatacccaaactaagcacatctgcaggagcagcccaggcaggacagggcagcaggggctccctcccactgccagggcctctgcctggccctccacaacccctcttggccagcctcaggctactttaccgttcagctgctaccctggggcaggtgccaaggagacgacaccaaaagacttggtgtggcaccttctgtggctcccactggaatgaatgttcattgagacatctgaccaaattataagcccagagccctcagctcacattattacacatgagaactgcctctccccagggccatgggtagcaaagcttcttgtgctgacctgataccccagccctgctggtggggtgctcttggacactcacctgatattggacactgctgtgcactgaatatgtccatcccagacccatatgttgaagccctcacctccagtgtggctgtatttagatagggccttggggaggtcattaaggttaaatgagaccataaggtcgaggccctaatccaataggattggtggccctagaagaaggggaagaaagagagagacctttgagagaccgttctccctctctgccttgtgagaacacggcaagaaagctgtcatattcaaggcaggaagagggctctcaccagaacctggccatactggcaccctgatctcagacttccagcatccagaactgtaagaaaatacatttctgctgtcaaagccacccagactttgttatggccgcctgagctgaccaatacagctgctctgtgaaaagaaggcagagcatcagggagacgggctcgacctgcctctgccactgactcagtaaggggttggccaccagtcacgtaacctcttggggcttccctcaccaaatctgtgaaatgagaatggggttcagcatctctaaggggctctttgattcatgtcatgggggaaaaagagttcttccgtagtggaagaagctgggtagggaagtgtattattttgctagggctgtggtaacaaagtactacaggctgggtggcttgagcagaagaaattcattgtcccacagttctggaagctggaagtccaaaagcaaggtgttagcagggcgggctccatctgagggccaagggggagaatctgctccaagcctctctcccggcttctggtgcttgctggcaatctttggcattccttggcttatagacgtatcaccccaatctctgcctccatctccatatggcatttccctgtgtgcatgtctgtgcccaaatttctcccttttataaaaaggacatcagcacattggataggggctcaccctactcccatgggacttcatcctaactcattacatttgcaatgaccctatgtccaaataaggtgagctggttatagctagaggcggagaagggggtgccagaaaagactgggagcccttagttgctaagcattaagaatctgaagaacagagtggtcaaaaggaattgcttgcccaaccactggcgttctgaactgctcacctctcccaggagaccgccaggatggactagatgcttctggcctttgttatgatctgtggccagtgtgacttctccccagcatgaatgacaagggcccgggccacatgggaataaggaaagcagtcatgcaggtgtcaccaacgcgaagtgacccatggaagtagccagtcaggatgggggccgggaggaagtggagcccttcagaaagccagctgggggcaggggcacmgaggcaggagcaagggaaggcaaggccctaagctgtggagctggtggcttcccaaacctgctgcagaaacagttcctaacccccacactgtctgcatctccctgcagggtgagaagggggctgaaggctcccctgggcttcctggcctcctggggcagaaggtaggtgttgctctgaatggagggttcaagtccttcgtcacccacatcccatacctggccctgcacatccacacrggccccagcattggacgtgtctgtctcccagactgcaggaaaggcagctggaacacagccagattctgtttgtcgagggagaggtgccataggcaggccctgattggcaaaaataaaatgccgaaatgtaaagaattcggtagtgatgacctggtcagatttcttggtaccagctctgcaaatgcatcccacagttcatgaactctgtaagatatttaatttaaaaattaaaaaaaaaaagatgaggccaaaataaggggagacatgcataataagatgggacccttggaaagtcacagtgctcctcagcctgttagaggcctgagcaccctgcagtgatggggtctgcaaagcttatttaatgtttcatttcttacatagtttggccaccaataataatgttattccacattttgaatattctcaacccactgaacagtgttccgtggaatacactttgagaaacacggctccagacccagttttgaaggatcccttgtgtcagctctaaacctgctgcccttcagtaaacacttccaatctctcttcaaatcccacagctggatcagataaatctgggattctgaaggcccctggtccccagacatcctggggcccacaccccatagtgtccctccagtgctcagcctagaccttcctccacaccagggatgctaactccaccttccacccccagggagagaaaggcgatgctggcaactccattggaggaggcagaggggaacctggccctccagggctccctgggcccccagggccaaaggtgagtgttccctggaattggtgttggggaggtgcttacctggggactttgtcttcagcctgttctcggggactctacgtcccggacatcccgccttctctagccttcccctgctccagatgtgtggttttccccatggattccaaaaaggccatttggacccagctcctgcttgcaagcagataacagtttgacctttcagaggagatgtcttccctggggcagatggatggtcccagtgattcagatgactctgatgtaactgagtcagggcgcaatggctgcaggaccttcatggctatgctgtaactgagtcaaggattgatggctgcaggaccttgatggccatgctgtaactgagcaagggaccaatggcttcagggccttaggacaggcaagaggccccccaccttggctctgagtaggttgcaggtcaactatcagctggccccacctggtaccagcacatctggyaggtggcagcagtggaggcagctgcaaatggaaactgccctcactttccttttgctgcttgaaaagtgcaatggtaagatttgggttccccaaagcagatggctcctatgttgcttggtttactttagcagcactgagaaatgaagggggtctgtttcttagctcagaaggaaagcatgaattactctacatcatctggggcaatacaytcattcattccgcccatatccacctgccatgggctgggctctgtgtgggcctaggagggcctggcagggcagagtggacaccagtaaagggtacagaatgcagggaaggaaagcaggagtgggcttccagaggaagcaagacccaggctgggcccaagcatgggtaggagtcagggaggtggaagagtgggaggtgcagaagccatcagggaaagagaagtccaaggcaacatctaggcatgagcggcaagaccatcttttccctcataagcagctgtccaggtgcccagcatgccctcatcccaactctctcctcttccccagggagaagcaggtgtcgatggccaggttggccccccagggcagccaggagacaaggtacagagacccccacatcccagagctgcaagatgagggtcagcttgggaggtcaagaatcatcccggccgaccctaggggtatccctcagggcacaaggctgaccggccatgaccactggcttccctaattcctggttggcttgggctttagagagccatgcactgagacagcagtcatgcaaaagccagtctagggatgggacatttgaccagggagtgacacagagcttcccgagccattggtaaacgaggggctcttgcttctctccagctactccctgtgaaaggctgctgtgtccctcatgagttcacagtggctaaagtgttgtggcagtggaggagaaagagagtgggttacctggaggcagcagtggctccacgtcccgtgagcaggttcatcaggagtcacaccaaagtgttcctgtttcctttatttttactttctatcttgatttttttcaattgtctttatcccagaaaaattgaaactgcgcttggtttttcacaagttacactgctttttcatttattctccatggctctgtcctgtttgcaacaggaacaaatccttccacccgcccactctgggaggtgggtgctcatacacccatgtcctcctgagaccctcctggccctccacatttcactcggcattctgggtctttcacaagtagagtaggcagcaaaagaactgtgtgggctctcgatggcaactgacacccagacaattggcaaaaagctgctgagtcctggatacctgagcaggatggaattaaagagaagcaaacgtccctgctccaatggaggcaactgacttaggggactggggaaaaggtgtgagagagacaaaggggagtccctaacaatgaacacagaacagaaagaacgccaccgagtctgaagtgggrggcagcccrgagggactcagagggacaggagtgtgggtgggtgttccctggatgtttcctgaaggggtggaacctgcacttctatggactaagagctaagatgagcctcctggcccttatcacatggcccatctagggacatcaggctctctgtaccaactttatccccactttgctccaattttgtcatgcaacagggggagcgtggagcagctggagaacagggaccagatggccccaaggtatgtgcctctccctcctggagtcacagcgtgaagcggctggtaaatcaaaaaagcatctgagacaggtctcaattaatatttagaagtttattttgccaaggttaagggcacgtgcccaagagacaggtctgtgccttttgccaaagatgattttgagggcttcaatatttaaaggggaaaagcaggctggaggggaaagaggaagggtatggtaatccacacactgcaagggaaaaggagcaagtagcggaatagttgattatgtattagtctcacgctcagtaaatcggcactttatgtaagctgtggtgaacatggagcagctacctgtggggatatttaaccttttatctgtagctgtctgattaggaacaaaaggaaaggcagcttcttgcatgactcagctttcagctgaactttttttcttttggcagagtgaactggggtcccaagtttttatgtccctttcacaggcttgaccttggggtcttgacgaggcaggaggggaagagcattctggccctcaggtgggaggtctgactggcagcacaggtggacccaatcttcccaggtcggcctagcccagacttctcacatggagtcttctcgatttgttctgcaatccccgagcatcctctgagagtgttcagaatccccagggccccgctggctgttctgggtccacccatgtgcagctaggtgcagccagtgtgggctgatagagagcaggccacagktgccctcccggccctcccggtccaggccstgggttgagatctcatttgccttccagggctccaagggagaaccagggaaaggagagatggtggattacaatggaaacatcaatgaggctctccaggtgagcagggtccagcccagaggccaagatcctcatggatctcaggctctgcaccatgccctgatcagggggcccttccacacagccgagtaggggccctgccctcaggccctcaggcagcgcttccaggagagctgcttcctcgctttctctcctttgacctcccgctgtgtagcctcctgggaaatggccccattactggcatccaggtggccggggctctctgtctgggmccagctggccagttatcctgcctcagggcccctgagtgccatagtggaattatcctggcaccccacaagttacggcccatgcagggtgctggggccccatttctttaatgcatgtataaccccctttcatgcagcagcaaatcttcctggaacgcatctcctttcgtgtcagtttaaccctgtttcaagttcatgagctcccgctccccaccctttaaagcagggtttcccagccttggcactgacttttggggctagagaatctttgtggtggggggagagtcggtcctgtgtgttgtaggatgtgcagcagcgtccccagtctctacctgctagatgccagtagcacccgagcctcagctgtgacaaccaaactatgtctccagacatgaccagttatcccttgggggaagaaattgcccctgctcaagaaccacttcttcaaaggagtctgtgtccgtatgtgactccatttacaaggtgtaaaatcctcttttaaagccaacaatcatctccctgatctattttttgagtggttccatattttgctatattgtgtctgtttaaagggaggtgcgtggcaactttgaaatctgggttctgggagaagaggaaagaacaagggagggtcctcagaaggtgactagaaagaataagaggtggtgcttccttcccttcagtaaagtgaagtaaaggttgcagtccatttagggtgtgcctgagtccattgtaggacggcctcagagtataatcatgcttaggagatgctacgtattctctctccagtgattacaaacctcagcgagaggtggggtrggggtggtgtgagtctgggggccatggagcccacctgcaagcgtctccctccacccacgctcctttgaggggcctagctcccatgtttccatgactgtgcagtgagaaccttccacttggctcttggtttgctcttcaactgattgcctggtgttggttttttaggagatccggacgctggccttgatggtaagttttgctcctcctggctttccttgggcactggacgggggggctggggatggcagcctggaagcaaggatttgatttctcccctccagaaagcaggtactgggctgcagattagggttgacccaacagggctggggcagatgatgatctgagctggaggtgatgagtcaggactggtaggtgggcctcgagagctgcccgtgccctgggtcatgggtgtcctctgtgtaaaggctcttcaccaatacagctgtgctctctggtgacaatacaaatgctggattctatttacagctgcgtgaaggaaatagcagtactgaggaggatgtttttaatgtttcycttttttcccaacttttagctaattaaatcctgaaaaactagtagcaacctaccacgtatccccctttcctggaaatcagtttcattatctgcacttggaaaaccagggaatttcaagtctgggttttgtacaggtgcctaccggtgacaggctyttggtaaatatttgtagttaaaatgactaccaccaagtttaacttctaaggtagaggatgggaggagagatcatgaagttctctgactactgaaatttcaattcacctaatattttttcatggctrtgagccacagaacacacttagggatggcacaaactcacaatcaaacaccacttctgtgacgtcccaatcccagaaattgctatcaacgacatggttctggaatcaatgagcttcatttggagacattaaaatatattatttggcagggcacagtggcttatgcctgtaatcccagcactttgagacactgaggtgggcagatcgcttgaggtcaggagttcaagaccagcttggccaacatggtgtctctactaaaaatacaaaagttagccaggcatggtggcgggtgcctataatcccagctactcagtaggctgaggaacgagaatcacttgaacccgggaggcggaggttgcagtgagtcragactgcaccactgcactccagcctgggtgacagagtgagactctgtcttaataataataatgtgaaatagctattggaaataaaaccttcccagaaacattttttttcctttaaaatcaaccttgaggtgtaacttacacataagaaaaggtactcattttaggtgtagagtttgatgagttttgataagtgtatatacccaagtatcaaccacccaatcactctagaaagtttcttcatgcaccttgggagacactcccagccccaggccaccactgctctgcgtcacttctgtcactgtagattagrtgtgtcttttgtctcttctagagcttcatgtaaatggaattaaacagtatctgtgcctggatgcttctgctcagcagaatgtgtttgagatgcacccttgtcatcagcacttggttctttttccctgctgagtagtatttcattgtatggatgtaccatgcattcccctgttgatgggcatttgggttgttttctggagatatttttaagtcattattggggaaggtcagacttagcttcttggagcccaaagggcgaccagagatgccctagagagaaggagagggtattggacatggctctccgaaccccacctccacttcaacccagtcacacttggtgcttatatgttttgcattttgggttccccatgttattttctttgcaaaaaatgcatctctatcactggagaaaggtctgtaaacaacttatctgtacaagccagcctccacatatagccctcagggcacaggctaccctcctccatgggacagttcttccatgtgtctttcctttctctcctaggggcctcctggtcttcctgggcaaattggcccacctggagctccagggattccaggccagaaggtaaatcttatcttgacaaagggggtgaagactttgcaagggcatcgaccccagggcttcccctccccctgtgaccctctcatcttcccagcactaccaccataccctcctgctgctccaaggcaccaggggacccgcccacccacctcccagctgctgtggctcttctagccaacccttgccatctgcttgggctcctgtaattcacagagccttctgatgctgtggggcctgggtctagacacacccctgcccttgccccaaccagacccacagcgggagtgaggaccccatcagggacctcggcatctgagcccctccccaatcctcccacctcactccctgcccttgctttccttttacactccacacacctgtgtttttctcagaagrtctgcccctctgtctcccactcatgaggtcctctcccctgcaagtctttttccatcttacctttctttcaaagcccttctcatctttcaagcccaattcaatagaccacctcctccttgaagcctcccygatctatcaggcagaattccctgccctttcctctgcttctctgggtaggacctacatcattttgccacctcccttaactccccacctgacccaaagaaggggcttggtttgtgtgaagatgaaaggagcaccctgtggagagccagggcaggggttctgcattcaggggagacaggaaggcaagaacccttctgcaagggagccaagggcgcctagggctcccagaggcagcagtgggaggttgtggctaaaacatggacatggagccagagcgcccagactgggatcctggctcctcagttcactaactgtgggcctcaggcacacaactctgtgctttggagtcctgtctgtagaagagaggcaakgcaaattcatacctcccagcaacacagttagaattaaatgagcaaactctatgggaaagtgtggagtgggatgccgggtgcactaagcaatgcgtaactgatggctgctatgttctctgccctgagagtcacctttagttgttccggttacagggggagattggactgccaggccctccaggacacgatggggaaaaggtatgaacagacgtcctctggtcaaacctctgaagacagtcttggccctgggggcaggaggtcgggcaggaaggctctagaattggccctggtgtgagcccagtgggcaagggaaggggagatgggggggggcagggagaggggcccaccctgcaagccccaggaggagccaggcagacccaggctgggctgtctctgcctgccccagacaagcaccaaagagccaaggcctttggacttttctactctctctccctctctcctcttttctccattaatgtgtctaagaagcgtttttggtattttctaaagggacctcgcggtaaaccaggagacatgggccctcctggtccccaaggccccccaggaaaggatggacctccaggagtgaagggagaaaacgggcasccagggagcccaggagagaagggggaaaaaggggagacaggacaagcaggctcaccggtgagtggcagggctggctgcccttccgtgcatacaccactcccaagcatgacgccagctttgcagggctttgcactttgcatgatgtgagctgctgcctgggctagaaacctggggccagggcttaggggtggaggattcactcagcttcccctcaagtcactcastttatgaaggccagtttcccgactcaggagacctgagttgtgctctgtcatctgtatccttgggaaagccactcactgttgcagagtctccgtctcctcatctctaaamtggcgataataatgttttccctggatacctcactggattgttgggaaagagatgaagacatggtttagagctgcctctttggaaagtgtacagaagccctatacccgggagaggctgcatgtacagaaacggggccttcgcccagtccactaggctgctaacttgacttaggggccttctctgggtctcaggggtttccatctgtgaaatgggtgccatcctagacacctacccttggagcaagggagccacatcctgtgcaggccacagttggtcacactcagcaagaccaccttgagctccactaacagaaatcattgtcagtctgtagggtctagatggcccaactggggagaggagaacatggtggccagagcagacccagagtggcaggattgcctaatccagctgggctcctgaggtttacagtgaagccagagggctgggtgtcaaggttgcctgcaggcagccacagatgagggtcctcctgggggccaccagcctagtgggtgcctgacactgtgacgaggctgccctaatcccaagcctgccgacccagcctgggagcaggcagggagggtcctcttaacaagcagctacttcatttgagtgtaaacaggagttgcatcttccttggctcacggtatgatggcctctaggagcaccaacctagttcgacggtgctagaatcttggtctcagaattctcctctaggaagtggaaagagcctcagaggtcaaccagtcccaagtctgacccagtgcaggactcctcactcaaccggcacaggcaggcagctcactgcctccagacctgtccactgcaccatggggcagccccaggatggagggagcattcctggatatggtgtggaagctcccttgtcagcctccccgagttgacccctcagagcctctggcctctggagccatatttattatctattgctgcataactaatcactgcaaacgtagcggcctaagamaatacacacttattggcacatagtttctgtgggtcaggaattcaggcacatcctagttgggtcctctgcccatggtctcatgaggctgcaattaatgtctcagccaastgtattctcatctggagctagggatccccttccaagctactggtattggcagaatccagttccttgctggaacagaactcagctcctagaggccacctacagttcctgccacctgcgcccctgccctccccaccycccgcagagtagacagttcacattatagcaactggcatcttcaaggacaaggccagcagtagggtctctctagtgtctagtgctagcaagacagagctgtgtgcacgtgtgtttgtgtgytcatgtaacatatttgtaacataatcttaatatatgttatatgtcaccatctgtatgacatgtatgttataatctgcaacataatcatagaagtgaggtcccaccacctttgccatgtgccttactccacggctaagaaacaagtcacaggtcaccctaaggcctgtacgctgcagagtccacagagagtatcagcctctcctcccctgtactagagcctcagattctgtcctgcaggctgacacctccacatcctccatggtgttccttgttgacccctagaccagtcacgtcccagtctagtttgtcacagatgtgagggtgcgtctgtcccaggctttcacaagggctggcattcatgcagtggtgttttgtgcccacagggagagaaaggagaagccggggagaagggcaatccaggagcagaggtacatgagagataatttgacagagactcatcaagcgacagtctctgcagcatgcacagtatttctgtgctttagaatgaagcttgcaactgcctgatgtttacgtttactgagcaccaccataggtcaggcactgatcctctggactgctccagtcttcccaaaccacatctctcagcaaccttcacagagcacctcccatgcttccatcctggtgctagagtctggagataygaaaataaacagaacttgccgggcacggtggctcacgcctgtaatcctagcaatttgggaggctgaggcaggcggatcacctgaggtcgggagtttgagaccagcctggccaatatggtgaaaccccatctctactaaaaatacaaaattagccaggagtggtggcaggtgcctataatcccagctattcgggaggctgaggcaggagaatcacktgaacccaggaggcagaggttacagtgagccaggattgtgccactgcactccagcctgggcaacagagtgagactctgcctcaaaaaaaaaaaaaaaaaaaaaaaaaaaaaaaacagaaccatccctccacagctcacaataccccataakgggcactagcatgggagcaactcagggaatcgggcaagcatcccaaaagactttctatttgggcagagtcttgacggctttgtaggagtttgccacaaagtttcagaggtaggctttccagatagaggcattattcttttgagaagtgtggtgaaaggaagagaaaacagaatggctgagtgagaatagtcaggatggaggcaaggttttcaaaagacagcagagaatcaggcatatttgcgggctcaggggcaagaacccggaaagcaacggagatcaaggatgcgtgagagacaggatgtttggtggcggggtctgggcaacccaaatagcacctcagacccatgggagagaccaccaagccttctcagtccccatcagggtgggttcaccttgccaagccccgtctgaatgtagtgaaacaggcctgattgtacaatgtgtatggtacttgtttcgaaatggatagcctcctaaagaaatgatcctaattcaggaaaagcattatacgcacattgtccctccaagaagtatttaaaataaacattagaaacactctaaattttatcaagaaggaaaggattaaataacttatagtaataatactaatagtaataatagtcaccacgtctgagcacttccctygtgccaagcaccgcactaagccctgggtatgtaacaactcattttcactccacccagtgaatagcacagcaccgttaccaggaagctggtggmgaacatataaaaaatggaaacatcagtttcacagtaagtgaaaaagagwtgaaaacgaaattttatacatatatgaaatcataagcatatacatatatgtatatacaattctacacatattatatgtaaatatcaaaagtatatacatatattcaagcacatctgatacatcaagaaaatgtttaaattttctytttaaagaaaattttaaaaattctttttattctttttattatttttaaaattaccacccaggtaaaattgacttcttctggaatgtgtccagttctgtgaatgttaatgcatgtagagatttgtataaccaataccatgattaggatacataaaccacttacttataataagaattaaaatggtaaacttttgttaaaaatgggaagctttttttaagaaggcagagtttccaaagactgtgttccctccaaggagactgtgatggagcgacaaagtccacaggtccaggaaacaatagggacctcctgtctgcccagtgtaggggtgccctctgtcgtggcctggcacaggagtcactcccctggccatgctccagggaattctacccctgggaagacgaggcacctgaggagagccctgaagccgaggcggggtgagcagctcagaaggacccagcagtggctgcctgtggatgaaaggatgtgtgtgttcatcagagacagaagctgcaatgggcaccaccctctgtagagkaggcagccctgagctcctccatcttcactgtccagtcagaatctcctctagcacaatctgcatctgctctcaagggaaacagagaccagcagtccccatcctgtctgtaacaaaccttggggacttgaggagcaatctccaggaacagctcagtctccccacattccagataaccaatctctgcttctctaagccaagggtctcaaactcaaatgtctacaagggtcaggcctgcaaaaagtgactgcaagagcgctggatcaaagacaataaggagtggtgaggactggggtaaactgaaggtgtcatgccccacctagaggggaaagctctaattccactccaggctgttgttgccatgcatgaacaagaacctagtgctgctagatcttctggtgttttttttgtttttttttttccaagaaaaatctggaagaatagatctttagggacagttcctggaaatttgctttttcaacattgagcagtccaccgggttgctatgagtttttgacctgttctgagccttttttgggggatactgtgctgggcagtcactggctgacctccagtgggcagccatgtcctcctctggccttgcagtctccagctgggctctaggccctatcaggagggagggccacttcaaatgtaacagggctcccctttggcttttaggttcctgggctgccagggccagaggggcctcccggacctccggtaagtttggagggcttgtcagtggccagtccactaatgtcccctctccacagcagtcactgggctcaacctcagccttagtcactatcacctcttcctcccagggagggattttctggtctacaaacccctccccgctcctyttccctcccatgttaaacagcaccatactggggacaccaaggagcccaggcattgcctggtttcctggaaatagctgactggtagggcagccccagggtcccttgtctctaagctctgcccaacatttacctcaccctttgccatcaaacatctgcttctcccattcctcatttgaaagtgactcaccggtctggcacagtggctcacgcccgtgataccaatctggcactctgggaggctgaggcaggtggatcgcttgagtccggaagtttgagaccagcctgggcaacataatgaaaccctgtctcttctaaaaatacaaaaaattagctgggcgtggtggcacacatctgtaatcccagctactcaagaggctaaggtgggagaatcacctgggccccagagatcgaggctgcagtgagccaagatggcaccactgcactccaacctgggcaaccagagtgagaccctgtctcaaaaaaaaagaaaaagagagaaagagagggaggagggagggagggagggagtgagggaagggagggagggagggagggaaggagggaagggaggaaggaaggaaggaaggaaggaaagaaggaaggaaggaaggaaggaaggaaggaaggaaggaaggaaggaaggaaggaaaggaaggaaggaagggcgagccccagccccactggattggctttccttggctacagaaatgtaaccatggggcccctgtgcatcacccctagagggcccccaagcaccctgaagcaacagatgctggcccatgcctctgtgtggttcatggtccccaaggcactgtgtgtcctctgttgtggatggtagaagtagcagtaggaataatgataggagccagcgtttattgaaacttattggatgctagacactgttccaagcactttgcctgtattaatttaatgtttgctgtgttacctccgtgtctttctttcatgagactctgggtcaaccatgaggaccacagagagattttctgtgagccctggctggaaaagactggctcagactattccctaggaagccccaagcatgacccccacttagcatttctttctacctctcatgggcagggaccccaaaccatactctgyacccaaaacccttgttcttctgtgatccatttgtggactaggcagttgtgttaactagagatgcagttctaatgcaccttgctttattccaaatgcaggggctccaaggtgttcctggaccaaaggtaaggagaagtcacatgacaggcgctgtgtcagtgctagtagaaaagagggaaagtgcacctgagaccagctgaccctttttcctagaaggcattaggtgacactccagccaagggggtccagtcagggcaggaggaagtcctagattccctttagcatccatcattgacacctggtgtgctttggcttcagaagcttcccatctgtcaccccacaaagggacaggttagattcttagccaatggttaaaatccttttcccatcaaacctgccctggccccttcactcatgcygagtagaggtgggagagagacagcaacatagggtgggacccctccctgggtcaagcttggggggactctgcactgggctctcccggcctcccctgaaccatttcaaatggatgagggggctggggkctgttgatgtgacaatggccctttcctcatgccctggtattcaagagacttcggggcagtttgttctyccgactaggctgtgagcctcagggctctggaggtagcatctcaggcatctgagcaaatctctgtaaggttcccattctcctgccatgcagttgggcacctgtgccaaggcctgacctgtgggtttgtccccaggccacctagtccttttctctgtggggctctcaaagctcccacaggatacaggggctactaactgaggcgrgagtaggctaagaattcagggattcttggtatcctcagcctgccaccctgacccctccttcctctacaaatgccaccccagcctccaggaccccagaatgcaagaatgaattgtctgggacatgtccttgtgtgatctcgtcccctctccctttcctccagggggaagcaggactagatggagcaaaaggagagaaaggcttccagggagaaaaaggagaccgtggtcccctgggactacccgtaagtaccttggacccagcaagactggtgggtttgatgggccasgggtgtgggctgggactgggggacagccagcggaaagctaaggttctagagtctgagcatccagagttccatgtggtttgtctttcccacctgggcaagaccacaggctctgatkctcttcctcctctgggcccaggccccaccttggtgctggggaaaggcaatgctgaagaagacaggctcccccaccccaaggggcactgagctgggagggcagcttcaggccctgcttgagcctggttcagaagcaatcaaagcctgctgcctttacggggccaagcttggagggtttggaagtagtgggacaagaagatagtctccattacagtccattttcccagagggaccccaagagaactcttgctcccccctcttaagcactggtcattgcagaaaggcacagacaaagtcagactttgtggtcccagcaggccaaggccgttcatctcctgggttcgtggagatctctgatctcagcctgcccagagccagaagccccaggtcagaggtggggagctgctcagaaggtgttcacatgtcatgatatggggctgggctggatagggctgatggcctcttcactgcctcacctgtgtacaggtgagcgcatcccaccaccctccctggagcccgggctccatgccccctaaccctccactgaggttggcattcttccaagagctggaagggatgttagcgatccatcycatcatttcactgatggtcccagagaagaaagtgggtcactggaggtcacatacaaagttggtggccaagccagaggctgmtctgaggccatggccttgcaaagcgactccttccagccactcaggcttcctctgtcctgggctcaaggccagttcccaccccaggtarccataaagagcagagaaacaatggaaagcccagttacccccgcttggcagagcttgaaggcctggttaatacaatcacagcaaccaaacagcaaatgcaggaggtataattataccctcatgaatgcattcgaggtaggaatatttaagaagccaatctgcttgacagactacagaaaactgatgactttagcaggcattttcccatgtcttaagctgtgtctggaatgattaagtgctccttactattaaagagccttcctgccccactcaaccacaaacctcttcttatccacattcatggccccaacgaccttgatgaacactcgagaattcagtcaggggttgaaatgcaaaaggcacagcgaccaaacaggtaatattaatataaacaaggaaagtgccagatgaaagacaaagtacctactctatcattaattttctcacttttgatagaggcatgggtacagagaagtatttttttttagtttaagtaaacaacagaacaagcattcatatgagacaactgacacaaacctgagggagacactagggagtggaggggactgtggtgcactagagaccgtgtatcccttcttaaggggaaccgtcccttctcagctcagctgactgttgccttggaggaaggcggagctggtatttctggatcttcctatttttcaaaggaagttaaacatctggtgttttatgtgaaatctttccattttctaatattagatcaaaattatttgcaacactgcagaccataaaaaatatgtcagtggcccacatatggcctgaaagcctctaatttgtgctttctgctccagacctctcaagacaactgagttttaatgctgcatttttttaaagtacatggatatttagctaccattctgtttccaggtttcacctggatgttttattctatgtagtagcagcctgcttctccaggcatatcctggagtgttcccccatttgccctgcagaagcaattctcartgctggctgcacactggaatcccctgagagcttttcaaactcaccatcaccccgggcttcactcttggagattttgaattgcatcgggctgggatggggtgggacccaggcatctgttttatttaacattgcccccaagagattctaatgtgctgccagggctgagaaccacagctctctagcccagtgagtcaaggtcggtcccagaatcgtgtggtcctaaatctgagaagagtccctgcagagtccttctacccaacaccttttccatgaagcagcagctcgttgcctccttcttgggacttccttttcatttgaaattctgaggctgaggctcagttggaagcagttttcaagcactcagtccttaccaggccagagtattgccgctgccttctccctgacttgtcacattggaatcattagaaaagggtccctgggttttcctgggtgggtttcagaggcagcttcataacccagggttggaacaggagtgccacyccacccccgacccaccaaccttgtatttcactggacaagagcaagtaagggtgctgatagcaggttggtctcagtagcttcccacctgctgcccatttgctctgggaaatacatggccttagacctctgtcccaggccgctgcctccaaagcctttgcctacacaagagcccttgtctgggagcatatgaatggatcgagtttaggttgagcatctcagactgtaaagtgccagcgaaatgtcaggcatcatttgtaatatcatctaagagccaactcattcccccagggtgaaggataagcagaacaactcctacccagatttcacaactgggtgctgtcacccagggctgagaccctcaggggcaccccagcatggcctgatccaaacaggaatgcaaagaggctgggagagccgtcctcacctggggcccctccccagtgaaacctgtcctgggaagggtgcacagctctgattccaagacatctctctaagcattcctttctgtatccctttccccataacactgaagggagaggggtttctgagagggaataaagggagagaggagaaggggggcgggaggagcaggtggccatctgcgccgacctccacccagcctgctcagcagccagccactgcattcagtgtctccatgttttcgttggtttccatgtaaataccattccgtgtcctcccaagcttatttctccagttgtgtttgattaccagcatttatgtctgtccagagtcactgctttactcacctcttccctccccattgttccctttttctccctcccaatcctctcttccccttcttttggtcaaactgtgcccttcgtccagggagcttcaggtttggacggcaggcctgggccaccggtgagtgtcacttctccatcacccctcaccccactccactccacacctggcctgtgatcccttttgtctgtcccactgtggcctcattttcccagtgaatcatgcctggtcccacctccgacaccagaaaggtgccactgatgctctgaagtgccttttctggcctcttgaccaaatatggctggccttcatctgaatgcccctgtccacagaatacacccagggacctcaaacctgccaggtgtggggtgggaggccactccagcagcaccgctcctgattccacaggaatgctgagtccagcctgggtgcccagccctggaggtttgagccatggcctctccccaccaaacacaccagtgtctgtgtgtgcccgtcatgctgtgttgtcttcatgctgtgagctctgtccatctcctgtcttcccacgagggcctcctagtcttgtgcagccaccagtctggtatatgtggggtaggacagctttgaaggctgaggacaggagtagcctgcagaagcatagaagccagtcccagctctgtgtcttatgcacgttctaaccacccttgcactgcctatgacagcacagtcgccctgcaacccaacatggcagttcactacagagcaagtgaggcacacttgggtcctctcttcctccattctttctgattccagaaaacaggcatcatttactattgactagaaagcacctggcccttctgcttatgactracaactgaaggatcagaggaaaattccctcctgtccacctccrgtccctcccstgagcgccctctgaggtcarccttcccagggtattgagctcactcgccctcaagtctcgagtccctgctcggacaccatcacgagagctctgtgcacccagccccttccagccagggaggccctgctctgtcctgcagagggctttcaaggccacatctgcccatggcctgcatggagttctagttagctggctggagccaccctcaggggaggcgagaccttgccagggttcatgtgtgcagcgtaggggacacactgaagcacaggctcacaggtcttcccaggtggccgggggcacttgcaaccggcaccaagagaagcccagagcttttagaggtaggagggtcaagatagacctctgtgagrgccccatcctactgaatgcctattctgtgccctcataaataggagrtgacatggcttgcccaagatgacagacttcttcagagccccccacctccctgcactgatggagttcacactgtaaacccttacatgcagagagcatgccctggcttccaggagttattatggctttgctccttcgccacagtccctccctctccatycttccccacctagcaaacctgtctcaggtgcgggcagggctcggggatgatctgtggttgcaatcagagaaaccaagactttcctctcaatggcttctcccttttatgttagaccgagggaagcagtacaaattcatacactctgtcccttaggaactgagtctttattttcctcataaaatcagtatcctaactttaagggaaaatgtggggaaaaaaaataagccttccctgccaatattaacatttattgagcacttcctacgcgtcaggctcagcaccaaatgcttgctacgcwttcatgcatggaaacctggcacggtcaaggaggcagacacacgtggtacagacggggaaaccgacactcggcaaggctaaggagcttctccaatacccaggagtttgtaggcctccgaggcaaggccagccacatgactccgtggcgctgtgcccaaccactggcccgagctgactccttattgtttttgagacagagtctcgctctgtcacccaggctggagtgcagtggcgcaatctyggctcactgcaacctccacctccgggtttcaagcgattctcctgcctcagcctcccgagtagctgggattacaggcacccaccaccatgccggactaaatgttgtatttttagtagagttggggtttcgccatgttggccagaccggtcttgaactcctgacctcaggtgatccacccgcctcggcctcccaaagtgctgggattacagccgtgagccactgcgcccagcctcctttttctttctgctgtgctattatggatgcctgcagccttccttccctccttgtggttgcaaaggggggccctgaggacatcttactcccctctttgtctcacgtgaagtaagtcatgccccgccattcacagatacattcagagcacaggaaactgtccacagcccaagtcaactcctcctgtcctcatctgaggccaacaacaggagacgctgaactagagacttggtctggccaggctgtgaactgggaacgtgggaagatgttggaggaggccagagcaagccctgatgctccatgtctaagccgtgagctccaatggctccagcgcccccagccccgggctagcagagctcatracacgcctccctgccaggccggtgtcggtgcagacattgaggcaccctaattcaccccccgatccagccagttccgcaggcctgtgagtggggcgagaaggccccggccagagactgaggccagggctgtgggtctgcggtgggcyggtggggtgggtgttggctgaacaaccctctctcgtctgcccctgtgtgtgcatccgcatccatctctgtggcatgaagaccctcccgctgcatgtggagctgcaaagcaaagagggtgccagcccccggcccctgccccgggatgggtccactccctcccaagtgcttctgggagcaaaactaagcaaccattctcccattgttttcagccttggcaagcttggttgtgaagcaaaagggtttcagtccacaaatctggctctgaggcatggggaggtgctctctccccaacagcccctgaacccaaagaggatcacggcccagtcgaatgactgccctgaacgagcctggcctcgccaactctgaaaactgggccttggaccttgctcatctctaggcatcaggtggggcacccagggctccccagagtgtggggaccctcacctctgctttctttccccttcccagggtactccaggaccaattggagttccaggcccagcgggaccaaagggcgagagggtgagtgtcactgagccaggggcctgggcggccaggagggagaggcatgcctgggacccarcaccaggggtctcagccctcatgccttccttcttccatctcttctcctggtcatcctcacagcagcctgggacagggggtgctggttgtgtagctatgagttgacaagacttggagggatcaaggagatggagaggccgggcacgttggctcatacctgtaatcccaacactctgggaggccaggttgggaggatcacttgagctcaggagtctgagaccagcctggacaacatagcgcaacccagactctacaaaaaatttttttaaaattagccaggcatgatggtgcacacctctagtcctagctacttgggaggctgaggcaggaggatcagttgagcccaggaagtggaggctgcagtgaaccattattatattactgcactccagcctaggagacagagcaagaccttatctctataaaaaaaaaaatgaaaaagaaaaagaaagaaagaaagaaaaagaaaaagaaaaaagaggaaaagaaaaaaaaaggaattggagaacttcctccactttggcttctggccaccttgtgtccatctcaggttcagtttggcaaggccctgrgcgccattgtcactggacatgcctaaactttgtaatgatttagggaaactgcatggaacagagggccaggtggtgtttagataattcctsgaggacagcaggaagtcaggaggccagagccataggccaggctcccacggtcgctgtcgatggacgttggccatgtcacaggacttgcagttccyggcctgtcctgctggaatgggcatgtccgagggtgagggtrgagggtgtcagctgagtggaggcaggggagctgtgtctttctatatcagctcttcccagccagcccctgggttctacacactcagggctcggaggtccctgtgtgggcatccgtcgagttctctgcctgtgtgggcagctccctgcactccccatccgcccaccttgctggctctgtctcaggtggggagggcaggagcttctgcagagggcacaagcttctccgtgaccaccagcttggggaaaccaggaggctgctctgagaggtgacccttgaggctctggagaagaaagcaaagctctctttctcttccctttctctttccctgccttcctgccctgctttcttcgcccctgtttcagcctcaggccagccaggcccaggacaccacgggtcattctgggaggccttgggggataggctctgctggagggagagtgaggggggcttctgagccccctccccaaggcagtgttcgcatcagcagcaccccacctttcccatagcccttgcttcccggagggctcttgaggggactggagaggtttcctgtatttcataccaaagtagaaaatggcaaggaagattgttaccgtgtctggcaggattcatgcatttctttctcccatttcagggcagcaaaggagaccctgggatgacaggaccaacgggagcagctgggcttcctgtgagtctcttgggatcagaggttcctctcctcccacccctgcccccattagaaatacccacggccggccgggcatggtggctcacacctgtaatcccagcactttgggaggccgaggcgggcgcatcacgaggtcaggagatcaagactatcctggccaacacggtgaaaccccgtctttactaaaaatacaaaacttagccacgtgtggtggtgcgcacctgtatcccagctactcgggaggctgaggcaggagaatctcttgaacccaggaggtggaggttgcagtgagccgagatcgcaccactgcactccagcctgggtgacagagcgagactccatctcaaaaaaacgaacacacaaaccaaaaaaaaaaaaaaaaatcacctagggcctggagcacaaatccagggccaagggagaactctcatttccatgacagacaaagctgccaagaggcaactggtgataggctagcatgccctgctgggcattgcgctgtgagaggaccagggcctctgccatggggaccctgtaatgggatgtagcccctcccactgtgttaagtgcagcctgccctcagcaatgtgtgcgccatggcccctgccctcagaaggggcagaatcaaatccagamccctgtgataggagaggcttcatgagcggagcagctgggccttgcaggggacacctggctttccatcacggcatgctttcccaccactgtgttacagaagttgagtgtctgcctgagagagcccgcactttagtttcccatccactggaggctgtgtgtgttggccaggtacgcacatctgggccaggcttgtctcatgctaaattcccctagctgtagaatgaagagcattttgcaccttgaaaagagggtctagcaagagcctggcaggagagccttgggaactcccctctgcctagagcattcctggcccccacaagcgcatcctcagaactgacccctcacctgcggtagtgacctcgggaaaacccagccrcaggccaggacctgggctggagaggtgagaaaaccagaactgtgtttttttgttttttgttttttkttttgagacggagtctcactctgtcgccaggctggagtgcagtggcatgatctcggctcactgcaacctcagcctcccaggttcaagcgattctcctgcctcagcctccagcgtagctcagactacaggtgcccaccaccacggccagctgatatttttgtatttttcatagagacgggctttcacctcgttggccaggatggtttcgatctctggacctcgtgatccgcccacctcggcctcccaaagtgctgggattacaggcgtgagccaccgtgcccagcctgaagtgtgttcttggctttgcccagaactcatcatttgcctctaggtcaggttttcttagcgatttgcttctctgtcccctttccgtgtagtgggaataactaaacctgtctccagtgagtgaggcattgggagagtttgatgagcctggaagaaagcactgtacagctggcctgtgtgtcctcattaacatgcctttcttcctctgatctcttgcagggtttacatggaccacccggggacaagggaaaccgggtgagtctgagcccctgcactcgtgctctagttactaatgtcttcatgatggggtggaatgatcgatcggtgattcctgaccaacatggcgaacagtttttcctgataagtcatcctaaattgaaaggctttacaaggagggccttaacctgtggcatgtagggagcctggggcctgatcctcacatggaagcctgtatttttccacacagcaaggagagactgaatcccatggcagccaccagcttagcattgctatccagcaacaagatccatgtgtccagctctttctaggttgccctgattgtgggcccctacgtgatcattttagatccattgctaccttgtccttgccctctgaaacttggttttgccaggcattccaggccactggtgagagagaaaataaattccagctccaagaacaagcagacagttgttggaagcagccaacccttttaaaaaatattacagccactatttctcttggaaagagtcggcagggctctgaaaggactgcgccttctcagacccttgctgtccctttggtttctgccatcttcaccaggacacacttaccaaatgcccayggcacccacagccacataacagggggtggcaccgaccacagccttcagcatttgggcccagcagggagaatttaactacatctgaccaagagatggcctttgggttcccctctggagggtctcatctgctgctgcatcatggggcttcctggagtggggggcacaccccctagaaaccaagtgtgtctcctagcgggtcctaaaatccaaggcgcttagaggagaaggaacagatggagaaacaaggcccagacaatgattatgtgttctgggatcccatggagagttagaggaagagcacacggtctccagaacccaggtcttgtggctgatctttgcacactgataccatgttcatgcacagaaagtgccagaatgcctatgctcctatctggcaacrgtgaattccatctcttcaactcaagatctatttactgagcactcccattttcctaagtgctcttcactggcagctggtcaaaagcaactcagtttgtcccgcatcttctataaacaagagggagcagcagcgccacccctgcccatggcaagaccaggtctggaaactgccggaataaacagacctgcttccagatgctctaagcacgctgggaaggactttcctcagtgtggcatcaaaggatttaggcctctaaaatctttgatcattccacctcttcattggcatactaacttcctttcaaatgtctttctgacrtgttctagttttctttattatattcaattagtattttctaaacctccttcttcagactttttcagttggctggagacactgagccgtttgaaggctgcaaaatcggtccttcaagggacggtgaccatgttgctctagaggtggaggcaggacaagtacccttgtcacagacagagggagggtgggggctggcggctctgatgctgcagcaactgaggttattgagtcatccacggaggccccaggaatcagtgggaaagtatttctattccccttccccttcccgatgtttgacacactttcctccatcccctttacaaattaggaatgtgtcacttagtaaaagtcaagttcagaaaacaatgaggtggcacgcacctttcttttgagcacaccataaagagccaattgacttattcccaaagagcaggtttccaactcaagggcagcttgtcctcttcatgccggggatttgactctcaggatgcccaaatgtcctggaagagtctcccctcaatcttgcctcccattctgacctttctttgtttcttcgagacagagtcttgctctgtcgccaggctggagtgcaatggcgcgatctcagctcattgcaaactccgcctcccgggttcaagtgatttccctgcctcagcctcctgagtagytggractacaggcatgcgccaccacgcccggctaattttttgtattttagtagagacagggtttcaccatattrgccaggctggtttcaaactcctgacctcaagtgatcctcctgcctcggctcccaaagtgctggaattacagacatgagccaccgcacctggcccagagatttgttttatcttacagtgaaccaagatacaaccttacaggtatgcttctccatgtcccatcaaaggatggtctcagagcctctttcctgttcatggaaggaaagtccttgtcatggtgggcaaaggcccrgagccccagaccaggagctttctaagggacacacacgccagtggaaagaatatcctgaccttgtcactaagggtgcttccctttcccctaagtagctctgtgaatttggcccgggagccacctttagggtaagaaatcagtcaaaagataaagggtggcatgaatctggcaatataatcattcaggaaaattggatgttactgtggagctgcctgcaaaccagccagctgaaaaggtctrtgtgcatgcagtgaggctgcttctgctctctgagatgcccaactttgggggggtggggggtgcacgcatgtttgtgtgtgtgtgtgtgtgcgtgtgtttgtgtgtgcgtgtgtgtgtgtgtgtgcatgtgtttgtgtgtgcgtgtgtgtgtacgtctcacttcctaagtccgtcttgtctcctcacttcttcctcctccactatctcttttggcctcttcctttactgcttctccccccagatatgttcattccrttataatagtcccacgtccttcatcctttcccctccccctcaccagctgtcagtttatctcctccaaagtccactgttagacatttacttatgtttttaagaagcctttgccccttgactttatttgcccctttctcccttaccagctagggttccctctgtgcaatggatctcttttgtgtcactgtctgggggtgggaggcagggagaacgcaggcaacgttactactctaatagcctcaaaggacaccggatttggggcaattgcacagrttcttagaacacaactccccatagtgtccgttacctgttgtgaaagtctggaacacgccaaccctctgttacccccggggtatcctggactgggatcccccactctggcagatttgcccagcttcttcattaggaaactgctcatgacccagagaatgaggggccacactcctgagagagtttaccagggggcttccccacccaaatagctagtggttttgctggtctaccatttggggatgatttgtgccatgatgttcttgttggcagacaaaacttcaggccgatgggaatatacctaatatgtgcatacatatttaaacgcatgtcrttttctaagtaaggatttgcatttttagaaaattcatttagaataatgcactggcagttgcagaccacctctgaaatagagaaatttgagtaatttccgaagatctggaagaacatcaaaaatattattttgtttgtttgtttgtttgtttgtgagagtctcactctgtcacccaggctggagtgcagtggcacaatctcagctcactgcaacctctgcctcctgggttcaagcgattctcctgcctcagcctcccgagyagctaggattacaggctagtgccaccacaccaggctaatttttgtatttttagtagagatggggttttgccatgttggccaggctggtctcgaactcctgacctccagtgatccgcccgcctccgcctcccaaagtgctgggattacagacatgagccactgtgcccagccaaaaatattcttatcctctgccttcctctaatgaacatctaccctgcagccttccactgcaggaacagtgcacatgacaacctctgaccccaacctttggctcctatactggctaaaaagaaataatgaccattattatcattatgaagcagctatcgtttactgtgcacatactatattccattattaagcatttaatgtgcacaaagaactcacaacatttttttttcagacagggtcttgctttgttgcccaggctgaagtgtagtggtgcaatcwtggttgactgctgcctcaaactcttgtccttggctcaagtgatctttctgcctcaaactcctgagtagctaggactacagggacatgccaccacacccgactaatttttttattctttgcaaaaatgaggtcttgctttattgtccaggctggcctcgaactcctggcctcaagtgaccctcctgccttggcctcccaaaatgctgggattacagacatgagccaccatgcccagcctcacaacaaatttttgaggcaggtattattgtactcattttacaggtaaagaaactaaggctcaaagaagtaacttcacaaagtcacgcagctaactgtcagaaccaactctgactgcaagcctttgttctaatacgctgcccagcattcagtgtcaccctggagtgacacagttgaagtccccaagcgttagataatcccccttccatagaggaggggagctcccaggaagactccctaggggcatactgagccccctttttaggaaacacatataaaaatgcaaatgcaaattcattacagaagtgatgcttcacttttaaaaagaattccccacagcccttctttaaatagactctgacacatacaatataggattcaatttagaaaaatgatgtttactgtagcttttcagaaacaaatgaattccttaaaccaacatattcatatacaaataacggtctgacttcagaccaggatgaaccagagacacagatagaacaggagaagccagctgagcacaaggggccatccgtgagctctggacacacacatacatatgtgcacatggacacacatgcataataaaggcacacacatgtgttcacrtgcccaagcacatacccacacacactcaaacgtgggcacacacacacatatacacaagcacatacctgtatactcatacatacatatacacacatgtgcacaagcacatatatgcatacactcatacatgctatgttcacacacatcccagggctccaagcaaaatcaccttgcctcctaatagaatgtcaaaaggataaacattaattggggaaaaaaaaagttttcaccccaaagcctttcaaaaacagactcaaagagaaggaagttggtccctagccactgtgttcagcacagacccacgctgggcttagtattagcaaaaccggccaccaaaatcttcagtctgtggttccctgcacctgcagctctgagccctctgcctgtcctcccctccccctcccacccaccttagccaaattctcaggttcctggggggtggggaggaggtgggtattgactccaaatcctaytggggagaatatcctaatttaaagcatctctttttccctttttaattttatttttctttttctgtcttcaaccttaacacatgaatgatcttaaagttttgatgtttttttctcggactaaaccattatttacagggggagagggggaagaaaggctctagagggcctaaaggggataagggagaccaaggagcgcctggattagatgccccctgcccattggtatgtttttgtttatcacttgcattgttctggtttttgttcttgaggtttgtaagttggaaacaaagaaggcaaataaactaagatgagaaccaaatgtctacacggatgctaccaaaatctctctgttcatttgactggtgaaattctgcccgctgttggatttgctttrtaaccacagctgcaagtaattctggctaaatcccttgcctttgaatccttttcctttgaagatacagagcaatcgatgtgtggaagtgaggaaaccactaggaaagggattttcagggaaggcctcagctcttagctccaggatggctttggaagccagtgtagcatttgtgagccacggatttgccttcttcgtttcatggccacctctgtgggccagtagttcaagctgtctgaatcctcacttgatcaggatgcaggacaccagagttagcrtctcctcagggccactgatgctcaaaactgggcagaacaaggccagatgaggggcttctaatgcacagcctcccaacactcaccagccatccagctgaaacctttaaagctgcagaccagaactggtagtcagacagacaccccatgggaagccttctcaaaagagccagcaattaatgatgaggcacttctgctgggtttctcaagtgcctttgaatccatttgaaggttctaaaaattatgatgcactaaagttgaagtttgtctgtgtttacactaagtgagtctgtagagagaggaggatcaacggagagggggcaggttgtatgtgtgcaaagctgaactctccagagcacaaagagagcacaaaagctggatttgggagatgggggatcacctgggatttagcccctgtttgtagatgcctcaagggtcctgcatcctggccagggtaggactgggcctctctattccatggttggagctggccagccttgacctgaataatcatcgtggttggttttgtgaacagggacaccgaggttttaaaggagagaaaggggagccggggttaccagggctggacggactggatgccccatgcccattggtatggcattgcccttgcttgcctgcatggccgatttgggcttccccatgtgtgtgattcatactgggtttctccccagccaccctccacactcctcctccatcccccccaggctccacttcccacttcttcattctgtaaaygccaagggtcaccccgcctaggctagtactctgggggctcccagtcatgccaccctcttgcatgcaaagtttactgggatgtttcctggcttcctgctgcagctacctctaaagcacagccacttgatgccagccagctctcccaccctgaagttggttttggctgcctctgatactcatctccaagctgattctagacaaagctgccaccagataccagctaggaaagtggattctctggactggttttcagaaccatgactcacttcttttccttcaggcagtgaagttagttcagaatcactggctgagcacctagcgaaacatgtgaatgagatgcctgatcagccctgtatcccctgctcctccatcacatgatttgggggacagaagggcatgattacagagtagactgagaagctctagaagtgagctggaggaggggccacctgcctattcttccaggttggatcgtgggtcgctgcccaggtgacaccatcagaactaggggatggtccaggattaggttttcggatcctaaagggtttgtccttcttgcttaaatctccaaagacattaccagacccttcctcgtccctttctttcatgatcrgatggcttcttactgaagagtctgggagagacggaaaggtcaagaatgtagttaaggaggaggcagggagacagctaaggacctctcttccaagcacgtcccaggcgaagtggtagcagtttattcccgcctgcccagtccctctctaggcatggacagtctaggcctccaygctgatcctcttactgcaaaagaagctgaagggaacacttcactccaaggctcaaggggttacagctctccccaaatttccccaataggtttggagttcaagagctattttatcataccagtaataagagaatttggggtctcacatccccgccctggggtcacacaggaattctctttgaacaaaagagaaaaagatacaagaaattatgctgtgtgaccctgaaaggtggtcgtagagccccttgaagggcagtagggactttttaggaggagcataggcaacaaarggagagtgcagagcaagcaggcgggtagcatgcttcctgtccctgctggtcctgccaaaccctgcgcttgcagackgcacagccacctttctcaaccaggacttccaccatccacgcaccaatgggaatgccgctctggcccgcaggggctcccttgagcactggccaggtcttccctcagccacaatcccctcccacaatctgggcacctttagttctgccagcagctgccttggcctctctgttcctcaccatacattacttttcattctctgcctgccctgccctccatatccccctgccaccatccacrcaccaatgggaatgccgctctggcccacagaggctcctctccctcccrgcatccatgtgacgtgtgtcataccgcaccgtggcaggctggggaaggggcacagggtcaccctgaaactgtggaatgcacctcctccccctgcaatcccctccccaacccagaggggaaaatgaaggtcaccctgatttgactctccatgtaaaatggcattttcttccataacatcccatatcaatgtgtcaattttctattaattttactggggaagtgtcttccccttgtttctcactctgcctcctcctctgtgttattatgggcttgaggggcaggggtagctattgctcatgacttttactacaagataaccagacttcctaagccctccatattgggaccaatttctgctgaatgccaggtgatgagaggtttcagcccctggcgtgggtggatgacgtcagaccagggcagcagaggactctcattccacaagctccctcaggactgagcacttgctccgggtctcctgaagccccatgtccatctccttgtctgccctgccagtctagcagacttgggctgagaaccagacctttgcccttggcccagcctcgccttccccactgggtctctagatttctagattccccatagggtatgccagcaaggagaggatatgagggcccaagmaaactcaggaaagtttctatcaccaagggcagaacacgaacatcttgaggctaaaggagctgcatggttgctaccaacaraggagaccgayggtgtgcagttgattcccatgtttttactgcacttcacccccaaattcccagcaaggtctaasgcttcgccaggaacccttgtcttcttgccaaaggcatgtcagggccatcctgcaatactcatgaggttgcctgtcccttcatgcccctcaccccaccccaggattaatcatcaaagaaggactgtctacatgtcctcctccctgtgcttaggaagagagacaaataagagaatgagaaggctgggaaggcccttagcggtcacatcaagcaactgtccttgccaaggttttatggaggaggaaactgaggccgccttgtgctgagtggcttacccgtgagcagccggcactccatagggccacagcagagactgtttcttcgtggcacggaaggacatctctgcttgctggtcccaygggctaggacagcccctaytgacsttgcactatagctgcatgtgacctttaaccaatggtaaaatagccggatttgtttccacctccttctgaggttctgacctgtagtagagaaaagaaatagacaagygtgggtgggccacatcctgatcagctgccaaaatgcgtgtggcccttgttacccctgtcctgcccacttggtggaccattgcaggaagtctgagccctctgccttcctttctccttgcagggcgaagatggcttaccagtccaaggctgctggaacaaggtaaggcttcccattggtgtgcactggggctccgttctcagcagtgccataaagcttccacaatttccattctgccttgctacagatgaggcagcaagacataggtcaaatagtcactgtctcaaaggcagggtgcccattaaacatcccatacactgcatgctgttaacaaacattttaaaatgcttcttagaacatcagtaaaccctaggcggaatgtccatgcagccacacaggtgacatctttatgctttgtgtgttcaatgtacatagtgtctttcccccaaggaacttccccaaggagttccagatcacactcatagagttcctctaaggtcgtttatgccacgtgatgacatgtcttagacgtaggacatctcagttgctttcactctgaactcacatgctactgtgcctcccctaggggctgtgctcctcaccactctaccactccccttgcatttaagctggcagagcttcatgccaccacacatgtgacctgcagccaaatctctcctgggctcccagagttcctaccaacaatgagttttcattgattcacactggccttggcatttgccattgttagagcagtctgacatcataggactgtgcccttgcrtgtgatcgccccattcaaccatggctccccagagcacagggctgcccaggcagacagaggccatctgcttgctaactaatccagaagacccgccttggtccccagcaatggtggcagccactatgctgccccataccgtctccctccaccttgcctgtcactccaagtcttctcaccaaccccccaccaccattgtctcaaggttcatcctcataaagggaccggagactccaacatgttcaagaatctgtgctcaacgaatccagtcctgttccagtggcagcagagtcacacttacaatgagatgaacaagctcccctgtactaagatgccagaatctcactagtgcactgggttgggtaaaagtggtgaaaccaccaagaccccaggccaacgctgaccacctacctgcctggatacctaaagcaccccctaacccaagaaggaaaagctcaacactcaagagagatgcctccccagaatccatccctggaggctggcctcgtcctcctgccaagctccacttagacctagttaaagcgccacaaaagcaggtcagaggtgtcataagacctctgaacccttgacccctaaaaaaatttcctctttaaagttgctgccaatggttaggagacagaaatggttgtgcttagcaggggaagaacagccactaccaagagctgcaatgtcttggagaagcaaccagagagcttcaagactactcattcacaccttaagtccaatctgggacaatgcagtggttacaacaatcaggcctccaaaggcagcagagaaagagagtgccctctagtgaccacaaaggggattcacagagaggtgaacttggtttcctcccttcagggagctaaggtcgccaccagtttctttcacctaggggctcagggttcccacagttctcctgtccagaactcccatccaacccaggacaagatttacctcccttcctacaaaggaaataaacctctgcagacccactgaaactaacagaacattgttttgtttttgttttgcagtgatgcctctaaccttggattggcctgtgtgtgtgtttgtacatagaatatttatttttatacagttttcactttttgaaaatgccagaagtatgatgcatcttacagattattaaaaaagaaagaaaaacctgcatattttgtacagaaaatatcaacctcttcccttttgtttacaagatgttttgtataagcctatgtctctaatacattttttgtttggtcgtaatgtmtgcatgatatttgtgcacatttattaagtatcgaagsttaataaattattgtgtcctggtgccaaagggggccagccagaactgaggtgctggctagctcatgtgtgaattcacataaatgtagaggtccatgatatttgctaagctaggtgtgtctaagagtattttaaacccttatggattttcattattaaaggaaatgaaacatggcaattcatgatcctgattaatcattatattaaatacattctctcctgtgaaagcaggaattcccagaagtaggggtcctcagaagtgtggagtaaggttttgaaatgtgaggttcaacaaagggagggaagggaactttatcgagcaatgtatgttgttacagatcccaagtttatcacagtgcttgctgtgtgagcatttaggttcagttgtgctaagggcacccagggtttcaaaggagccatttgctcttgctgttgggttatggtaggtttttgcttgtttgttttgctttgttttgttttgagctacagtccctagtaccagctattgctaatcacagctgttgacttgatatgagtttgtgggttcactcacaactagcagttgaaggagctttgcctcatctgctgttccactccagcaaagagcattcagaaacatgcctagatctgggcttgggctgggccaatctgaagttgtttttatttttttaagaaataatgttgtattgctttccatatttagtgcattgcttagaaaaggtctcaggaaaccggttttaatgaccagttaagtcttacctgtggtgtagcatacaggtttatcgttagctgtttgacaacataaattcatgcttctaaaagcttgaaaacaacaaattactccagtactttacatacatccccatctggtttacattttgcattttctttacacatcctttcttcctagacaacgcaaagggaaatttaacttcagactctgtccacatgctgtcacacaaaactctaaattagtgggcttcacagtcattagacccctgccatgtgtggggatgaggtcacactcacaagcgctcatggtaatgaaatcacacgcagctcagacccaaaacgtctataccaacattcttactctaaatgtcactagcttagcttagaacttggacaacttcctcttctaagtcttgggttcctcatttgaaaagtgaagcaagtctgggcaacataatgagacgctcatctctacaaaaacatttttcaaaatttagctgagtgtggtgacactcgcctgtagtcccagctactccggaggctgaggtgggaagattgcttgagcccaggagtttcaggctgcagtgagctatgatcgcaccgctgcactccagcctgggcaacagagtgagaccctgccttaaaagaaaaaaaaggaaaaaaaaaaaaaaaaggaaggaaagaaaaaagaaaagtgaagccatgcagtagtgaacaagagttgatctctgtggacacaaagagggttcatctgaacccagggatgtttcttgccctgggccggattctcatggccctgtagcccagggacaacttctccagcagccacggagtacttttagaggccacaaaaatatcttaatttttcacctttttaaatttagaaaaaaaaaatgaatatataacaatgaatccagccaggattgtttttgtctttctaccagcacaattgtaaaatataattttttgtatttttttaatggaggaaggcaaaactgcccagggcccccaaaagtcataacgcagcccagcccacatcctctgccccttagaattcacagtcaccctagctgcgggtgtccccacctccaggccacactcctcccctcccaggcgagggcccaggcaatcagggtgtgaccccgttctgaccccctccccttcaggctctggccagggcaatcacagctcactgatgatctcaggatagagtagaacattcactggaacccagaaaggggagagtcagtgttagctgaatatcctgggtaaatgggcaaagaaacctcttttgttccagtcctggggttattcatttacttatgacactttacctactgccacaaaggattcaaagtcacaagaatctatgtaataaaatagaaatgtgtgtaaagagaagtttaaaagtcagagtcaaggaaaacaagtagagaggagacagctgtggctgggaagcccaggggatggggaaggtccttgccgtaactgaggcagggtcacacacatcacttcaggccacctagtggtcacagaaaaaaaaaaggctgggcctggtttcggagcccacactgccctgcccagtgggttgcagccccccgaggtttagccccgtgtgtgtaaacacattgtctccccacacggttgttgctgccatagtactcagccaggaccccaccctatcactggactgcaccccgggctcctgacttcaggcccctgcccccaagcctctccacttgaatcttggctgtgtgtcaaatgcagtacagggagatgagaagtaaaaagacacgtggtcaaagagtttgcacagtagctgtgagtccatactaacgcccagcagaccaggacaaccaggcgagaagaaacaatccagtgatggaacaggagaagcaggcacattgcaggagggaccagggaaaggccagccctatggacaggggccacagagggcttgcagaggagaaagacatgctgtctgttttgggggacttgcggcacctcctggtgagaactgcctgcccagggagccagaggtgcacccagccctgcccactgagcatgttggtgaaagttctttgtaaattgtaaggcactgggtcttaaggccgtttgtctcctgcagttcctctctcattccagtgcctgtggctgcgtgctctggcacagcaggacacatgcctagcgttgtccacctggatacctgcaaagaatgagccagtaccccatgggtgacagtgtgaccgggtcatctgggcccgaatggtgcctctccccaaggctggggagttgtggttgtggtcatgtgagccaagggaagccacattgcttcccttgctgagggaagaggaggctccttccacacatgcccaccccgccccatctccgccccacccagtgctggcctcccttccccggccctgccttcgcctggcagaatggcataggatggagctggggagggttgtcgttaacccataagtggaggagggcactggccagcaagtcgagagactcagcttctagttctttctctaccattacctcactgtgtggcttgggcaccttactccaggtcttagtttccccaagcgtcaagtgaagaagctggacatgggtgacctccataaaactttccagctccgacaccctgaggccctctggccccacaggcaggtcacctcctgggaggattgtggaggcgggagtactccatgtccccccctccacctagagttatttggctgtgacagtattatgcatggcattggttttgcaaaactgtgtgtggcatgtgtgtgctttgtaaccccaaataacaaaacttggagtaggcctgtgccacccaggagtagggtgagcggggtcagcttgccttagggcaagaacagctgtaggggttgtttctcacattggtgtcgacacagaggatgtatcagagagaaagcaataaagcactggccacctgacacacgygggaatccccaagccccaacacacattcagggacaccgcactggcatggggaggcccacctccctccctcctctcaggcccactgtgtctctcccattcaccaccccacacactcccccagcgtgtctctccccttgccctggacttggacacattttcagccagcatgagacatcaagcacccaagactccacatcattgcaaaagaaaagagtaggctccctgtgagtgttcagaaaaaaggacaccacatcaagatgtggagcagagaaggaaagcaagggcaggagcagccgttcacctctcaaaggagcagaactcccaaggggtcgctgaagcaggatgcccctcactgtggtgaaggaaacaggaggatggtgcagggaagggagccatgtcttagccactcaggcagaactgggtgcaatccacatgcaaagtgacctctggctgctagaaaagttcatctctgagaaacagccaagcacctgtggaaggcgactcagagggaggtagagggccacggcccctgtacccccagggccctccccagcaggcccacctcctttccaggcctgccactcaccctgcgcacacactttgctgcccctccacacgcttgccctagccgggcccttacctggagatgccattgcttcttatctgcctcctttcaaggcccagctcagatcccatggccctggagagacggttctgggctcctcagttggtggagtctctcctccctgcaactgcctggaactcagtgttcttttcttcctccactttatgtgagagtgtgcaaaggggctcttccatttttgatagtgaactcttaaagggcagggactttcttactcccaggctcaggagggacctagctcagtgtctcccctacaatccagccatcgacgggggatcatacatatctaccacctgctgagttatcagccagctttgttaagcacctgctgtgtgcagacactgtgcttcctgccaggctgggaaggaaagggaagaggcccctaggactgtaagacccagctcctccaggagcttcaccagagcacacccaagagcacacccatccaccctccaggagcttcaccagaaccaccaggagcacacccatcagggacaagtgtgctaagtgctaagtgagaggtacagccagccagggcaggggtgctgaggacagaagctcctgcggtggccagtgtggacagaatgagcagatgactgagtcagctgagaggggtgttacaaagcagagatggaggagctggccctgcatgtaggcagtccccaccctgggctcaagctcctttcctcggtagaatcttccagtgagctcaagcctgggccatgctcgcttctcaggtaggggaggacaagtgggatggcgatggaaggaagagggtagagagggcacctcccaactcggaggggctgggagtctggcagccagtggctgggggtgggggatgtcctggccagggaggcacccctggatgtgcctatcaccagagaggttccttctcaaatgccccttctctatacctcctcaagggccagagtccttggttagtcgccaagaagtgaagccagcaagcccagagccctggggaaagcgccttgccttggaggaggaaagaggtggagaagctgcccctggacagagggtcgccrgccgaatccttccagggggtacctggtttgaggggatgatcaaagtgtattgtgacctcaggagtgcaaggatgggcctctgtcctctccaagggctagagctcagccaggaaagccaaggcccccacatccgcacacctccagctctcgtggcctgctgaggtgtctgctgcagccccagccaggaccctctgctgttgctgcaattttgagggctctcggactcctcttgctcatgaagaattgtggttctgtgagcaacctctctgcagaaggggctgtcagtaccatcctgatctgactgggaaagcctcctcccgaggcaggccaggcagctgtcacctctcccacctcttctcaacagagttccttcaatttcctttggtgctgccaccatcaaccctgttacttcctgggctctttccagtgtcataagcagacgaatgtaccaagctggaaaagcaaggagcgtttgtcttagaaaggacggaaccgcaacataatggaggagagaagcccaggagtaatactgggtggccatgccgggtgcctgggctggtcctcagaaccaggagcctcacacatctagtccggtgcccagaggtgccccagccagtactaaactgacacagacggaggcagcagtctatgtagtttcaggagggtctgaagtaagccctcttagcaaaattgttgaagggacagtggctggaaattaaccaccttacatctccctttgtcatgacactcaaaccaccttgctgcttgcttcttcagtgaat

SEQ ID NO: 6775 - DNA, 128318 bp, Homo sapiens
actttaagatatcattttgttgaatatagaaggattcataaaattctaaagaaactgtagaataagatgtgtcctatcacttcttcaatgaaagccttacttctattttgattatcttgaaataccacaaatctctctagattttgccccaattactgattgcccttttgagtaaaactactccaaaagttgtccaccttctgaattgccatgttctgtcttttgatctctcgaatccattccaatctgttttacccctaccattgcactgaaacagttcttgccttactttgcacttaactcagtcaatttctacccccttgaaacattttctttccttgactttaaatatccaatttctcttggttcttctcctgcctgactgccccctcattctcagtctttgttggtttcttttcctctccaagatctcaggatgttggtgcatcccacggttaaatcctcaggactcttctgtaactacttttcctcttgggagattttcccctgaaattgtatctgcatagctgacatctccacttgaataatccaatagtatcttaaacttaatgtgtccttttaaaacagagctcctaaaacaatatctggtttgcattagacactcattaattaatgttgactcaatgaatgattgctactttaatctattttttaattgaggaatttaaattttcttctcattagaaatctttcaggaaggattgggagctgacaatgtcaaatgtgttcattgataaaaactttccatgaaagttgtctctgtggaatttgtgctgctgaatagattccccactagggggtatgcatgcaccacatacatttcgaaaacagtcctggttaagaaaaattgagtgattaataaaataaataagggctcttggatgtagctgttgtctgatttttcatttatcttgtttggaggaaactttttaaaggttacctttattttgtaaagagaatgaaaattttctaaatggaaagaatcaaagaaaaaatgtttttatttttagtatgtctaaattaaaacaaaacacaattcacttttaggctgaagaattactttacaacatgaatgattcttggttataggcattattctacactcagttcaactgactaatgtttattgaacacctagtatatggcaggagtaaggaaatatccctccctttgataagttcacagtctaatggggaagacagtcatggaaatatgaagcataatgcaacagtaagtactataataaatataatttaaaagtgctttaaaagcctacaaagaatgaaattaactatggcgaggggtgctgtcactgagaaggagacattcaggtgtcccagactaactgcttttatcctaactgggcctcaaaaatgtctgtgttgatggatttgagtccctgtctctagcatgtgtgttctctgtattagtgatctgtagccccaataaaggccacagggtagtatctggatatttacttacaatactcttagtactacactgtctaagcattctagtttccctagtcttttctcacccaattctgggggcaagggacacccagataattagtctagttgagtgaggaaatggggtacaaatgtgagagactgaaaaatttggagaaatgaaagagtggccctgtggaagtccgctgcactgggcatgggaggccatcagacccccgatagacatgatatcagcatgcttgactgactagtgagttgccaatgaaccctatggcttaggaagctttttttgtgcttcttaaagtacatctaggttgtcagggtatgaaggtttatgggaaaacaaactatcctaagcttatgtcctgtggagggatatgtgtgggttttcatagatgggattacgcatatgcatttagatgagctagatgagtacctagagggaagaagggctgataaaaagacagtaactatgatgtaggactccacagctcttctgcactctccgagagcagttcttagagcaggagattgccagattgccagttggaaacctcagaaagctgtattctcaggtgccctcactgacaatcttatgagaatgctattgtaggcaatgagagtctagataagaattagtacttttaaaagcagtaatttttttaaatgctaggaataaaagggacagaaaataaagacatgatttgatttagatgccaacactttacttactgtctctggtataactgttgaagagtgggtgggcagcgggagggaagaaggaagcaacaccttgatatggcttttaaacaccagaaaactaagggcagaacaaacaacaaatttagatgaatatttagatattttatgaatattttgtgaagctatatctttggcatttctttgtgagaaaattacagaaaagtatacactagattttggcatttttatgaggacacaattatttgttagtgaaggttaaagggaaactgaaagaattccagattgctctgtcaggattttggaataacacaatgatagatgaaatttaaactcaacataagcaaagtaatgctgcagaagccgagattttcaataactatgtttatgcattgtgacagcttataaattagaaacctagcaactcttaggaaatacactcagccatcactagggataatataacagaggtgactgttctataaaaaagggagcttggacttgatgctatattgacaatgaaggaggtagtaatttaaaaaatagtattttaatgattatttgctgtatttatatgtcacacaatttaaaagttgttatggaataaacatttgtttcctccaaaaaattggtatgttgaaatcctgctccccattgtggtggcattaggtgtgagagagcatctcattgtggttttgatttgcattttctctgatggttagggatgatgagcattttttcatgtttgctggccacctgtatgtcttctgtcgagaagtgtctgttcatgtcctttgcccactttttaatggggttatttgtttcttgcttgttccttcatttaagttatagattctgaacattaggactttgtcagatgggagagggagatgattaagtcatgagggcagaaccctcctgaatgggattagtaccctcataaaagggaccccaggccaggcttggtggctcatgcctgtaatctcagcactttgggaggctgaggcaggcggatcacttgaggttaagagtttgaggccagcctggccaacatggtgaaacccggtccctactaaaaacaatacaaaaattaggcaggtgtggtggcatgtgcctgtaatcccagctacttgggaagctgaggcagaagaatcgcttgaacctgggaggttgaggttgcagtgagccgagatcgcgccactgcactccagcctgggtgacagagcaagaccctgtctcaaaaaaaaaaaaaaaaaaaaaaaaaaagaaagagagacccagagagctctcctaccccctttgccaggtgaggacacagcaacatggctaaatttactgttgccttgttcttggtaaatgtttgttgttaagccacccaggctatgatatttttgttatggcatcccaaagggactaaaacaagacaaaagcaaaaactagaagctgttgtgaaatataaatgggctacgtgagggctgtaagagtgtaggtggtaaatcatattgactagaggtttaaatacaaataaaatgattaattttcaaaatctgtgtgtaattactctggaatattatttgacagagccaagacagaatatataagctgaactgattagggtattcaaggggaagaatacaaaagtcaaaataagttaaaatgagttgaaaagttaaaatgaaaaaaatatcaaaagtatcttggggaatatactacatgaaggaatttttaaaagaccttaagacaattccaaacctcaaaataaaaaaatggagacatttcaatgcagtcacatatgatcttggataagttataaaatttctcccagcctctatttcctcctctgcactgaagggtgaacaaatggtttcttagatgcattccagcaacaaactatttgtcttttgtctgagatttcctctctcccaagatccccagtggatgcctaaaaccccggatagtacccaatcgtatatatactatgtttttttttttgatctggtaagagagagggctactaagtgactaatggtggatggcatatacagtgtggatatgttggacaagggatgattcatatcctgggtaagatagagatttcatcacgctactcagaatagtgtgcaattgacaacttacacattgtttatttctgaaaatttccatttaatattttcggaccgtggttcaccacagataacaaaccaagaaaagcgaaacagagaataactaacataagtaaggttgaagaaatttcctcatccatcttaactgttagataatattgctttgtggcctaggtattatattcaactcttcctctgactcaatggattggtttgcttatcctaggcagagaggagcctctgaaatgttgatcacagcaaaagagctgtgaacattagggctttttttttttccattaaaactttttctgaatgtgtacagggaagaatatgggcatagtaatcagataaacttgggtttgaaacataactattccttaccagctgattgcaagagctaacaaccttccctatctggaaaaacagagctaatacccaccttgaagaatgaaagtactattcagcactctgatcaatatactttgaggtttttattccttttcttcttatttataatccgctagggcctaacaagaaaaaacagatttgattatttttagagtcttaaactacagaaatcactgctggcttccaatgaaaccttcaaacaaaatggaatgaagcaagtctcacaaataataaaaatcagccgctctgacagggtttggataccaaggggaattttagccaataggtattaaatcaacatacacctccaggattcctttatagaagagtataaccggtcatttctttgcttatgtgtaagacttccagaatgctacgggaaaattaactctcttttcaatatattaggctttgaagtctaaatataaaggcaatcagggtctattttcagagcggagaggactgtttctagacatccaggaaggattagtccaaatgggtgtaacccccttggaggccttgtccccagagcatcctcatctcctgggtgccaggggcttaaggaatccccctccctcctttttttctttcttcctcttctcggagctcccaccctcaccccattcggctgcttcttttccatcttcgcttcttcccataagcggtcaaaatagaaaacggaagtacctatttgttgcttagtgtagtgctcagagacgtttttttggttgttgtttaattaagaaaaataaaatccccctctaggttcttcatttcgcaatgagcccaaacatccgctggctcattaggcctcttaacaaaagaaaaatgcccccactgaactgtggctgactagtgtgcggaggctggggtcggctggaggggttctaagtatctatcatgcggcaaggacagcttcccgggcgaggggacccgggatcccgggaggcgcgtgcagcgccgccccctcacagtagggaggcgcgggagaggcggcggtgcctgcccagcccgggtatcccgtcccaggagcgcgagggagcgggcagcggccggaggcggcggcggcggggacgcggcgcggctgccgcaggggagcggcggcggcggcggcggcggcggcgggcgcgaggggcggggcgcactccgcaacttctgccgctgccgcccgggcgctctcggcgcagccgagctgctgctgcgaactgtggagctgccagcggagcccagcccgagctccctcgactccgcgcgtcccaggcgtccgtcgggggccgaagcgcctcccgcagggagtccccgtgaggccgcgctgccgcgttacccgcagcggccgggggtccggggagtgcggggctccgagacagagccaggcgccccccagcggtcggcgcgggccccatggctgggccgggcggagcggaaccggtgaggtgaagccccggggccggcagccggaggcgcgtggccggggcgccggctccatgggcagcggcacacggcggcgcgatgatggacgttaacagcagcggccgcccggacctctacgggcacctccgctctttccttctgccagaagtggggcgcgggctgcccgacttgagccccgacggtggcgccgacccggtcgcgggctcctgggcgccgcacctgctgagcgaggtgacagccagcccggcgcccacctgggacgcgcccccggacaatgcctccggctgtggggaacagatcaactacggcagagtcgagaaagttgtgatcggctccatcctgacgctcatcacgctgctgacgatcgcgggcaactgcctggtggtgatctccgtgtgcttcgtcaagaagctccgccagccctccaactacctgatcgtgtccctggcgctggccgacctctcggtggctgtggcggtcatgcccttcgtcagcgtcaccgacctcatcgggggcaagtggatctttggacactttttctgtaatgtcttcatcgccatggacgtcatgtgctgcacggcctcgatcatgaccctgtgcgtgatcagcattgacaggtaagggccggaccgccccgtcccaggctccggctggggaccggctggcagctcagccccgcgcgctcgcctttcctgggaggatcaagctagacttcaaggcgggatgaagggctgcgcttaaaacaccgctccccccaatccaccctacaccaaccaaacttcggttacggcatagcctatgtacatctttaaaagaaaaaccggaaatgttctggtttactgtagtgacgaatttaagaccaaarttaagagtattttaagccttagcatttccaccagcgggtcccttgccttggtttttggaaggaagggatttggtgctccctgacttgatcaagccttgctgtgagccttaaagagtcattaaaaaataataataataagtcggagaaaagccaccttgcttaccccattgtgggagctactccctaggccagtaaaaggaccttggatggttctagaattggggtttgtatgtcttacacattgcatctttatgatggtcagttcggaatcgcattcttgcttgtggaagtctggtttcaatgtttggtaatgctgtctgtatcttgcgagcttgctgactggagccttcctccaggtctgaatggctggttctagcctttcatcatagcccttgggaaccttctcttgagaactcccccactggagtaattgaaacagaggctgaccatctgtcagggatgctaggggaaaaattcctgccttgggtgtcatattgaactaggagacccacagggtttcttcaggctgtaaggttacaggcttttgaaatggagctagtctttgacccttgaaatattatgcagttgacaacttgaagtatggtctcaatcctctttggcctaaaacaactctatttcacttgaaactgaaatatgagaccttaatattcacactcagaattttgccggtgtttcaagactagtatcctgttgtgtttaatgatacagagaaatggttgcttattttcttagtggatctatagaacctttatatgtgtagatctttcagcctaggggaaataattgatgcctccacacttaaaatgacagtgcctcaaaggatggtctagcatgaaactgagattttcctttttttcttcttgaaaacactgctgtttgtggtttgctggtacttaaaatgttctgctgtatgtattttttgcttgaccagggtttataattactaaataaaggaaataakagaaaagggaatattttcaagaagaaaaacacattgtagctccatttagctaacaatttaggttatttttctttaaattgattctaccattttatatatcatggtagaagctgctgacagcaaacaaggaattacttaagagcagagcatgaactgcatatgtgagaatattagcaccaaatttggcagctgaagttctgaattacagtagttaagaatgacaaaacatatgtatttacagtctgactgtggcaactggaattaggagagtgcactcaatacacatagtaagtgtatacatgaattataagcacagaaatctgactgctcagccaaccaaaacagagcatcctgcatgaatggagtccttttaaatggaacttagtgtaataaaacaaataacggtttatgctgcaagtactgtatttataaccattttttaaaatttcacagttgataaatgatacataaatartaccttgtgctaatttgtctcctaagacagccagtgtttctcctcttctgggctacattgaggtttggctgagatcaccttgtgattcctatacatgagctaaaggcattctccactcagcgtgcatgtgtgacttagcatcggcaggcatgtcctgaatactgagaagacattaatccttcttggcaagagcttaagattttgttgttaactgtattcttatgattgtcacaaattgtggtaacataggcatatagattctccttttacctatgagaattgccccattggtgaattctgcttaaaaattattttagaagatcagcatatcatttctttagagaaaatgaagaattgataaaattggaagacacagactgattttcttccragaacactgagaactaaaaatgagaaaaaaggaaaatatattatttctgaaaagcatgttttctgcaattccgttgtagaatatgacagatgatattaaatgtgctgtgaaaatatgtaaaaaaaaaatcttcattcccttgttcattccctcttgagtacctaatataggttacactgtgctttgtgcagcataatcaaagattaattacaatattgttgcttttgtgctcattacaggcttttgtgtatttggagagtttggatatctgttgggcatttagcctgtctaaaatggaacctttcatttttcttaaccactccccatcacaccgggatgcttttctaatgtaatgccatactgtttttcacaggcttcagagctcccatcccgtctttttcagaaaatgatttgtattcattgaaaaagtagcagccatcagatgagaacttttatctttcccccaccaaacaatctgatctgtcctgcatgtgtacccttctttttacttctttccagttaaaaagcaaaaagacattgtgagccagcaaataccaaactacttggactttatattccatctccccaccttctcaaggtctttgttcctttattgtttcttcatggatggtcttttttgttgttattgktttgttgtttttttggggggagtgaggtggagggggacagaatctcactctgttacccaggctggagtgcagtggtgccatctctgctcactgcaccctccgcctcctgggttcaggtgattctcgtgcctgagcccctgcaaatacctaggattacaggtgcacgccaccacacccggctaatttttgaattttagtagacacggggttttgccatgttggcaaactcatgacatcaactgatccgcccacctcggcctcccaaaatgctgggattacaggcgtgagccaccaggcccagcttattgatggtctttcttcagcttttcctttctactgtgtcaagtttggttttctatcttttaaaacccttctttggcctctggcctcacttcttcctccagccacggctctgcttcacagttaagctgctcaaagaattgtatccataagttgtcttttcttccttgcgctttagatagatgactttgatgctcatcaggtttactgcaatattctaattggctttcctggttccacttctgtccagccccgagctattccctaagaagaagcaagaatggtctatttagaaactttttaaagtgagataatttacatataatggcatgcacagatcttaaatattcaatttgtatgttgacaaatatatatacctatgtgactaatgttctaatcaagatatagaatatcttgtcatccaagraagttcccttgtgctaatttaagaatgatcttttaaaaatagaaatcaaattaccagccagatgtggtgactcacaactgtaatcccagcactttgggaggctgaggctggaggattgctggagccctggagttcaagaccagcctgggcaacacagggagactcccatctctacggaaaaaaaaaaaaraaaagaaaagaaacaaaaaagccaggcatggtggcaaatgcctgtgttctcaattacttgggaagctgaggtgggaggatcactttggcccaggaggttgaggctgcagcgagccaagattacaccactgcactctagcctgggcaatagagtgaggcactgtcttaaaaaaaaaaaaaaaagaaaaaaaaaagaaatcaaattactttttatgcatagttttaaaacatgaaaaatagttttacatatcatttagggaagcttgtagaaagagtaaaagtataaaatagtgcaagggagtggttgacgccaaattcaggacagtgatttatctctggtggggtgggtggtggtgtaatcagtagtatatatatcacctatattggtaatgttttgtttcttaatctcggtggtggatatagacttattatcctttgtataactttttgtatgactgaaatatttgttaaaactttttgaaattcatatagaaaagtatatgtatgtgcacaattctaaggatgaagcttgatgaatttccacatccatgtaaacaactatattaagaaatagaacactggcaacctcccagaggtcccctcctctccttttctagtttctattgcttgcaaagggaaccattgtcctgacattagcatcatgcattggggttttgcttggctagaacttcatataaatggaattgtatagtatgtactcttttgaatctggcttctatttctcaacataatgtctgtgagagtcatctgtagtttttagcctatcagtggttcattcatttttattgataagtagtattccgttgtataaatataccataatttgcttatccattcaccgtagatggacatttgagtttttttctagtttctggctatctctaatagtgctgctctgaacatttatttatgtgcaagtcatttgtggatatgtttaaatttattttggggaaatacaatcctaggtaataaggtactttggaacattttaattttatctatcccctcacaccttttatgttattattgtcattcattttaggtctacagattattaaaacccattagatattatttttattgttgtaacagtccgtattcattcttctttgcttacatgtttatcttttccattgttctttgttttgttctgcattactacattttcatctgagatcattttcttctgcccagttagatgcctattagcattattatttttttaaattaaaaactttttttttttttttttttttttacttcacataaagagacagtctcgctatgttgcccaggctggtcttgaactcccggcctcaagtaattctcccaccctggcctcccaaagtgctgagattacagatataagccatcatgcccggcccagcattatttttttactgaatgtattagtctgttctcatgctgctaataaagacgtacccaagactgggtaatttataaaggaaagaggtttaattgactcacagttccacaaggctggagaggcctcacaatcatggtggaaggtgaaggggaagcaagacatgtctttcatggcagcaggcaagagagagcttgtgcacgggaactcccatttataaaaccatcagatcttgtgagacttattcactaccaggagaacggtatgggggaaaccacccccatgattcagttatctccacctggctctgcccttgacatgtggggattattacaattcaaggtgagatttggttggggacacagccaaaccatattactgagggtttgctagtgacaaatcctctcaattcttacttgtctgaaaatgtctttgtttcagcttccttcttttttttttttttttttttttttgggacggagtctcactctgtcgcccaggctggagtgcagtggtgtgatctcagctcactgcaagctccgcctcctggactcacaccattctcctgccttagcctccagagtagctgggagtacaggcgtctgccaccacgccctgctaatttttgtatttttagtagagacggggtttcaccttgttagccaggatggtcttgatctcctgacctcatgatccgcccgccttggcctcccaaagtgctgggattgcaggtgtgagccaacgcacccagcctcagcttcatttttgaatgatattttcactgagtatggaattttatatttctagtttttttccccagaactttaaaacattgttccattgtcttctgactgccatcatttctgttgaaaaatcagccattagccaacattattatcactccatggaaggtaatgtgtcttttttaccctgacttttagggttttgtctttgcctttaatttttatcagtttttctgtgatgtctctaggtctggctttattgatttttttgttgttattgtcgtttatttactgttaaccctgtttggggttcctaatgatttttaaaatttgtgtattgatatctttaatcagtttgctgttatctcgtcaaacactactactgttccattctttacttctctatgtcttcaaacatatgtattgtagacctttttactctgtcacacatatttcttactcttttctatattttccattttatgttttacatctgtgcttgagttttgaaaaaattttgaccagccttccaatttgttaattgtctcttctactatgtctaatctgttgttcaaccttatctattgagttaatttccataatagtattttacaattctagaaattccatttaagctttttaaactgattctgatttttttggtgaaattctctaccttttcatctaatttcttcatcttgttatattttttagtgtattaatcatagtttgactcttcgtttcctgactccaatatctgagtcacttgtggtttctttgtgtgatctgtttttttctctgggtttttggtctgtgtcttggcatgcctagcaaatgttgattgtatattcatcatattgcatgaaaaattgtagatgctgtagatgatgttattttgttccagagaaaatgctaggcaggcatattggacaactgattattttaatccaattagggactgagctgaacataggctgtattttagttctgttagagctctgccactggcagatgcctctttctaggatgtagccttcttaggattttagcccaatgacttccacccctggctagttcagaactttaaatgttctttcctcaaaactgtaagactatcaagcatggcttcttagcctcctgccttatgcagtctcagaattcagcaaatgttttgagggaactaacaggtgctgggcttaggtttcactggcatctttgccttttaggcctctgacttttgcctctctatctccaagagactgccaagtgctcttctggtgtttttgccccttattagcaactctctgctgaggctctttacctggatccttagccccttacccttcacccaattttggcaagtgccccaagggaaagagcagctgcacaatattggcttgcctccctgtgcttctgtcttctctaggattttgttccctgaagtcctggttgtctcaacaactgcttgatgctttcgggcatcatagcgtgcaygcgtgtgtgagtgtgtgtgtatttgtgctttatccagcttttaaagtggctttcagcagaagcattggtctgaagtatcaaacaaccccatcatggctagaagtggctatgtgcctgaaatattttaaatgtatgctaatatagaaatataattatgtaaatttcctgcttaaaatttttaattttcttttcatttcacttggaataaaattcactctttagcacatgtaggaggtccttggtttgtccctgcctcactcctcaacatcttgaactgcattctgtcttgttygccacattccagtcacattgacctttctcagtttctctattgtaccagattctttcctgcatcgggtttactccatgaaaactcaccaactaatatatttgtgaaactgattttacatctgaagttctgttctctaatatgtgttttttttttaattctaagttggaaagtttaagtgtttaaccctctagattgacaacaattaaaatgtcaaaaaactaccaagtgttgggaaggatatggagcaaagggaatttacatacattactagtgggattataaattggtgaactacgttgcaaatagtttagtgttatcatgtaatgttaaaaatacatacaccctaagaccctgttattttatcaccaggtacatatcagaaagatgcttgtccaccaaaagtcttctacaagaatatttatagaatccacaaacttgaaaccttaaaacttgaaataatacacctgtgtgtcagtagtagaatgaataaataaattgtggtatattcatacaacagaatgctatttaggagtgtttatcaaacttgaatgtgcatcagaactacctggagagcttattaaaacacagattgttgggcctaaccccagaccttaccaaatcagaaaccttaccccaagagtttctgatttcaaaagtctggggttgggctaagaatttacagttcacataaattcccaggtgattctgatgcttctggtcttgggatcttacttagagaagtattgctatacagcaatgaaaatgaacaaattctaactacacccagcaaccaagtgaatctcatgaagtaatttaaatgattttttgttatataaattttgaaacatattttaaagtcaagtatactataatgagtctgatgtatccatcatccatcttcaacagtgatcaacttatggtcgatttattcaaaatatactttgcaattcttccttcatccaattattttaaatcaaatttcagatgtcatatcatttcactgataaatattttatggttacaaatgtaaggctgagcagaagcagcaaaatataaagtatatacatatgtgattccattcaaataaaaattttaaatagacaaaaatatttttagggacgtacataagtggtaatattataaagaaaaggaaggaaatatatatcataagaacaaagaggccaggcacagtggcttacacctataatgccagcatgccagcactttggaaggctgaggcgggcagatcacctgaggtctggagttcgagaccagcctgaccaacatggagaaactccgtctctactagaaatacaaaattagctgggtatgctggcgcatgcctgtaatcccagttactcgggaggcaggagaatcgcttgaacccgggaggccgaggttgcggtgagccgagatcgcgccattgcactccagcttgggcaacaagagcaaatcctgccaaaaaaaaaaaaaaaaaaagaacaaagagagagtgattgcttttagatgggatggagaaaactgagatcagagcggcatgcttctaaggtggtgtagtgttttctttcttgactggagtggtaattacacaagggttaacttaattattgttaaagtgtccatgtatattttaggcactttcctgtatatgtattttattttataatgaaaggggcaaaagtatgtatttgatacatctcttgaggtatatttggattaagtcagatatatgattaatctgagcagatacagttattgttttaatgctgtcagcaaccattagtttttagctttgtgtatgagggcaggggccacctttgggttgttcatggttacaggaactcatctgccttatttgcaagagctgtaatatttagctctgattggtatctggctgaagccttgcttcctcgccaggtactatgactcattccctctgatgatctgagttctgcttttggctttaattctgcttcaatcagcagggcagggtgcattctggcttctccagactcctttcacttcaaaggaagttatccttgctcatctctaaaattaattttctgcttgtagatacattttaagaattgatggaatcttcttctggctttgctatgggaaagtgagaaggagatgaaatgggtcttctgccctgttcttttgtgtagtaacacttagccaccaactgcttttttttttcctctcatgttaactaacaggaagtaatgcttcagggtagaaatgataatagctaatagatgtttaatgatttattgcttacagaccactcccaaatacagaaatctccactgatcccctctacaacattgtgaggtgggcatcagtatccccacttgatgtaggaggaacttgaggctcagagggtagaagtgacttgacaaggacatacagtttgtatggatggaacttgtgttcaaagcttgttcaaatattgtgtatttatttatatctatgtgtgtaaatatatctaaggawaataataaaagtggagacatggaacattccagtcaaaggagcagcagatgccaggaacacagaggcagtgaatcagtgtttgaatgaactcacagagagggagcaggaaggcattctgagtgagggaatagcataggagaagcacaagtcaataacccttcaccccttgcagtagatactgctggttgcctaccccaatctccgtcctccccttccccctttagttatgggaattcctgctttgacctgggaatatggctgcccagaataaaggctgcatttcttagcctcccttacagctagatgtggccatgttactaaatttgggcttgagagatgttagtagaagtattatgtttcagcttcccagaaactgccttcaagaaaattggtgtgtgccgtcttcctcttttctgtcctttcctccatcttcttgcctggaatatgaagatggtggctagagctctggccacttagtcaagatggacaaaaatggtcatgcttgttaaagaggagcagtatgctggaagggtagcctggatcgtggaggactgtcaactccacagaattgctggaaccttgacttcttactaattgatgaactaataccattatgttgtttatcacatgcagctgaacttaatctcaactgctaaacctagtacaaattgggcatccctgatctgaaagtctgaaacccaaaatgctccaagattagaatctttgagtactgacatgatgccacaggtagaaaatttcacacctgacctcatgtgatgggcacacaaaattatttagaatattgtataagattacttcatatcatttcactgataaatattttgatttttgggtacaaggtaaatatagaacataaatgaattttgtgtttagacttaggtcccatcctcaagatattttattatgtatatgcacatatttcaaaatataaaaaagattctaagcattttggatcagggatactcaacttgtacacatttcttctccctgtcacccatccttcccacagatgtttatatacactttttttttccaccttggcatatgattctattttgagaacaggcaaaagagaacaatgtgtctgaagtgctggtcagccacagaatcttgggtggcattggaacagagggtgaggtaccatggaaacaaaattcttgggcagaagatcacggagtgaagggtccagggggaaagctcatggcttctgggcaccaagggtggccatcccatgcaggcggtggtcttcttggaggccagccatcatgtgcagtgccaggaagtctccagatgcagggcggtgaccactggggcaccacctacactttctaaaacttcattgtgagagtgtcactgggtcatgcttctttggaaacccttcagggataacactaccattttatgaatgcgttttgtgctacttaggtttctagacacttgacacatggtatctcatagaatctttacaatatccttgtgagggtgtttttcgagtgtctgtcgttgagtgactctgctggtcaaagaygaacaagacatatatgaacacttttaatgccatgctataggtgaggaagctgaggaagctcacatacattgtatgtgactggaacagtgtctgaatccaaaggtcatacgtatttcactacgtcattgtagccattgcctgctatatgaggaggatattgttaggatagcattcaaggctctttatcatttgattgcagtcccttacagctttattctggccaactctccgaagacaccctccttttcaacactacatcagaacagaaatagtgctcttacttccgcaccttgttcctcgtccaaggttcccatcccaaaaagtgccatcagtttgcacccagttgatttgctagacatttgagtatcgtttttgaaactttccacttcagctttccactgtcacttactgatcaccaagtcctcctgattgtgcctacacagccccctacccccagcaactcaacttcagcccctatcatctttcagttgggcactcacagtagcctcttgggggtctctgggtcttcatccttggcccctgttaatgcggggtgcacaaccctggctgcatgttagaatcacctgggcaactttataccagtgcttggggagaccccctagagattcttatttaattgatgccagatgggcctgggcgtcacatcagtatatttgaaaatatcctccagatgatcccaatgtgcagccagagtgagaacccctgagccagactgatcyttttttttttttttttttttttttttttttttttttagacggagtctcattctgttgcccaggctggagtgcagtggcacaatctcggctcactgcaagctacgcctcccgggttcatgccattctcctgcctcagcctcccgagtagctgggactacaggctcccaccaccacgcccggctaattttttttgtatttttagtagaggcggggtttcactgtgttagccaggatggtctcgatctcctgacctcatgatccgcctgcctctgcctcccaaagtgctgggattacaggcataagccactgcgcccggccagactgatctttaaaacataaaaatgtgattatatccatggttcccaaactcatctgcataycagagtcacctaggaatcccctcaaaattccaaagcactggccataccaagactaattaattcataatatctggaagtgggactcatgcatccatattttttgaagctccctagtctaatgtgcagataggtttgggcactactgggtcatgctgttctccagttcaaactatttattgggttctcctggtcttgggataagatagtaaatctttaatgtgacctaaaatattatatgatctggcctctgccaatctcactaaatcaggggttggcaaacactttttttctgtaaaggtatagacagtaaatattttaagcttgtggactgtaaggtctctgttgcaactcctcaactctgccactgtagcatgaaagcagccatagataatatgcaaatgtgtgggtgtggctgtgttccaataaagctttatttatggatacagaaaactgaatttgatataattttaacatgtcataaaatagcattcttctctttgatttttttcaactacttaaaaatacaaagaccattcttagctgggggccatacaaaaacagactgggaccagatttggtcttactggagcttgccagcttctgctccagatttgatttggtcccatttaattctttccctcctttccttctttccccctttcttttcttccacctttccttctttccccctttcttttctcccacctttccttcctttcttcctacctaccaccaactaaccagtcatgtaccatactgcctctcctccccgtattttggcaattctggtcttctttcagttccttgacactgggtcttcacacatctattcatgtctcccctggaatattcttctagctctttagctgggtaatttttatcactcttcaggcaggtccttgattagatattactaggtcatgacacatttctagaatcccctgactatcttaaacagtcttttaacaccttgcactttttcttcctaattctyacctcaatttgtaattaatggtttgtaaaattaactgtaataaagtcatgatttatgggatcatctgtacactctgcatagcatgacccaggcttatcttgaagactgtattgccagcctgttggcatagtactttgtacttggtaggtgttcagttaatctttgtggattgactgyggaaggaagggagggagggaaggaagaaggaacaaaagaaaaaaaaaggagggaaggaagtaggaaggaakgaaaaaaaaggagggaaggagggaagaaagggaagaaaaaagggaatggtgcctctgattctcaaatccacacatgtggccttgacttcttattctgcagcttcctataagacattcctcttggtggcagtggagaagtttacttgagaaaccaagttaggatcaggagatgtctggtgaaaacagaagcagtgtagaggcagtgggacagtcccaagggatggcctcatgagaacatagtaggctggtgagttacttcctgttctgcagaacaccgacattagcaaagctgccagtgatgtgaaggtcttagcagcttagatccaggagttagctttttagtatcatcagtgctgtgctatggagcagtgtgagaacataggcaaaattaaatgaaaatctcagggtccttttttttttttcactaaataaacacatttttgatgaaggccacacatcccagaaagaaagccatgggtgtcagccatgaaggcaatayccaagtagaggagcataggaactgrcagtagcaatcccattgttgggtgcyaagggctatgcatgattcatctcatttaatccccatgaccactctgtgggcacactcacacccccacccctactcctgggtgatgaggacagggaggctgatagaggttaggagtacacagcaagaaaggagtggtatcaggtttggccatgaggaatgtctgactccagatctgtcttaccccttcatgctgctataacaaaatacccaagactgggtaatttataaacaacagaaatttgtttctcacagttctagaggctgggaagtccaagatcaaggcacagtcaagttccatgtctggtaaagactgcttgcaagatggtgccttgttgctgcatcgtcatgtggcaaaaagaacagagggcaaaagggcctagcaaatttactccagcccttttatgaggttgctaatcccatccatgagggctctaacctcatgacttaatcacctcccaaaagtctgcctcttaatactatcacattgaggttcaagttccaatatatgaatttttgagggacatatacattcaaaccataacaggatcttttttsttgttgttgttgttgtttttgtttttgtttttctttgagacagagtcttgctctatgcccaggctgaagtgaagtggcatgatctcggctcactgcaacctctgtctcctgggttcaaatgattcttctgcctcagccttccaagtagctgcgattacagtcgtgcaccatcacgcctggctaatktttgtatttttagtagagatgagttttcaccatgatggccaggctggtcttgagctcctagcttcaagtgatcagccaactttggcctcccaaattgctgagattacaggtgtgagccatcacgcccggccagcagggtcttccaaggctcaagggggcactggctttgtgaacatgatttatgaaccatgtcgaccatggaccattttctcttgcctttcagagaagaagatgatgttaataataattattagaatataaatttatagtctcatctaaaacccttaggatcagaggtatttcagaatggaagggggccatgagccaaagaatgggagaagcctctaaaagacggaaaaggtgatgaaatgaatcctctctagagtctccagaaaggaacacagcctgtagacaccttgattttagtccagggacccacatttgacttctgacctacagaactgcgggataaaaaatttttgttgttttaagccactgagtttgtgggaacttgttatagtaccaatagaaattaatacaaccagttttaagaacaaggtctgatttcagagcttttcaggctttagatttatggttaagaaattgtggacctgtaagtagtcttaactgtgcattactcaagatactaagtgtcctattgaaggcacttttattatcgctgttttacagatgagaaagctgaggctccgagaggttgacaaatatgcctaaggttgcagaactaataagtgaccagtctgggacttgaagccatgrctctttttctgtttcatggtctgtgctcttagactgcttgcttctaagcaattgttggtgcctagatttgaggcttaaagctttgaccagtgtcagggactgtacttaatgctggggataaggatgaacaagttaaagatgaatactgcccaggccttggagtcaacagacctgagttcaggtcccaaatttgacatttgtagttctgtggccatgtagacattatttaacttctttgagtttcaggatagtcatctatgacataggtaatactaatgccttcctcataggtttgtgatagttaattgggttggtgtaggtgaagtcttttgttgcatgcctggctaacaccaattgtgctgataaatgtgagctgttacacttattagtagtgttgttgtgttaatattatgcttctctagtaaggaacatattgttgtgaatagaggagtcaggtctctaagaaaaatttgaacagttcttaaaagttgaaggagttgaaagaacaagacaaactccatgcctgtgtcacacaggattcccttctcttggttgcggtggctgctgtaagtgttgggtgttgaggacamttgcattgcatactgcagctaagttttctgcatgtttggggtaggagaatgaagcagcctatctgatcacttggctttactcctttccagtgtcattccaggcacttttattatccccattttacagatgagaaagctgctgtcactccctgccatcagttagattttgggttacgatgacaattaaggtattatggactatcagatctagtccttcacagatttaagatagaatctaagcagtgagctctaacagagaggccagakgtgtgtgtgtgtgtgtgtgtgtgtgtgtgtgtgtgagagagagagagagaaacagatggagagacagacagatggagagatggagaggagagaggaaaagatgattgcatgcaaaccaagttagagaagatggtggtggtgagatttatttaataagcaaactgttactgcttgcctactagatatttaagaactatgaggatacaaaagtggataaagacacattcccatccttaacatgttatctagttgagggtaaattaagactatttcattcatgtcagaaaatttagagcttttgaaagttaggttatagatactgctttacagtcaattcctgtgtgataggacctttcttgaaagagatatgagtcatttagcttctggttgcaaacaattgtgttgttttattagcacttctgtcaataaaaaccctggtattctctggtctgttttccaacagcctttttgtgcctgaagacttcttaaggacccctgcaaaatgatggctcctagatcaaacctaagtgctcactcttctgatgttgcgtgttaaagtaaatctgggattggggactatctctagtgcatctgtttggggagctttatttcacccatttatccagtttgtattatcactttcatcatggcctctgttctgattcaaatccctgagtattctgtttttctgggcatgcttataacatattccattctctaaaagagaggcagctacatagctttcttccttttaaatggtttttttttcatctggaacatgaggcagaaccatctaccaaaaaggggctatcaatatttatggtcaaacatggggagacttaaaaggcatgctccaatccatccataatcaatctggtccagttgcctgaatatttcagaattatattccgggaaatgtatattctgtatgtttggattgaaaagtctctgctattttcagtagaagtctttgaaaattctttcatactgatgaaaggattgtcttacaatttttcatttgatagttttctgagttccacaggcccctactaattgagcttcttttctgggccacaaaggtgatagccctttattagcaactccttagcataataaaattgccttttcttattatgtgagttatacrggatttatctttttgcttttttaatatttattgactacctaatctatgttggttastcttccttatcataagcaaggcaaataacacctttgctctctaggatcttatattctagtaagaataaacaggtagataagaaacagataagttaaaacacacacacacacattaatttgttagtaataagtatcacgcacaattaaaatagggcaatgtgtaagagtgggtgatcatggagggcctttctgaggaggtgacatgtaactgagatgtaaatgacatgaaggagccagctgtgtgaagatcaggaaaaagaactttctaggcaaaggcagcagctggcagaaaggccctgggccagtgtrattggaggagagagacaaaaggaaaacctggaaggagatgagattagagaagtgttgcaaattatattgggattcagaccaggtaaagagtttggactttattctaagtgcggcagaaccactggagactttgaaacatagggtgaaatggtctggcttttaattttaatggttcattgtggttactttgtggagaatgaaatggaggagggtgagaatgaaaacttggagaccaatgggaaggcttctacgttagtcaaggcaagaggtaatcgtagcttggactkggttggagtagtggagacagagacaactggagaaattccggatctgtcttggaggtgtatcggcaggccttgctgatggactggatgtaggcgctgagggagacaggcatgaaggatgactcttgtgcttttggctcaagcaattcagtagatggtgatactgyttaccaagacatgatggtagtagaattggtggtaaaaatcaagagttctattttgattgataaattttatatcaatagacatttgaatatgagtctagaattccagagagaagtcaggactagaggtaaaaaattggttgtgattgtaaatgatacttcaggcaatggtgtgggagagagcagataggaaaaggggtttaaacaccaagctttgagggataaaatgtttggaggttaagagaaggacccagcaatgcttaaaaagggatggttagtcagtgcgatatgaggaacacctgtcatggaaattaaggggaaagtgttttgacaaagatggaatataatcaaattggtgaccttgaagtcattggtgatcttgagtagttttagtgaagcagtcagatggaagccagcaagagtcaggtaaagagaagatgagaggaaaggagagatggcagctagaagcaactcttccaagaagttttgctgataggcactcacctggaagtcaaaggacctggattccagcccagatgtgccgcactgtagtctgatgataattgtttgtgttagtcattttctgttgttataacagaataccacagattgggtagcttatgaagaaaataattttatttagcacagtgttctggaagctgggaagttcaagagcttagtgccaacatctggtgacagccttcttgctgcatcatagcatgttgagagggcaagagccagagagctagagagagagttcactttataacaaagccactctggagataatgagcccactcccatggtagtgacattaatccattcatgaaggcagagggattaagtttccaacacatgaacttttaggcaacacattcaaccatatcattgtttatgtaagtgtcttatattccactaggatgcacaaaaactttgaggtccttattcacttcaacttcctaatacttaaaaagttcttggcacatggtaaatacttaaacacattttagttgaatgaatggatggataaattaatgaatattctactagagtagaaacactttaggctcaagaccacgtctgattaatcttctacaggccgtgcaaactagtcaggatgcaaaaatatttctaaatgaataaatgactctaatgaactgaggggtatagtagggaagctggggccaggaaagtccagagatgggagctgtttagaccaaggttctcacaggactgggtaagacctgggactgaggtttaagggcatagaaagctgttgtagtagaagacaggggataggatacaggttcttctgaatttgtctctgactccctaactatgaccttacataagttgttatgtcttatctctaaaccatattcctcatgatgatagaaatatcactgtagagttaatgtgaggatttaatgagattacattcacagctgaacatggtggctcatgcctgtgatcacagcactttgggaagccaaggcgggagaattagtccagctcaggagttcaagactggcctgggcaatatagcaagacaccatctctacaaaaaaaaaaaaaaattctggtgtggtggtacacgcctgtaagtcctagccactcaggaggctgaggtgaaaggattgcttgggccccagaggtcgaggctacagtgaggtgtgtcataccactgtactccagcgtgagcaacagagcaagaccctgtctcaaattttaaaaaaattttaattaacaatatatattcacaaagggtttagtcaatggcttgactcatataaacacccactgacaggcagcattgttattaatactattggtaatattgttcgatactgacctgtaccagggacttaggttataccaccagtcagttagggcagctttctgggattaaggagttatttgaatgggagggcttgctgatgttctttctgactctccgttttcatcctaaaagcaataaataaatcaagtttacctttgggaaaaacctgtattggggcttgatgaggcttcagggartgccatcctgccctccaaagcaccctatgtgtttattgatgtcagcaatgggggccaaagtgtatccaataatcgagttcagatgctgctcaaggtaagtcagtggcttgaattcattcacgctgaggtgggatcagtaggtcggtcgggaaggatacstaatttgtgtcttatataatgttttagcgaatggggagggtttgggtgcatcatcacacctcagatagcatccaagttgttcttgccctttccttgtgtacttcctgtcatatgttctcctgtgcttccataccccagtacaagttgtttcctctgcttggagtgctctacccttgtctgcctatttcctaaacattctttgagattcagctaaagtgccacagcctttggaaagctgtgtctgacactgaggtctgggttaggtgtccctctcaagctctcccttagtcccctgagcttccttctctactctcatcatgctgaattgtaattgtttatatttctgggtcccttgcacaccaaatgctgaggtcctttgggacagggcatcttatttatctgtgttttcttccagctcctattagtatgtggaaggtgctcaataaatgtttggtggattagtggttgagtgaatgaatgaatgaaacaagaaaacaagcaatagttgactgtttaatcaggtcttggtataaaacaggtaggcagaggaatatgaaagagagacatagaagctgcaccactgatgacccagttctgccttggtgggttgtgtttttttcttccctaagtggagacctcatcatagctgccaggaccatttgttctgtgactttgaaggcttagccctgctttatgtgatttatgaggacactgccaatttcattcccaggatgttctgtcattaagrtcttcctgtaagggtggtcagtacaatgggattttacctgcatagctcattatatgaacatctccagcatggggatggtttagcttattgggttactttccaagccctagaggcaagactagacactggaaatagtatgatagctatagtgatttcaaatatacctatacagaatgggaaatcataagatgaactctaaccttatctccagaacctcccaaaacatacacattactacatcttgggtgagtcagacgcatttttacatttccacagtggttcttgtcttgattcttcttccagggaatagcaaatttttcctggaaaattcctaggagacgataacattccctgtcccaagatatcacttgtatgcagccttgtgatagactgtaaaaactgcccccaattcttcctgttcctacatgcacacccctctcaagggtgactttgcaccccttcctacacagaatttaggattggccttataacttgctttacctaatgggatcttagcaaacatgacacaggcagagacgtgaaaaggggggttcattggagttggccttttgcttcttttggggaccctgtgactgctagctaccatgtgaagaagccctcattggacaatgagagacccatggcctactcattctatttccttggctgccagtcgccagtcaagtgaatgaatgaagttattatagattgtccagacatgarcagatctatcacctgaccacagacacagagaaaacccarctgagatgatctgaacctgcctggactggaacagcccagctgactcacagaagagcaagctgaataaaaggctgtggtttaagccgcaaggttttgcagtagtttgttatacagaaaaagctaactgatgtagcaggcctttagtgatttcccccaccccccgaatttatgttcccatatttmtgtattcagattataacacaatgttcatctccatcatgttctttggatggttgttcatgagtctgcctccccagtagactttggatactccaagggtaggagcactatttggaggactagtaggatttgcacacctaaggcctagcccagtgccagggactaagaatgtgctctggaaatgtggatggactccatgaatgtgtgtgtgcaccagtagctcctttatttatttccctcctactcctcagctgggtatataaaacctgatgtttgctatattcttgaaattttctgttttcgcattctcttttgcagtaagcrtgccttttacctatccttgtaatttcttagtgtacctatagatagacaacagcaaagtgcccccaagttttttcaaaataggattatgtagtcataaaagacaccagccaaaataaagccttttgataataatccaagtttcctttttctaaattacatctttcaaatagcattatgtgatgattgatttttatttcatttagatttaattttattttcaatgtgtaagtttcatattttcaaaatgaacaatcttcccaatgaaagctattaatttcatcttgtctaaggtgataaatcatttcctgtgtctcttcactaaaatccatgattattactggcattttgggaaccccaggaagtcatgtgaaggaggcccccagagacaaaatgaaggaaaaggaagataactcagataaaagccattaacaactccccaagaaatttttgtcaaataaatcctcaatgtaagattaataataaatgttactatttattagtcaggccctgtgttacatgctgaatatctcttttaatctttacaacaaccccatgcggtacgttctattaccctccttttacaaataaggaaaggcttagataatttaatcaggttaccyagagtcagaacctggaatcaaaccagcatgggtctgctttcagagctggtgccttaactcttaagcttcacagagaagggaatgtaaaatatggtctattcatggtaaatcatgtatcctcttttaaaaagataaaaatcaaataacatatctagagcttggaaggtcccctagaggcatgatctcgacactctggaatattctctacagtggtggagtaggggctgaccttggtgtatactttggttcatatccatttctaatggcctaggagtttcaggcttggcatgcccaaggtcagttgaggtcgagctatcctcacaactaccagagaatgttaaaactggaagggacctgtgctagttcatgtctccaagtctactccaccttcctccaccccatcctcttccctgggaaactgacatgctgtttggcttcaatgggttcagccagtggagagtccagggaaggatatcagagggagtgggaaggtggagagtggactccctgcttgtaggcccaccttgcactggctgtgcccttgtctggaagtcactggtctttttcagagggccttttctgcgtgactccttccttctggaccatgttttgtcctcttccctcctccctgtgggcctgggatggcgaatgttctgttgctgaactcttatggttttcctactgagaggtgacagcgtgctggcagctctcacagccctcgctcactctcggtgcctccttggcctcggtgcccattctggccatgcttgaggagcccttcagcccactgctgcactgtgggagcccttctctgggctggctgaggctggagccagctccctcagcttgtgggaaggtgtggagagagaggcacgagcgggaaccggggctgtgcatggagcttgagggccagctggagttccgggtgggcgtgggcttggcgggcccgcactcggagcagccggctggccctgccaccccaagcagtgaggggcttagcacctgggccagcagctgcagagggtgtgccgggtcccccagcagtgctggcccacctgcgctgtgctagatttctagccgggccttagctgcctctcctcggggcagggcttgggacctgcatcccaccatgcctgggtctcccctacacccaccgtggcctcctgcactgcctgagcctcyccgacragtgccaccccctgctccacggcgcctggtcccatccaccacccaagggctgaggagtgcacccgcatggcgtgggacttgcagacagctccacctgcagccccagtgccagatccactgggtgaagccagctgggctcctgagtctgatggggacttggagaatctttatgtctagctaagggattgtaaatacaccaatcaacactctgtatctagctcaaggtttgtaaacacaccaatcagcaccctatgtctagctcagggtttgtgaatgcgccaatcggcactctgtatctagttaatctggtggggactcgcagaacatttatgtctagctaagggattgtgaatgcaccaatcgacactctgtatctaactcaagggattgtaaatacaccaatcagcactctgtgcctagctcagggtttgtaaatacaccagtcgacactctgtatctagctaatctagtggggacgtggataacttttgtgtctagctcagggattgtaaacgcaccaatcagcaccctgtcaaaacggaccaatcaactctctgtaaaacagaccaatcggctctctgtaaaatggaccaatccgcaggttgtgggtggagccagataagagaataaaagcaggctgcgcgagccagcagtggcaacccgctggggtccctttccacagtttggaagcaatgtgttttgctttttgcaatagatcttgctactgcccactttttgggtccacactgcttttawgagctgtaacactcacagcgaagatttgcagcttcactcctgaagtcaccgagaccacgaacccaccgggaggaacaaacaactccagatgtgccggcttgagctgtaacactcaccgccaaggtctgcagcttcactcctgagtcagcgagaccatgaacccaccagaaggaagaaactccgaacacagccgaacatcagaaggaacaaactccggacacgctgcctttaagaactgtaacactcacggcgagggtctgcggcttcattcttgaagtcagtgagaccaagagcctaccaattccggacacactacctccagcccatgggtctgcaaatagtcttcttgaactaccctaattggaatgtgcaatctatttcttgctgagaccctgattgatacagaattttagagattatgtagtacaaccttcacattttatgaagagaaaaccacggtatagagagtaagtgcctgcttgaagcaactgctaagtggcagagcctgaactctgaaggtgcaccggactgacctcttgtctggagatcctccaacataaccctagtgtggaaagactagtgagtggcacaacattagttggagtaggcatttattttatttttaacttttttgtggagcatcgtaactgggccaaagcttgtttgcttgcctttttttttttttttttctgagacagggtctcactttgtcacccaggctggagtgcartggtgccatcttggcttactgctgcctccatctcccgggcttaagcgatcctcccacctcagccctccaagtacctgggactacaagcacgcaccaccacacctggtaaatatttttgtattttttgtagagatggggtttcatcatgttgcccaggctggtctcaaactcctgggcacaagctatctgctacatcggcctcccaaagtgctagaattacaggcgtgagccactgcgcctggctggccaaatctttctatagtgacttttgcccacgttattgctcagctgtacttaggcaacttttcagctatgacttttgccttttcttaggtgttccagaataaaaaattccatgaatgggcttctgtgtttcatctggttacaaatttagaagctgtgtaagcaagtggtttgtgtgtgagtgtaattaatgccttcaggtaaatggtttttgttctttaataattgcagagtattcatcagtttaataacacccatgaaccaaaatggcagtgaatcaggatcttcttcaaaggaagactgttgttacagtttattggtaacaattattgaatggtattcaagtttggattactgaggttcgctattggtgggtatactggcacaagataaacagtcaataaatatttgtcaaattttaggattgttttctctattactgtgagaaatgtcattggtgttttgatatggattgcattgaatctgtagatttctttggttaatatggacattttaacaatattgattcttccaatccatgaacatgaaacattttaactttttttgtatgtgttctcttcaatttctttcacttctttggttaattcctaggtatttaattttatttgtagctattgtaaatgggattacttgatttctttttcaggttgttttctgttggcatatagaaatgctactgatttctgtatattgattttgtatgttgaaacattactgagtttatcagttcagatagttttttgttttgcgtgtggagttttcaggtttttccaaatgtaagttcatatcatctgcaaacaaggacagtttgacttctttgcaatttgaatgcctcttatatctttctcttgtctgattgctctagctaggacttccagtactgtgttgaataacagtggcaaaaagtggggatccttcacagggaggggaacatcacacaccagggcctgtcagggtggggggctaggggagggatagcattaggagactaatgtaggtgacaggttgaagggtgcagcaaaccaccatggcacgtgtatacctatgtaacaaaactgcatgtttttcacatgtatcccagaacttaaagtataaaaaaaaaatgatttgacaaccccaaaaaaagaaaagtggggatccttatcgtgttctagatcttagagaaaaggttttcacttgttccccattcagtatcatactagctgtgggtctgtcatatattgtttttattatttaggtatgttccttctacactcagttttttgagggtttttatcatgctgagggatcctgaattttatcaaatgtctttttcagcatcagctgaaatgatatatgggttttgtccttcattctgctaatataatgtatcacattggttgatttacatatgttgaactatgcttgcatacctgggataaatcccacttggtcatgatgaatgatctttttagtatgttgttgaatttggtttgcaagatttttttgaggatttttgcttcaatattcatcagggatattagcctgtactttttttttctttctttctttcttttttttwaattttcaaccccctgagacttctacatcctatctagttttcttattttttggatgcgttttcatctggtgttggcatcagggtaatactgtcctcataaaatgagtttagaagtattctatttttcagaatagttttagtaggattgatttttttaaaaatgttttgtgaaatgaagcagtgaagccattgggtcctgggcttttctttgctgggagattctttattacagcttctatctcattacttgttatcggtatgttcaaattttggatttctttatggttcaatcttggtaagttgtatgtgtctaagaatttatccatttcttctaggttttccaatttagtggcatattaagcctctcataatcctttgagtttctgcagtatcagttataatgcctttctttttcatctctgattttatttatttgggtcttctctatttttccttagtttggctaaaggtttgtcaagtttgtttatgttttcagaaaaccaagatttcattttgttggtcttttgcatggttttcttcatttcaatttcatttatttctgctctgatatttattatttgtctactgattttaggttctgtttgctcttgattttccagttctttaagatgtattgttaggttgattacttgatgtctttctactttttttatgtaggcacttataactataaacttctctcttattactgctttcactatatcccacaggttttgatatgttgtgtttccattatcatttgtttcgataaattttttgatttgcttcttaatttcttcattgacaactggtcattcaggagtgtattatttaatttccgtgtgtttgtgtggtttccaagattttgcttgttattcatttcttgttttattccattgtggtcagagaagakacttattctttcagtttttttgaatgtgttaagacttgttttgtgtcctaatatatggtctatccttgagaatgatccatgtgctgagaagattgtgttctccagccattggatgaaatattctgtaaatatctgttaggtcaatttggtccatggtgcagattaagttctttgttggttttctttctgggtgatctgtccaatgctgaaagtggggtgttgaggtctcctgctatcattgtattggggtttatctctctgtttagckctaacattttctttatatatctgggtactccggtgttgggtagatatgtatttacaattgttatatcctcttgcagaattgacccttttatcattatacaatgaccttctttgtctctttttatgatttttgtcttgaattctattttgtctgataaaagtatagctactcttcctctttttggttttcacttgcttagaaagtctttttccattcttttttttcagtttatgtgtgtctttataggtgaagtatgttagtgtgtttttagtaggcaacagaacactgggtctgttttttaaaaatccattcagccactytgtcttttttgactaatttttggtttaatttttatttttagtagagacatggtctcactttgttgcccaggctggtctcaaattcctgtgctctagcaatcctccacccttggcctcccaaagtgctgagattccaagtgtgagccaacatacccagcctactctgtgtcttttcattggagagtttagtccatttacattcattgttgttattaataagtaaggacttacttcagccattttttatttattttctggttgttttgtgttcttctcttccttctttccttcctttctgtcttccttttagtaaaggttattttctctagtggtatggttgaatttgtttctttttattttttgcatatttgtggtatgttttgttttgttttgttttgaagttactatgaggcttgcaaataataatttatagcccagtattttattcatttatttattttattattattattatttttattttttgagatggagtctcgctgtgtcacccaggctggagtgcagtggcatgatcttgactcactgcaagctccgcctcctgggttcatgccattctcctgcctcagcctcccgagcagctgggaccacaggcacccgccaccacacctggctaattttttgtatttttagtagagatggggtttcaccatgttagccaggatggtctcgatctcctgagctcgtgatcygcccgcctcagcctcccaaagtgctgggattaccccagtattttaaacttatgacaacttaacactgattgcataaacaagcaataagtaataaaaactctacacttcaccttcatcctcttgcttttaaactttttgttgtttctatttatatcttatagtactgtctgtgccttaaaattattatttttatcagttcatcttttagtctttccactcaagaggtgagtagttaacataccacaattacagtgttattatattytgtgtttttctgtttacttattattatcagtgagttttataccttcagatgatttcttattgctcatttacttcctttactttcagactgaaaaaattccgtttacttgtaggacaggtctgctgttgataaaatacctcagcatttgtttgtctgggcaagtctttatttctccttcatgtttgaaggatattttcaccagatatattattctagggtaaaagtttttttttctttagtattttaaatatgtatgccactctttcctggcctgtaaggtttccactgaaaagtctgctgccagacatattagagctcatagtatgttgtttcttttctcttgctactttcaggatcttttctttatcttcgacctttgggagtttattaaatgctttgatgtagtcttctttgggttaaatctgcttggcattctttaatcttcttttacttggatattgatagctttctctaggtttgtcaagttctctgttatccctttgaataaactttcaatccctatctctctctccacttcctctttaaggccagtgactcttaaacttgcccctttcatgctattttctagtcttgtaggtgtgcttcattttttaaattcttttttcattttgtcttctctgactgtgtatttccaaatagcctgtcttcaagctcactaattctttctgatacttggtcagttctgctattaagagactttgatgcattcttcagtatgtcaatttcatttttcaactctagaatttgtttgattttttcaaattatgaattcctttgttatatttatctgataagatcccaaattccttctctgtgttatcttaaatttcattgagttttctcaaaactgctattttgaattctctgtctgaaaggtcacatatctccatctctctgggattggctcctggtgacttatttagtttatttttgagatcatattttcctgggtgatcttgatgcttgtggatatttgttggtgtttgtgcattgaagagttaggtatttattgtagtcttctcaggctgggcttgtttgtacccatccttcttaggaaggtttttcaggtatttgaagggacttggatgttgtgatctaagtttttggtcactgccgccatgtctgcattaggcggcagccttatagaggtataagcctgcagactcatagaggtacaagsctgcagactcatagaggtactgccttggtggttgtggatgagatcctgaagaattctctggattgccaggcagagactgtcatattcttgccttactttctcctaaacaaatggagcttctctctctgtgttgagttgcctggagctgggaaaggggttatataagtagccctgtattcaccaccactgggactgccctgggtcaaaacactgagtcttgcccaaggcccattgtaaccactacctggctactgcctgtattcactcaaggccctagggctctacagccagcaggtggtaaagccagccagccttccccttcagggagtggagttccccagggccccagatgggcccagaaaagccacccaggagccaggacctgaagtcagaaaccaaagaaatctgtgctggtgccacaaggcaatgtctttcccaatagtccctcccccttccacaagaagaggggtctctccccatagccaccattaccccaggcccatgaggaatactgccaggctaccactgatgttcacttaaggcccaggagcttttcagtcagcttgtggtgaatgtttccaggattgggactcacccttcagggaaatatgttcccctctggcccaggacaggtccagaaatccaagagccaaggcctggaattagggaacaccaagggcctgcttggtgctctacccagctgtggccaaactggtatctaagctgcaagactaagtcccctttactcttttttctgcttttcccaagaaggaatccctccccttggctaccacagctgggaatgtgctgggtcacacctgaagccagtacatctcagagtctcatccaaggctcacagtgtgtactacctagataccactgctgattattcagggctcaaaggctctttagtcaggaggttattaatcctgcaaggactacatcctttccttcaagacagtgttttcccttctgacccaatgtgtgtctggaaatgtcatctgggcactaggaaatggaatggggacctcagaactctgtttggtaccctatcctgttgtggctcagctgatatccaaattgcaagacaactctttgctcttcgctctcctctccttaagtggaaggaaggaatcttgttcagagctgcaagctgcactgcctgggattgggggatggttagtacaagccctcctgtgttactctgtgatcacactgctataaagaactacctgagactcagtaatttatgaagaaaaggggtttaattgactcacaattctgaaggctctacaggaggcatggcttgggagacctcaggaaacttaaaatcatggcagaagacaaaggggaagcaagcatgtcttccccatggccagcaggaaaaagagagtgaaaggggaggtgctacacactttcaaacaactggatctcatgagaactctatcatgagaacagcaagggggattttcacccccataattgaatcaactcccaccaggcttctcttccagcattgaagattgtaggtcattatgagatttgggtggggacacagagccaaactctatcattctgctcctggccccttccaaatctcatgtccttctcacatttcaaaacaatcatgccttcccaacagtcccccagagtcttaactcattccagcatcaactcaaaagtccaagtccaaagtctcatgtgaaacaaggcaagtcccttccactatgagcctgtaaaattaagaacaaattagttacttctaagatactgtgatagtacagacaatgggtaaatgctcccattccaagcgggagaaatcagccgaaacaaataggctctatgcaagtctgaaacccagcagggcagtcattacatcttaaagctccaaaataatattctttgactccatgtctcatttgtaggccatactgacacaagggatgggctcccaaggccttgggcagctccacccctgtgtatctgcagggtatagccccctcggctgcttttatgggctggtgttgagagcctgcagcttttccaggtgcatggtgcaagctgttggtagattctggggtctggaggacagtggccctcttctaacagctccacgaggcagtgccccagtggggattctgtgtaggtactctaactccacatttccccatacacactgccctagaaggggttctccatgagggctttgcccctgcagtagacttctgcctgcacatccaggcatttccatacatcatctgagatctaggtggaggctcccaagcctcatctcttgccttctgtgcacccacaggcttaataccacatggaagycttggtggcttctggcttgcaccctctggaacagtggcctgaactgtaccttggcmtcttttagatgtggctccatggctggagcagagtagctaggacaccaggtgacatgtctcgaggctgcacagagcagcaggttcctggtcctggcccatgaaaccattcttccctcccagcctccaggcctgtgatgggaggggctgctgttaaagtctctgaaatgccctaggggcatattccccattgtcttggctattaacatcaggctcttctttacttatgcaaattgctgcaaccaactcaaattccttccctgaaaatgggcttttcttttctgccatatggccagactacaaattttccaaacttttatgctctgcttcccttttaaacataagttccagtttcagatcatctctttgcttatgaatacaagcatatgctgttagaagcagccaggccatgtcttgaatgctttgctgcttagaaatttcttctgccagataccctcaatcatctttctcaagctcaaagttccacagatctctagggcaggggtaggcacaatgctgccagtctcttttctaaagcatggcaagtgtgacctttacttcagttcctaataagttcctcatctccatctgagacttcagcctggactttattctttatatcactttcagcattttggtcacaacaatttaacaagtctctaggaagttccaaactttcctaccatctttctgtcttcttctgatcccttcaaactgttctaaactctgcctattacccagttccaaagctgcttccacattttcaggtatatttatagcaatgccccactcctggtaccaattttatgtattagtttgtgattacactgctataaagaactacctgagactcggtaatttatgcagaaaagaggtttaattgactcacagttccaaaggctgtacaggaggcatggctggggaggcctcaggaaacttaaaatcatggcagaaagtaaagggaatcaagcatgtctttcccattgccagcaggagagagagagagagtgaagggggaggtgctatatactttcaaacaaccagatctcatgagaaccctaccacaagaatagcaacggggaagtccaccctcatgattcagtcacctcccaccaggccctttctccaacactgaagattacaattcaacatgagatttgggtggggacacctaacatcaaaccacgtcaattcccttggctgtactggttggtgtctcactaggtcatgtgtccccgaagtccactggccttgaacccagcacagcactaggaattgccttggagttgcagtccttgtgacctagactgcctttctaatttgtttaagaccccagagcaccttagcctgcagtggcaaggcttgctggaactcaagttctaactgctggcagggacaattcccctttggctagggttggtttaaatgctccctccatttatttcagctgagttctggccagggttgcttttcactgtgacagacagcactgagttccaatgcaaagtcccacaatcactgtgctctttctcccccaagtgcacggattctctatgctttggggctgctgctgggggttggggaagggatggcatcagcaattcaagattgtctttcctaccctcttcagtgcctctttcagtgatatgaagttaaaatcaggcactgtgattactcacttaatgtttggttcttatgaaggtgcttgtgtgtgtgtgtgtgtgtgcatgtgtgtgtgtgtttgtgtgagtgtgtagatagctgttaaacttgatatttcttcagggaggatgattggtggaagcttgtattcatccattttgttccacctcctgctactctgtgactttcttatgagatataacacataattttattccacatgagcctcaatttccacattgtaaaactgggttgataataccttcctcatagggttttttgatggttaagtttttaaaaatgtatatgctagagagctttttaaaaataagttgtaaagagattatagacagtccccaacytaggatggttccacttactatttttcaactttttagtggttcaaaagcaatatacatttagtacctcctcatcttatgatggggttctgtctgggtaaatgctttgtaagcccatcataagccaaggaacatctgtgttgcctttactgtagtgctaggatgttacaattgtcctttcaatggacagactcagtgggactgtcttgtaggacctatgttgacgttttgttctgtgtacagtactagttcagctgcttgggatcttcttcctgtatgtataaaactcatttttagttcttttgattccaaagggttaactcaagaaaattactagaaggcacatttcttacagcaggtatccccctttgtaaatcaggatgtctgggagtgtccagatctttgcactaagcactaatggtggtctgaagttatgttcaacaactcttcccatgaaaacttttctccccaaaacttctgaacaccgtgttcagattcttctttctcgtccctacttccctgccaacaacaactaaataaaaagaaaatcaaaaagccatcactcctttaaattaccaggggaccacctaaaaatctttattatttcattatgcagaacagtttatctcttttcagcctgactcaactgtcagactagcctagagccatccctttcacagcctaaagactgtgccataccaaacaaaagactgacttattcccccaggggtgaattctgtgcttccccagaatgcagaagcagcttgtgcaagaatttctttctttttttaaatagattttccttcctgataaatgtagatatggttatgattaataaaatgcaaatttacttaagagcatttaagctattatagtagctttttgtcattctgtatttttttcaatcaactgatactaaaataaaatcactactaaatgtgggttacaaaaatgttttgacatttaaaagatgttctttttttttttttaagatgggaatctctgggataagccttttagtttgtgaaacacttcttaaactccacccttcctcaaagctagtgggaagctagctgatgccaatctgaatgattcctggtctggggtctgtggtggtatttgtgtttcttattgcaaggttttgttctaaggaatgaggctgaactaaatccagtgtcagagaaaaagtgatctcagaaaccaagaggacaattagaagtgagttggccccrgaaatagaaaccaactatcaggcaaagccttcgtgaggcaatttggggttgtaacactacattacctacaaatcaatggatattttaggagaaattaaaaagggatgaygtactctgttcaaaaaaaaggtttgaaacccagcagattcctgtgggctttgcatccccagccctaggcatctctgtttaaagaggcagcttagtgataagggaggaggagagaatttctaagaaggggtagaagtgtagacttatatttatatatatttttaaaaagtttttattgtttagcagcttcagtaaggtataatttcaagatcataaaattacccagggtaagtgggtatagataagtatataggtcatttattttgagtgaatttttagagttttgtatctatcaacacaattcagttttagaacattttttaatatctcttacttcattttgggttgctgtaacagtacctgagactggctaatttatgtgtattagtctattctcacactgctataaagaattacctgaggctgggtaatttataaagaaagcaagtttaattggctcatgggtccacaggctgtacaggatgcatggctggggaggcctcaggaaactttcaatcatggtagaaggtgaagtaggcatgtcttaacacggctggagcaggaggaagagagagatgggggaagtgctgcatacctttaaacaaccagatctcatgagaattcactgactatcatgagaacagcaagggaggaagtctgcctccatgatccagttaccttccaccaggccttttctccaacactggggattataattygacctgagatttgggtgggaacacaaatccaatctataccttttaaactctagaagtttatttagttcatggttctggaggctgggaagttgaagaacatggtgccagcatctagtgggggcctttgtgctgaatcattccatggcagatggtggaagaataagagagtgtgaggccaagagagtgtgagaacatgagaggaagcaggggccaaactcactttttttctttttttgagatggagtctcactgtgttgctcaggctggagtgcaatggtgcgatctcggctcactgcaacctccacctcctgggttcaagcaattcttctgcctcagcttcccaagcagctggcattacaggtgtgcactatcatgcccagctaatttttgtgttttcagtagagacaggatttcaccatgttggccaggctggccttgaactcctgacctcagcatcagcatcccaaagtgctggaattacaggcctgagccactgcaccagttgcaaactcacttttatatcaagaccactcttgtgataacagtgttacattaatgagtgcagaacaatgttacgttaataaaggcagggccctcaatgacccaaacacctcccatttggccccacctsccaccatggttgcgttggggattaagattccaacatatgaacacatttaaaccacagcaacccccaaaagttcccagtgctcttttatagtctatacccacttctgtcctctagttccaggcaaccattcactttctgtctatagatttgccttttctataaatagactcataaaatatgtattcttttgtgtatatcttctttcactttacatagttttgaggttcatggatattgcagtgtatatcagtagctcattttgttttctgaatagattgttttatgagtatagcatattttgtttattctttcaacagttgaaagacattttgaaatgtttccactttcttgctattatgactagttatattatgaacatttatataccggtttttctgtggactgacaaccgaaatgagtgattaaggcacaagtctcaaatcattgaggtttattgagccaccttaagggcttgcccaggaaaatcttgagtcacagaagcacctatgactttttccaaagaggttctcaggaagtttagtgttttacattttccttaaaaagggtgggggatggggcagcagtgagacaaattattacatacttatgagagtttagttagtgcccagtaaatctacatcttacataagataaggtgaacatttgaagaaaatgggaatagaggaaacatatgtctcagggaagggtgaaggaatgattaatctcatcttaccttagggaggggtgaaagcatgtttaatcttgtctttgttgtgtccctgtgaagataagctagtagtcttttgaaaggactagtttctttttagctcttagggaggaaagcctgatggctcccctgaaggtgggrgtatcaggaagtgtgtccaacttcccatttcaccatggctgtgaactcagcttttcaggtttctctggggtttccttggccaagaggaggtgtgttcagtctgttggrtgtttagaattgtttttatttctcatttttcccccttttggctaagattggccagaggcagcatcagtggccacactttcattttgtcccatgttgttgctgaggtggtatggctrtctgcttcaggtccgtcctgtcccttggtggggcccttgtggccaagrgacatagagccaaaaaacttaacagccaatttaagtgttctaggccagatggcatagagggcaggcactcatcaatgtttaaaaccttttatgcaataaaagagctaaaaaccaaagccaaaaggccaggttatttgtagggtctgaattaattatatccctgaaaaccagacctaacagtttcatgtgcccgcttcttccatgatagtccccgggcttagagggagggtgcttgtatagttttagcagcaggggattggcaaggagaaacagatcaggcccggtgggatatcaaattagggagattcataggctcttraatcatctgtagttttcaaaacaccgcaacttcagttttctcagacgaagtgaaacartggggaaataaataacattaatcatttgacaaaagagaatttatatgtcagaatggaagaggaacttattccatgagagagctaactaaaaacatcatgaagaaaattataactaggttcttttttagagacccactgcagaaaaataataattcaaaacaaaagtcacagctggaatccaataataattgtgttayagttttcctttgaaatagaatttctctctctctaatctctccttttttactaaaaagaaatgatagtatggccaatttatgtgcaaaataagtttcaggaatactcacagatagtttccaaattttggagaactcagagaggtatattctgctcacaaaagtatgctttacaatcagagtagcagccttccaagcaggacattgtcctttcatcttggagctaccatccacaaaccaagcagctctttatcagtcaggtgagagctatttattgggtaatgtaaaatccaggagctcctcgcatagcttcagacgcagtcctagggagaaagtagctctttgctcatgagtatctcctcgttgtacactccagatggcatcatcctatataaaccatttccattttattagggaaccctgggcacttcaatggggcactgctatccctgttagcatagggatagcttcacttaatgtcccttagcaaggcagtaaatgctyctcaagtggaaattctcttaaagtctcagtaatcatcattgggaagtgctcacagacttttgccaaaacctgcaataaatgctctacaaagggctatcaaagtacagaatttgttcccaccagcattctagcttttactctccactctgtgggcttgggcaatcttactggttctcatttagcatgtccattttttttttcttcaacttttaagttcaggagtacatatgcaggatgtgcaggtttgttacgtaggtaaacgtgtgccatgatggccagttgcacatatcatcccgtcacccaggtgtcaagcccagtgttcattagctattcttcccaatgctctccctcaggccccccacaaaaggccccagcatgtgttgttctcctgcccgcacatgtccatttaatattgcctgaggggcgcatttacatyctttctgttttatagtactaggtaggggaaacctctcccagtcagatacaagatccatttttataaacatttaggtaaagaagacacaatcactttagaaaatgcctgtttaaacattccaacttttgcctgtaatccaagcactttgggaggctgaggcaggtggatcgcctgaggtcaggagttcaagaccagcctggccaacacggtgaaaccctgtctctactaaaaatacaaaaattagctaggtgaggtggtgggygcctrtamtcccagctactcatgaggctgaggcaggagaattggttgaacctaagaggcagaggttgcggtgagccgagatcgcaccaccgcacttcagcctgggcaacagagtgagactacatctcaaaaaaaacaaaacaaaaaaaaaaacaaaaaaaaaatccaacttttgcaatcctgcatttttacattctggtcccagaaacttcttttatgaccgttttaccctttcttttgaaaaggacctgggttcccagcaggaggttgagccaagggacttaggcccttttgtcaatccatatcttggttcacctgcctcactatgccccaggcaattattggccagctttctcattgtaatctttgtcttttgactttttaaaaaaatttctccaatctagggtaaagggaataaaaaggtttggggccctttaatgctggggaactagcaaaatccctttggtccatccagcccttggtaatgttgtactaagacctttgttttaaccccatcagtttctattttattcgtttaatttcttaataaccatctaaagacttctactaccctgatgggatgaatcccatgtttctctctcatttcttctctgagtttcattgtttttctatcattgttttctttcttcaccttattttttagaataaccatttaaaaatttccaccttcctggaatgagtcctttgactctcccttttgcttttccccatgctcttcttaattactttaatgtwttattagcatctgtaagacccatgaggggaagctgaaacagccaatttgctacggcttctcgtgttgttctggacaacagtaggagtagcattacatagggtgcccatttggaaggagcccctttagcccctataaccacagcatttatcatgaactaggtaatgggcatatttagtgggtgaatattcctatcatcataaagtgagtccctcatggcttgtagatgaagcacatcagcagctgcatctggcgtgctccacttggcattactaagtagagttggatagttccccttcttagggcttttatccagtccactaggctagctatgaaacagcaccattgtctggagtaaatacctgaggtttgtcatctcatgccaaggaaatcaattaagtggtcacaagaagtgggtttaggagcggaggtttaataggctaaagaaagagaaaggagaacagctctctctcttgcgaaagagaggggcacctgaatgggacttctggcccactgtggagtgtaccggattttatagwcaggcttgaggaggctatgactgatttacatagggcccatagattggttggaccaggtgcgatgtttacatagctggtgaggaagctggtcgtcccaccctaatcttattaggcaaatggagtctttgcctggccagcgccatgctgtcttttccttactgtacatgtggtttggcaaggagaagggaagatggagatgccattttgaacctgcctagccccaggtagccatttcctattggcacagctgctggcattcacccttgcaagcttctagcttgtgtgtctatgtctgcagcttgattttacaggttgctctttgttagaaaagaaatgattttggggctgcttttcattgaaaggaaaaccttaccaaggactcccgaaccctcactatctaaataatttcttttttttttttttgacacggagtctcactccatgacccaggctggggtgcagtggcatgatctttgctcactgcaacctctgccacccgcgttcaagcgaccctgtggcctcagcctccccagtagctgggactacaggcgtgtgctaccatgctyggctaatttttatatttttggtagagatggggtttcaccatgttggccaggctggtcttgacctcctgacctcaggtgatcrgcccgcctcggcctcccaaagtgctggtattataggtttcatgcgcgtccgtgtgaagagaccaccaaacagkctttgtgtgagcaatacagcttttaatcacctgggtgcaggcgggctaagtctgaaaagagagtcagcaaagggagataggggtggggccgttttataagatttgggtaggtaaaggaaaatkacagtcaaagggggtttgttctctggcgggcaggagtgggggttgcaaggtgctcagtgggggaggtttttgagccaggatgagccaggaaaaggaatttcacaagacartgtcatcagttaaggcaggaacaggccattttcacttcttttgtggtggaatgtcatcagttaaggcggggcagggcatattcacttcttttgtgattcttcagttacttcaggccatctgggcgaatatgtgcaagtsacaggggatgcgatggcttggcttgggctcagaggcctgacattcctgccttcttatattaataagaaaaataaaacaaaatagtgttgaagtgttggggtggcgaaaatttttkgggggtggtatggagagagagaatgggcgatgtttctcagggctgcttcgagcaggattggggtggcttgggaacctagagtgggagagattaagctgaaggaagattttgtggtaaggggtgatattgtggggttgttagaagaaacatttgttgtatagaatgattggtgatggcctggatatggttttgtatgaattgaaaaactaaatggaataagagaaggagaaaaacaggtataaaaggtctaagaattgggaggacccaggacatctgattagagagtgcctaaggagattcagcatagtcctgccagcaaagattatttatttacttcaagagttaagagtggcagtttggggatagcaccaggagatatcagctgtgatggcttggagaaacagtgtaaaccrgcagtgtaaacaagagcagggcatgtatgagtagytgagaatggtgaataggagtatgactagacagaagatagtagggatgacaagtttttttggggcacagtctaagttggtctggtgtctggaatgagactggggcctaataaaaaggagcgtctatacaggagctcaaatgggctgtaccctgtagcattctgaggacaggtctgacttctgagaagggaaagtggtaaaagtattgtccagtcctttttaagttggtggctgagcttggtgaggtgtgtttttaaaagacctttagtctgttctacttttcctgaagacagaggactgtaagggatgtaaaggtttcactgaatactaagagcctgaaaaactacttggctgatttgactaataaaggctggtctgttatcagactgtatagaggtgggaaggctaaactaaggaattatgtctgacagaagggaggaaatgactacggtggccttctcagaccctgtaggaaaggcctttacttattcagtgaaagtgtctacttagaataagaggtattttagtttcctgactcggggcatgttgagtaaagctaatttgccagtcctgggcgggggcaaatccctgaacttgatgtgtagggaagagagggggcctgaataatccctgaggagtagtagcatagcagatggaatactgagaagttatttcctcgaggatagatttccacaatggaaaggaaatgagaggttctaagaggcgggctagtggcttgtactatagcatagcctgcctttgctggtgtgtggcgattacgcctggtggaactgccatcaataaactaagtgtgatcagggtgagaaacaggggagaaggaaatgtggggaaatggggtgaacgtcaggtggatcagagagatgaaggagctggggagcagaaagtataggcatcaggtgtgaggaagaaaatagattttggaaattatgagagctgtagagagtgagttgagcatagtttgtgattttaagggcctctgaaagtattggggtggcagcagccactgcccggagacatgatggccagcctaaaacagtaaggtcaagttgtttggacaaaaaggctacaggacgcgatcccggtccttgtgtaagaattccgactgcacagccctgcacttcagctctgtgtaatgaaaagggttgggatgagtcagggagcgctcgggtgggggcagtctctaaagctgtcttcaaggaacggaaaaaggagtggggaaaggatttaggatctatggggtcagctaggtttctttttgtgagtttatataatggttttgttaggatggcaaaaccaggtatctaaagtcgaaagtatctaaccatgcctaggatgtagaaggtgttggggtttgagagatcagtcagacacgatcggcagagagagcacatgtgtttttctaagaattacgccgagacaggtaacagatgaggaagaaatttgggcttgactgaagtaatgggggatgtctgttaagccttgcggcagtacagcccaggtaatttgctgagcgtgatgggtgtcagggtcagtccaagtgaaagcgaagagaggctgggatgaagggtgcaaaggaatagtaaagaaagcgtgtttgagatctagaacagaataatgggttgtagagggaggtattgaggataggagagtatatgggttcagcaccatggggtggataggcaaaacaatttggttgataaggcacagatcctgaactaacttgtaaggcttgtctggttttaggacaggtaaaatgggggaattgtaaggagagtttataggctttaaaaggccatgctgtagcaggcgagtgataacaggctttaatctttttaaagcgtgctgtgggatgggatactggcgttgagtggggtaagggtgattagattttaatgagatggtaagggttgcatgatcggtcaccaagaagggagtagaagtatcctatacttgtgggttaaggtggggggatacaagaggaggatgtgaaggaggctttgaagtgggggaaaaggtggcaatgagatgtggctgtagcccaggaatagtcagggaagcagataatttagttaaagtgtcttggcctaataagggaactgggcaggtggggataactaaaaaggagtgcttaaaagagtattgtctaaggtggcaccagagttggggagttttaagaggtttagaaacctggccgtcaatacccacaacagttatggaggcaagggaaacaggcccttgaaaaggaggtaatgtggagtgggtagcctccrtattcattaagaaggggacggacttaccttccactgtgaaggttacccgaagctcggagtccgtgatggtctagggggcttccgaggtgatcaggcagtgtcagtcttcagccgctaagccaagaagatctgggaagcagtcagagagccttgggccagagttccaggggctctgggagtggctgccaggtgagttggacagtccgatttccagtggggtccygcacagatgggacgtgacttaggaggaatcctgggctgcaggcattccttggcctggtggccagatttctggcacttgtagcaagctcctgrcagaggaggttctggaggaacgcctggccgctgcggttcaggcatttggaagttcttgtgtgctggagttgtggctggggtttgtctcacagtggaggcaaggaattgcaacttttttctattattgtacaccttgaaggcgaggttaattaatcccgttgtggggtttgagggccagaatttaatttttggagttttatttaatgttgggagcagattgggtaataaaatgtattttgagaataagacagccttttgatgttttagggtctagggctgtaaagagtctcagggttgctgccaaacgagtcatgaactgggctggatttttatatttgatgaaaaagagcctaaacgctatctgatttgggataaagaaaaaggagcattaaccttgactatgtctttagctccagccacctttttaagagtaaattgctaggcaggtggcagagggctagttacggaatgaaactgtaagccagaccgggtgtcaggaggggaggtgataaaaggattatagggtggagaagagggggctgaggaagaattgggacttagctcggcctggcgaggaggggagaggtcagatagatctgtagaaaaggaagattggagactcagtgatgcttggggttgggactgaggggacaggcgggagggaaagaaggaagatttgggacgagttgcattgggaacagagactaggaagggactgatgtgtaaaagaatgcctggacgtcaggcacctcagaccgtttgcctattttacgacaagaattatttatatcttgtaggatggaaaaattgaaagtgccattttctggctatttggtaccactgttgagtttgtattggggtcaagtggcattgcagaagaaagtaaggcatttaggttttaggtcaggtgtgagttgaagaggttttaagtttttgagaacacaggctaagggagaagaaggaggaatggagggtggaaggttgcccatagtgaaggaagcaagcccagagaaaagatagagacaggagggaaggggttcaggggttcttaccctccagaaaagtgggaaaggggtcggggcgcagagatacaaggtcggggcatggaaataagggatcagggcgcagagatataacaggttggggcgtggaaataagggatcggagcacagagatataagaggtcggggcatggacataagggatcggggcgcagagatacaaggttggggtacttgcccctcccccagaaaagcaggacttgccgctaaggatgaaggagaaggggttgggagtttcttgccccccagaaaggcggagaagaggtagagacatggagagaaggggttggggtacttgcccctcctctagaaaagcgggacttgctgctaagagtgaaggagaagggttaggggtttcttgccccccagaaaggtggagacggggtagagacacagagagaaggggttggggtacttgccccccccagaaaagtgggacttgccgctaagggtgaaggaccaaggcaggcgtccctgcgtgatctgacacctctgaaacgtgggtgaataatcagagaggcgtatctgcaattattaaacaccaagggaaggctgccttcccagtctgtgaccggcgccggggttttgggtccacggataaaacatgtctcctttgtctctaccagaaaatgaaaggaattgaaattgaaagaagggagagattgaagagtggaaaggagaaagtggttgagggatagtgagagaggttgaagaagagagtaagaagaggccgcttactcgatttaaaattggtgagatgttccttgggctggtgggtctgaggacctgaggtcgtaggtggatctttttcacggagcaaagaacaggaggacaggggattgatctcccaagggaggtcccccgatctgagtcacggcaccaaatttcatgcgcgtccgtgtgaagagaccaccaaacaggctttgtgtgagcaatacagcttttaatcacctgggtgcctgcgggctgagtccgaaaagagagtcagcaaagggagataggggtggggccgttttataatatttgggtaggtaaaggaaaattacagtcaaaggggttttgttctctggcgagcaggcgtaggggttgcaaggtgctcagtgggggaggtttttgagccaggatgagccaggaaaaggaatttcacaagacaatgtcatcagttaaggcaggaacaggccattttcacttcttttgtggtggaatgtcatcagttgaggtgaggcagggcatattcacttcttttgtgattcttcagttacttcaggccatctgggtgtgtacgtgcaagtgacaggggatgcgatggcttggcttgggctcagaggcctgacaataggtgtgatccaccgtgcccagcccaataatttctttctaacttctatatcagctgttctctaagaataccctcctgtcagtctgtatcacatttgcccatctgtgatttttcagtagtgagctgtgtgtcctgcatcaacctacacatcttttttccactctgtcgtatttaaaatgcaagatactactccaaaatcagtcactgttacaatccgttttagtaaaggttttttaggaagctgatgatactgatgtgcaaaatggaacagttcctttacattatgccctctggtttcagtagttaattggttttacccttccctcacattagctaccttcttggtaatcacaggtctcagaggtactttttgttgccccagtctatctttcccctttgcaggtggctttgaggctggtgatctgagatcagacagtccctcatcagaacttggtttggccaaggcccagcccagcacactcttttacttttgttttagctattatagataacaataaccaagggattgaatgtttctctttttccttattagtttgcatttcctcatgtatcttgtgaaccagttccccaggagctggatccattgctaaactccactggtaacttttacctttaggaactttttttttatttttttattttttwaattttttyattttgttttttttgagatggagtctcgctctgtcgcccaggctggagtgcagaggcgtgatctcggctcactacaagctccgcctcccgggttcacgccattctcctgcctcagcctcccaagtagctgagactacaggcgcccgccaccacgcccggctaattttttgtattttttagtagagacggggtttcaccrtgttggccaggacggtctcgatctcctgacctcktgatccgcccacctcagcctcccaaagtgttgggattacaggcgtgagccaccgcgcccagcctacctttaggaacttaatacagcacagctgcagctccataccatggatgaccccgtcaagggttcctcattccctacccttttatcctttctctttctatccatttaattttatctgtctcattttttcttcattttgaagaaatctttatgtagcctccaaactagacaaatttactttttctttagcaaaaaaccacatcctcatgttatttataacctttaccaaaacgcatcttagtttctttatgaactctgcatgtagaattctcttatatctagtagttttaattatatttattaacaactattctaactaagtaaccctaatttacagtgaaaaacctggrattacctaatataacatgatctctagattttaaattactaaagaaattttacaactagttttacttatcaaagattcctaaagtctcatgagctaacaggcatttgggctagcatgttgttctgatatttgatttaagcacttaatttcctttaagcctattgattagagtgctttcataaaatttggtagtgaaacatcacatacacatgccacatagaaacatatagacacatagaagcagatcttacagagttataagatttttcatttgtcaggtttcaaaaaatttctctcccctaatttagagtatcaatctctttattacctgtttcataccttaaaacaattattagctaggcaactctacatttgcatctccaaacacatgactcttaggggagagaaagtagaaaatgcatacctcaaaggcacagaacttagaacaaaacaaaggcaagcaaggtttgttatgttaactttaagacactgtcttccctgtagttaaacttcctagcggtttaggtgcagagacagaggtgcatttacaaatgatgatttcctttaaagatgtaaatttctttcacaaagagattcaaagactgatttaatttaataggtgttctttttcaacttagcttgtgtgttatttagataactggcttcagggtggagtcctttaaggaacagggacaataaagcatgtggtttttagggcccaaaccatgcttttctcatccaaacatgcaaagaaatgagtagccccctatagtaatgaccatttcctgtaaataactgtcttcarscacccctaacattgtagctattgcccaactcaccagccagtgcacacaccaatgtcaagacctttcatagtacaaagtaatatctggtacccygcaaaagctagagaccaggtaatgcaatataaaacagtgcagagttttagacctgagaggcatctgtctgcttacaactcttgggttttcataaggaaaaacaaaattttcctcccaacagaggagtctttgtcaacttttatgttttccccaaaagatcttagattgtcagaaattcctccccttcttttggtcccttctatgacattggaggttgcaagaggaaggaggaacagacaggattcagaaaaaataaataaataaaaatccccaagacaggatccaaaaagagaaacagcataaagctcttttaaaaaaaaattgtaattatagcttagatatcagcttttaatgaagctgactgctaacsatagaagtctttaaaagaaaaaaattctttcagatctcttattacctgggataaacagctgatatttctggcctttgaactcctttaccaaacctgaaggagtggggaggggtggtggctcgttttgctcagctgctgagctcaaacctcttgtgggagggggagcatgcaggtgagcaggtgcaggagctggggggagtgcctttaggcgctggcaggaatgaacccgtaccagcccatggcacattctagcagttgcccacaayctctggaaccccagagggcatgtgttacaaacaatgctcttttggtatttgctgtccaaagatggctaagtgttaactagctcagtggggagacatataccctgccctcttggtacccaggttcttgtctggtgtccaggaagaatcatgtcacacagactcgaaggatggtgaacgtggaggttttgttgagtgatggaggtggctctgagctgaaggggagctggaaaggggatggtgcgggaagaaggtgatctttccctgaagcccagccatctatgtctgggctcctctctgaagtcttgtcttctgaagttaagctgcatcttttcctagtctctgatgctcagttgctccttctcatctcaacattcagttgcttgttctcttttctccttctctgccacactgctctgctcctctgccagtggagcttggggtttttatggttataggttgggggcatagcaggcccaggtggttttggaaaaagcaacactcggtgggagaaacagggatgtgaagttctcatttagggccacaggcacaggcttgcaggtggaacccttgccagggactctgccctctcctacccagtattttcctgcctcctgttcgtaccattatggcttagccaagaacacacaaagtatctccaaagcagtgcaaagcagtcctcttaagatccagaattgttacagtaggtaggtagtcagacatgaccagggcaggatagggctcctctccccaacaccaggaatgtcaggcaaccatcagatgatggtcaggcrgttgttaactctctctccaaaataataattggtcatagccagactcaggaaaaggcggtctcccgataaacagaaacacctgaaactggtgatcagcagcttcctgataagatctcaggagtggggcgagtgggttcaaccttgtgcatcaaatggcaaatagtggagtttaagtgatatttgacctcctagggatattcaactagtaagggaaaaacacctcaagtgagatgtgtacaactccagtaaacrtactgtgcatacacccttcccaagcgctggcaggctactgcgcatgtgaataccctaccccaagggaaagatcaggggagaagggacacaagaccctcatatgccaacatatcaaaccccaagtcaaaggtcgaatggcacacttgatctctcaagtcacctgcttggccctcttccaagtgtactttacttccttttattcctgctctaaagcttttaaataaacttttagtcttactctaagacttgctttggtatcttcttctcctttatacccctcagacaaattctttcttctgaggaggcaagaactgagrttgctttaggcccatatggatctgctgctggtaacagaatgacaccaaagacagcaaaaaaaaaaaaaaaaaaaaaaaggccacaaatggggtacaactcatttttgtctgtctggccatatactctatggtctcagtttctcagctggtcatctacacacaaaggcccaaaaccaccatatgcccccacagatggaagacaggaaatcaaaagctgtccatggaagggaaaaggatcaataagtggcaaaagtcatacaaatatcaaaccaaaaggactgattccatgatcatgaattttaactaccagactacaaagtggagcagcttccgttgttaatcccacatggaatcaaaagcaggcagtttgagtgtacamgggattttaactttgttttaggtcagattttgctctttaaagagaatttttaaggctagctataacgctattacgkattcttttaaaaatttaacctttccatcaattgcttagaataagagatctctaaaatcttttttatttccaatagtgtacttagttccagtagtgactcaattcaaaagcctcttcatttaaagcccaggtggtaattttccaggtttttaccatatattcctggagagggcatagaggaagcaatccccgtgatcctccaaaattctctctcagaaatagacttaagccagcgaaagactgcaaaagccccggagggatggaacttttaagtcaaaactcctctcaagagcttgacacattcagaacagtgtgttacttaaaatattatgtgtcttggactcctagtcttttcagattggctggctggcctgaccctgaaaaatcatgccatctggatggcagagactagaaaagtaacccaagcacataaaacaagacaagagggaaaactcatccagtttccctctcaggagcccacagcgaagtttgtctaaacagacaccggtctagtcagaaccataaaatggactcatctgcagggctggcttgaacagcaggcttatagggattctaggcccatgttctctaccctatgacactgctctttatgagagaacaacacagaaagacaaaggaaaatggcaacaaaaaaggctatttctgagaggcaaggggtcaaacaatatgaacattcacaccataaagtaccaaaaatacaccagagtcactacaccccaagactagtcacacaaatcccttttttcccaataatcaaaactttgagacaaaacggtgatttttaaccatctgttcaatcrgattgcacaaggaggccaggaggctcactgataagaatttcttacctatttgctggcttgtaagtttcctgagttctcttcattctgacttccaaaagagaagagtgattttggggatcctactggctatgccaaattgtgggggccaaggaggagctttccccttgaccctctgaagttttgctgaaaaattaactcacaaaaggcagattaatgggagaaaaagtatacaatttatttaatcatgtttacatggkaaccttcagaatgaagactcttagctaatctttcctagatccaaattagggaaggtctggctgggccactttataatatgtcaaataaatatattttggggggtaaaatattgatttcttttaaccagctggtgtttccggggttggagcttgactttctgcaactatggagttttagtcaacattgtggctgggaggaagagttggtcaaatctaatggaagatagactaaaaccaaaaaacagaaaaagtgatttcataatttacatatagttgagatctctgagcttaaggagaaattacagccagctggcaataaaccttgaccttcagctaccaaatcccaaaataaaaccccaaaccagctccttacctggagatggggcccacgctgaagactgctctccattggaagtgagcaaactccctttttagaggagttctgtggcaaaatgaaccttgggatctgaaatcaaaaatttcagatcagggaacctcaggagaagagagcagcttttgagcattggtgatgtgcacaatctgtcagagagaatctcttgccagcactgataggagaattgctgcrggtcaaaggggctgatctcttccctgagatcccgtcagagttaatgaaatgactgctaacatgagtgtgaggcataagtctcaaatcatggagctttattgagccaccctgagggcatgcccagaaaaaacagaagcttctatggttgtttttcacaaagaggttctcaggatatttagtatttatatatttttccttataaaggggaaagggtgggacagcagtgagacaaatgattacatacttgtgagagtttagttagtgcccagtaaatctacattttacgtaagataaggtgaaygtttgaagaaaaagagaatagagaaaacacgtctcaaggaggagtgaagaaagggttaatttcatctcggggggtgaaggaatgwttaatctcatgttgtatttgttctgtacatgtgaagataaggtagtagtcttttgaaaggactagtttctatttagcccttggggaagaaagcctgatggctgttaggagggtgggagggtgggagtatagtaaggcgtggctaatctatcccttgtcactgtgactcagcttccaaggtttctctagggtttctttggccaagaggggttctattcagtcagttgggggcttagaattttattttcatttcttaggacattgttttatttttcttgggtagattaccatgagcagaattgctaatagatgtgtgtttgactttctaagaaaacggccaaacttttgtaagtggttgtacattctcaaatcaatgtatgggaattccagttttgttttcacattcacaccacactttgtmatgttagatgttttcattatagccactctagtgagtgtgtagaatttctgttgtcatttaaatttgtatttttcttcttattaatggtgttatcttagccaattgtgtaatttctttgatragatatccatacacagtttacctccactttttaattggattgtttgtggctctattattgaattgtagcagttctttatatattctggatacaacctctttatcagatatatgatttggaggtattttttctcccatctgttattttttaaaaatcattacttaaaatactttcaacctctaagttttagtgtggtggggcaaagcaccaggtcatcaaagctagggataatacaatgtttaactatcaccactgaccagtcagaatggatttgggtcatagggtggatgatggaaaggtgggggaccctcaggagcttggaacagcagctgtttgccagcaagtttggaaatattatatttaaacaactggtaccattataccagtgtatatacctggtatgagatcagacttaaatctttgtcaagcaatttgaggggtacaggagatgatttgcggggagtcctagaagtatcagtgtggaagcacaaagaagaaaccagcctagaatctcaccagtggacagctggggctgttaggggttttgatctaatgcagacagataccgacacccagcaggctcaatgtatttctcaggagcattggctctcaccccaggcttttatgagaatcacctggggatctcttcattcattcattcattcattcattcattcattcattcattcatgcagagccggctgtgcgggaaacatgagttttattactcaaatcagtctcctggagcattcagggatcagagtttttaaggaaaatttggtgggtgtcagggtggggagcagtgagtcaaaggaggtctgattggttgggccagagatgaaatcacagggagttgaagccgtcttcttgcactgttagttcctggataggggctacaagatcagatgagccagtttatcaatctatatggtgccagctgatccattaagtgcagggtttgcaaaatatctcaggcactaatcttaggttttacaatagtgatgttatccccaggagcaatttggggagggtcagaatcttgtagcttccagctacatgactcctaaaccataatttctaatcttttgmctaatttgttagctctacaaaggcggtctagttctcgggcaagaaggcggtttgttttgggaaagggctgttattatctttgtttcaaagtataaactataactaagttcctcccaaagttgattcagcctacacccaggaatgagcaaggacagcttggaggttagaagcaggatggagttggttaggtcagatctctgtcactttctcagttataattttgcagtggtagtttcagtcttactctgtcacccaggctggagtgcatgtatgatcacagctcactacagcctcaacctcctgggctaaagagatcctcccaccttggtccctgagttgctgggactcaggcatgtgccaccacacttggctaaatttttttagttttgtagagatgggggtttcagtatgttgcccaggttggccttgaactcttgggctcaagtgatcctccctccttggcctcccagcaccaggcatgagtcagtgtgtccagcctggggatatattaaaaagtacctatacctgggacccaacccagtccaatttaaccagactatctgcaagtggggcttaggctataggagtttttaaagctcctaggtgattctaatgacatctacttttgagaattcctgtggaaaacccaatattgctttgagtaggattgtacccagtcctgaatgagctacataacatgaagatagtattagcttttgcaaacatggcttcttctgctgcttgagaagaagtggagataaaacaacaactcccatttttttagccttctttaaagcatatgctgtggtttgaatgttccctccaaaactctgttgaaatttatttgccattttgatggtattaagaggtgggaccactaagaggtgattaggccatgagggatctaccctcatcagtgaattaataccattatagaaagagtggcctcctgataaaagtgagttccaccctgtcttgccctcttttaccctcttatgctctcttgcccttttgtctactgccatgaaatggtgcagcagaaaggctcttgccagatatgagtccctcagccttggacttcctagcctccagaattgttaagaaataaatgtattttctttataaatgatccagtctgtggtattctgttatagcaacacaaaatgaacaaagacagcatgtgacctcattgaattaaacagttatctaccctgataattcatttcttttttacatgtgaggagacagagactcagagccattgaacagtttactcaagatcacatagtccataaggggaagagtttcttttcagagaattagcatcatttatgtgaaagtcctggaaacctttagtattgtcttgtaaacaccttcccaaaatgcaaagaatggaaaagaggccttcaagttaccacaatgtatgaccctacagaataacattgaaactcttactttttgttcttagaatagtttttcatttagattatggctatttttgatacaattctaacaagtttgcttatctggtttcccagttgtcagattagaagcagaaaattagaaaagggagatgagttgctcacaatagacatattaaaacaggaatacattggagccagagcttcatggtggaggaagaaaatagtttccttctccgtaaaatgtgtgggttgaactggtctctgaggccccttccagctctaaaactcagtgtgtttaagataaaagctataaaaagcttcagaaaaacacataaaaatgaaaaaaacctagaaatttggacccagtgttggagaaataatcctagaaaatttggctgcttttgaggacatacctttatcatagacagtgcagtacttgatgtttgtgattatggcactgaatcatcaggagaagattaaaatttgtcggtttttttttttttttgagacggagtcttgctttgtcgcccaggctggagtgcagtggcatgatctcggctcactgcaagctccgccttgcaggtttacgccattctcctgcctcagcctcccgagtaactgggactacaggcgcctgccaccacatccggctaattttatttttgtatttttagtagagatggggtttcactgtgttagccgggatagtctcaatctcctgactttgtgatctgcctgcctcggcctcccatactgatgggattacagccgtgagcctagccttgtctgttttttaatcattttagagacagggtcttgctgtgtcacgcaggctggactctagtggcacaatcatagctcactgtaacctcaaactcctaggctcaagtgatccttccacattagcctccctagtagctgggacctacaggcacttgtcacgacacctggcttatttagagacagggtctggctatattgctcagggtgttctggaactcctggcctcaaagtgctgagattacaggtttgagccaccacacctggtctaaaatttgttttgtaagtgctgtttcagaattcaggaaagcacacaaattacttttgaaagatttcactcttttcaaccttttgttatttaaacatccataggttggaacatttgtgttgtggaacagtttccctgatacattcctcattgttttgtgggacttctgttccttgatagaataattcagttagttgtgacagtatcttgcatctatttattgcttgtcagccaaaaataaaatcctgagattcccccagccatctgaatggaaccctccctccttggccaagtgcatccaaagttaacctgaaaaaccagttcaggccatgataggaagggggaggttggacatgcctcattataccttcctcccttttggaattcaggaaaagctgaccagcattaacgtcaacacagataataagtctgattagaaacatttatacaatctattgtctctgaagcctgctacctggaggcttcatctgcgtgataaaaccttgctctctataactccttatgataacccagacgttcctttctattgataataaccctttcaaccaattgccaatcagaacatgttaaaatctgtctatgacgtggaaacacccctcaacccccacagatccctgcaagcttcaagttgtcccgcccttccaatgtaccaatgtaaatcttacatgtattgattgatgtgttatgtcttccttaatgtataaaggcaagctgtaccccaaacaccctgggcacatgtcattaggacctcctgaggctgtgtcatggatgtatttttaaccttggcaaagcaaaccttctaaattgattgagacctgtttcagataacttttgggtttacaactttatgctaattcagagcatttttctttaaatcttcctcttgcttttgtagactcctatcttgccatctcctgtcttcttacttctagtttcacacctaaactgataatgtcttctacctttatcatttgtttcattgttatcattcagagagcctctaaatttttgtacttctgtcattactctccttagaaagtggtggtggacatggtagaaggaggtgctaatttttttccgtacgtataaatgtttatgaaaagtgagtttgtgctgtagttatagtttcctatcttgttttttatttaggagaaaagagaatccttgtgcattgttgttggtttgtaaattgayacagttattatggaaaaaagtatgggggtttctcaaaaaattaaaaatagaactaccatatgatccagcaatcctactactggtatatacccaaaggaaggtaaatcagtatgttgatgagatatctgcaatctcatgttcattgcagcattatccacaatagccaagacatagaaacaacctaaatgccccacaacagatgaatggataaagaaaatgtatatactgtcatgcgctgctgagtaatgctttttcggtcaatgacagaccacatgtataacagtggttccataagattatgatggagctgaaaagttcctagtgatttctgatgttgtagccatctttacgtcatagcacaatgccttactcacgtgtttgtggtgatgccggtgtaaattaacctacttcactgccagttgtgtaaaagtataacacatacaattatgtataggctgggtgcagtggttcatgcctgttctcagaactttgggaggctgaggtaggaggattgcttgagcccaggagtttgagatcagcttaggcaacacagggagaccctatccctacaaataataataaaaaaatagccaggtgtggtggtgtgcacctttagtcccagttacttgggaggctgaggtgagagacttgcttgattcttgagcccagaaggttgaggctgtagtgagccatgactgcaccactgcactccagcctgtgtgattgagcaagatcctgtctcaaaaaaatttaaaaaagcagaaaacaaaaataaaaattatgtatagtacatagtacttgataatgataaacaattatgttgctggtttgtatgtttactatactatacttctaattgttattttagagtgtactccttctacttatagaaaacaagttaactgtaaaataatctcaggcaggtccttaaggaggtattcaagaaggagctattttttatcgcaagagatgacggctccttgtatgttggtgccccgaacacctaccttccagtgggacaagatgtggaagtggaagacagtgatattgatgatcctgaccctgtgtaggccgaggctaatgtgtgtgtttgtgtctgttaatattggttatatggtttaaatatggttaatattgagtgtcaatttgattggattgaaggatgcaaagtattttttcctgggtgtatctgtgttgccaaaggagattaacatttgagtcagtggactgggagaggcagacccaccctcaactggctgggcaccatctaatcagctgccagtgtggctagaataaagcaggcagaagaagttggaaggactagacttgctgagtcttccagccttcatctttctcccatgcctcatgcttcttgcccttgaacatcagactccaagttcttcagcttttggacaccagtgatttgtcaggggctcttgggccttcagccacagactgaaagctgcactgtcgagcttccctatttttgaggtttggggactcagactggcttccttgctcctcaccttgcagatagcctattgtgggatttcgccttgtgatcgtgtgtgtcaatactccttaataaactccccttcatatatacagccatcctattagttctgcccctctagagaaccctgactaatacagtgtcttagttgaggtacattgtacacttgtctgtaattccaaggtgatctttttttttttttttgagctttcttaaaaattgtttttttaaaaataatattaaatttattttcactatctatactaaawatatatatatataattagaaatattgatgtactactataagtaatttcccaatattaaactcttcttgcattcctggaattatcctcttctatggttattaatgattcctttagttgattttcaagttctgcccgtatgttattgtgattttcacctctctaccctatcataattatgattattggagatttgtgtatcttcttttcagaaatgtctatgtaagccctttgcccatttttaaattgggttatttgcttttttcttgttgagttgtagaagttcttatccggaatatattctggatattaattctattgaataaatgatttgaaaatattttctctcattccatgggttgcctttgcaccctcttgattgttttctttgattcacagatgttttaaagttctgtttcttcacatttgttaattttttgcttttgctgcctgtgctttggtgtcatatccaagaagtcattgtcaaatccaatgttatgaagcttttctttatgttttcttttaggagttttatagttttagggcttatatttaggtcttcagttcattttttttgtcgttaattttcacatgtggtataaggtaaggctccaactgtattcttttgcatgtggatatatggttttctcagcaccagttgttgaaatactgttctttctccattctgataagttctgataaatccattttaagggtttatcagaacccttattagataagcctttccattttagatgtaaaaatggaaagctgaaagtatattttcaatgtaatgatattttcaacttatgatagttttatccacatgtaaccccattgtaagttgaggagcataccgaatggtaaagttgaaaaatggtaagtcaagccgtagttagttagggaccatccataatctctttacaacttataaaaaagctctcttgtgtatatatataatgtacagttgaaatatatatatttaaaagtgtaaccattgaaaaatcctatgaaaaagatatgtttataatatgctataaatcaagaattatgattaattcctgctggtatagctgcagccaaaaaaaaccaaaccaaaaacaaaacaaaaaaaccccaacaaaacaatgaaaacccacaaacaaacccaaaagagtcctattacaggctgtattcttcatttacccaattagacgctgaaggctttagaactataaacttgttgttatcttatttttaactcgcactactttgccttatacatgggtgatgttggactggaaggcaagaaatttgaaaatttgattcatggattcataattatgtttttgtcattcagagattgtataatgaacttgtgtgaacagtttttaaaatttttcatgtttttgataaagtggcttcatactctgttttatttcatccttgcaacagagtcacctaatctttctgcgtggtaaatgcttctgaaaacgaggagtttgagccacaagattttctgctctttttactgctctttaatttcctgatgtctttttgtagtatactgaaaacagatttggagatttcccaggtaaatcccaaagaactgtaagaaacagctgtgcctagatatttcatacttgaggagccaaaacccctgtcaaataatggaataattttcatgtttgtgagaaattgttaagaaagatgatagtgataaaatggaaaattattcagcttcaacttactagaaattgtaatcgtatccaagtgaaataaaacacttggagggatcataaacacaattaaccttaaaaattcttctctgggctcatttgacatagtatatgtgtttattctaagtgcaattttgggggctatgacattttaatttaggctagccttgccattgcccgctcctcttcccccttcaatgcacacaaactaaaatgcttacatacacctggggcactcatcttttttgaacattttcaatctcctacctctgaatctttctgtggtcttttacacttagtcctcttgttgaattctgttcagtgttcaatgtgcaacttcagtattaggttatccatataacctttctttaacttcccagttgaaattactcacccccaatctaactccccctcactgctttaggtattgtgtataatatacattatttatgtgtacatacacacatacactttgatggcactttccacatttgtctcattctaaatatatatatatatctgtattctctaaatgtaaaccttcttgtgttcaggtatttgataatttttttgagtttgtgtcccacctagaaattataacagttactggcccatggtaatttctcacaatagagaagggcttaggacaaagttttctgaaccctgccccttttcaaaatgaaatatatatgtaggattgataaaaatatatggaagagatgaaggggagtgttttatttgtatgaatttattagttcaaatttgtgagatttgattcttactgccattcaaaagagcaatgaggctgatttaacaaacttcctgtgaaattgttgtttatggaagacagttgtagtcacatcagtctaagcatccaatgtaattttctctctctcttactctctttttctgtcttttcctctccctcaatctccctttctctctctctctctgcataatattgagaaaatctagatttacatggatgagtagttacaaatggcagtattttttaaaatagcttgctctttagtgtaactgatacagtatttttaaatagcttcttcttcaatttaactgaaacagtagctcaaaaggctaggaaatgcttgtttcaaattaaaatcacagcaagtaacaagtgcatgcagttattaattgttaaatgttcagtttagagagtcaattaacggattcatcagctagtttaatttgtcaccgtttggcagaaaataccatatgaatgtatcctgtcacttaattgagtggaacacacaaatgccagaggattgtattcacttgtatgattttatgtgaatagacatatacaggtctgaattaaaagaacaaatcaaaacagaaaaagacctgcagtcttgttaatcggtgtcacatttttaaggagttcaaatatatccactgcaaagttttattttgagggctccagaaaaaagcaaagttaaccaggcagcacaaattaagtcatttggggtctcccttgtattaaaatttgataaagaactcaagtgtgggtaatacttyttattccagttttaaaaatgattaatatgtttagcaatgaaacttgaatcaaatgtttgctgaaccctggaaacacattttcattccacatgactaggataaaaggatgttagcactgggaaggtacattgtgtctaactctttcatttttctagatttgaactgcgatgatgtatatgaaagtttccagtacaatgtgtagggtgtgcactaagtagatattttcttgaaaaaatgaaatgaaataatgaaatgaatgaatctttatggaacgctttttgcatgctaggcactctgctcataacaaacccaggatggtactattattatttccattttacagataagaaaactgaggcataaagagattacataatatgttcaaggtcacccagcttatccactgcagaacatggatttgaaatctggcgctctggacctccccaaatccaaatgtttagccaccacagacagtataccatcataatgcattcagcaagtgcagtgctttccctagtgatttttttttgtttgattgtggctgattttatgcaatcacgaaaggctgatctttctgttttgtttatcattttcatagaactatgatgattcttaattgtctgttaaccttcagcagtacatttgctaacagcatttaaagaaacagatcatgtctyggcacttggatttataaagaacatttgattttcccagtgaacctttccaccttcttttcagttcaggcagatgcactgatgtgtgtgtggcatatccctcctgacacagttttattgtgggcagaagagaaaaaaatagcatttaaaaccagagaccttgttattttttcttctttacacttcaatgattgttgattttgtgtcttgagaagactagttgtgaagaccatgtaggcaaaaaaaatcacaaaagagtcaaagcagaggccttgagaattgcttgagaatttatgctactttcaggagctttttgtggtataacaatgcagagcatagaaggaggaaggaaatggtatttgtttcaaaggatcattatttacttctggtttcagtagtcagttagccagtagatatactgagaaacttaagaaagtccccatcatctctgttgaagaaggataagttggtgcacgatgacaatataacattatattgcatcatagtgttatggatcaagtgctaggggatcgcrataatgggagtaagtagctggggtggggtgcagataggaaggaccttacagtagaggtgacacttgagcaaggtcttaagggataaataggagtttgctaggctatgaagtggggactagaagtgcagacactttctgtcttctccactttggcctgttactctatttccctgaattttttcatcaacctcctctcttctgtttttctttgctttttgtcaaaggggaaaagtaactaaacatgactaactgaaataaaatgctcctttatttttcttgtttttctaagaggtcttatatgaagtacattcaaaatttttgttttgttttactctaaacaaagtataggtagagccattgtttaatcttatgtcatactgatacattgatatcacaattagctaatatttagtaaaagaatgtgcaaagagagttgagttccagtagctgtagggattaggaataaccattttcttttaagctttatatctggatccattctaattcttggtctccgaatgattgatcttatttgctttaacaagtttagtgcagttatttgtagatgtatatatgtaggcctttcctgtaagaagttgagatcatccctattgtattgtgaccataatcatggattttccagaagagctccgtttaaagtgttctttggtaattccttaaaaataccaaagctggatctattttgggcttggaatactgtttatgtactaggtgtttcgtttttggtaaatctggggggttatcagatcagctgtcagaggtctgcagaatgatggcaaagcacctacatgaagatgtttacctgagttacccaggtaattgctataatcccttgctggctgtcaaccattccataatggcagtcttccttgccaggcctttctccactagatggtgctaacacccactgttgcagctccggctcagggtaagggtaatttaataatcaaaggcaaatcatttatttaatatctatttaacacttacgaaccggaccctacaggggttgtgagtagtgggttacgaagacaactaggcctcagatcctgactttgggagaatatactcttattgttatacagaaatagcaagggagcaagcggaagaggtcataagagaggcagtctaataaagtggtttaacatgcgcattctggagacagagtccctggtttcacatcccagcttgttcatttgctagtttactagctaaattacttcacttctttgtgcctcagctttgtcatctgtaaaatgtgaatagtaatattcacatttcatttacaattcctcattcatttacaatttctcatctctaaaatatgaatgataatattacctccttcatatggctggtgtgaggattacatgagttaaatatgtaaagcacttagcactatagctgacgtaaatccccacccacagctaccagcaygtaagtccagtgaaggtagtgagctttgtcttattattttttttatttttattttttttgagatggagtcttgctccataacccaggctggagtgcagtggcgtgatcccatctccctcactgcaacctctgcctcctgggttcaagtgattctcctgtctctgtctcccgagtagctgggagtacaggtgcgtgccaccacacacagctaatttttgtatttttaatagagacggggtttcaccatattgcccaggatggtcttgaactcctgaccttgtgatccacccaccttggcctcccaaagtgctgggattacaggcgtgacccactgtgcccagcggtttgtcttattatttastgatgtatccccagtgtgtctggcacatagtaggccctcctctttagtaaatatgttgaatgaataaggcacggttagaggatggctttgtgaatctacctgagtgagtgatgtgtggaagtaagggtctaacaggagctcagaagctttctagtttactcactttcttctagatttctgtcctactcattctaaagaggtatcttattattaaagtatgccattttcctaagaagatcttcctgagaaaatgcagtaacgcagacgatgattttttcccacgtattgtgccagagaggaaggcgtccatgaagacctttcatgccttgggcacctcttacatggggctggtctcctggaggtatcaccactcatcctgtctgattctccctcttgccctcttgctttctctctacattgaacaaacatcttgaaggcaaatgtcaagacaaggaataggaagagcttaatttgtcacgttgagtaccgctgtgtgtagaactgcaatttgcattttaatgtcctgcttattcctgaaaartggcattttacagatttcctgtattattcatgaattttaagctttgtagtttaaaaataaaaattcaggtaataaccaagaataagagaagttaaactctgtcaggttttcttactcttccctggtctcatgacttttccatctatttaagcatttcatagcctattcttatgttggttcttagatattaggaacaaatacacgtggaagtgttagctcaggcaccacatctggcttcctygttagcttcaaattccccaaaatacatatgtgggaaaaaaaatcagtggcctgcatagagaaccatgaacacatacctagcagcaggggagaaccacagcattttcctgataatgaagtggatgaaccatccttagccaaggcctgccgtgggccacttggcatttactgagtgttagggcaccccgatggttatcctctgtgttgggatgtgtgaggtttataatattgagtaaagatcaggtgttaatctgcctgctcttctaaattatgtgtttttaatgaaaacacaggttggcccaggttagagataaacccgacatatgtgctgaggaagttccatcccaagaaatgcttggaatgagcagtatttaagaaggaagccaggtggtatgaaagcaccttgtagaaaggccacatcccagtggtcacatgaacacaggtgagaaatcacacttcaggggcagatacattcccaggtcgggttgctcagctggcagtaccatggctgctttccagctctcccaagaaggggcgtcaaggccacaagactttgtggattgctgtattcttggcccaattcttgtcatcaggtgttgtggtgcgttctgagaaggagtaagaattgttggggaaaaaaatcagcatagttttgaggactaaagtaaagtataagaatgaaccatagtatttcttaaaatacatcacaaaatcaaggttggagttctggacgctcagtactggttcttggctgaaatggctattgccacaggcagtgttaagattggtgggggaatgcagaagtgcagttggttattcatatgtatttagtgcctgtgcaccaggtactgagtcatgtgttatatggagaagtgtgtgtgtctgggggcagtggaggtgaggaggcagatagacagacattacgaaggtatcaaaggaatttacatatagggtttgaaaatcccctagactctacttcgctttcaccgagaagacagagttcaaaatacatgtctctgccacttctttaattagattgtcaattagatatttaggcctttctgagtgatcaaacacttttgatgtttctagctgcytctgatgtttatgggacaggtacagtttttgctacggttttctgcatgtttcattcattcatttattcatccaaccaatatttatttaatgcttatgtcatatcaaccattgtaccagggtttgggtttattgctgacctgaacaatgaaaaacacagttcttgtgctaatgcgtcttatattactgggaatccagacaaatcagcaggtcacttatagcctcctgcagcggatgatgaggtgattccctgagaactcagagcagggagctcagtgagatcagagagtctttctggaggacacggcatcctagctgatatctaaaaaatgagtaagtcttagcctgaagaagtctatggaatgttctcagcagaggagcagcctgtgcaatggtggaagcttgagccttttccagagtggttgacaacgtgaataggagttaagaaactgggaagtaatatagaactgtatgttctggaactaatgatgccaagtcatgtggtcagctattacacattgttctggatcaaggtgagaatcattaggctttctcccgactgcctgtcttagagagtgtgttggctccacataggataaagtgaaagaaggtagtaaagtcaattcacattaatccccattccttaagcaaacctcttggcttcctgacattatactgatattggctcagttgtaattcatttattatatatactactgcatttatgataatattgggtgaatgtttttaaaaaaactagatagtagtagaatttgtttttatggcttccatttattgaggatgacctatgtgctggcattgtaccaaggtttttaaaagggttcatatttaaaccctgacatagtcctgtaggggaggaattattatatttccattgtgcagatgagggccagacagtccaagagatgaagtggcctgctctgggatgcttgcctaagaaggattagagcagggttcaaacctaggctaagaggataggcacagaaccccaatacttgagcttcagagaaagaacacagaggtatttagcacatgatgaaaggagagttattaatggatcttttcagagtcctatataattaattttaagataacgaaaggattttaagagataaatggttaaatctcctcagctggctggcagctggctggcatcatgattagagagttttgtatgtggtgtattttgtgacagataatgtataaaatgttatactattccacatcatctacttaatatgacttgttttagtaagaatgtaattaatccccatctttctttgtataattgtattgtagctgtcaagaactaaatgttctagaaattttgcttgaagtcatagaataaaaaggataattatatagtaacctttccccggtggaccaacctagttggaaaaagtaatggtgaagagccatagctacaccatgagtggagcatgagaaaagaagacccaggcagaggtgaactgtgtattagtggggactccaaagtacagcagaaacatcacagtaattgaagcaggtgacaaggagaggcaaacataaaccattcaagtaatggggtggagaaaatactgagtaaaattttaacatgaaattaaaatccagtttatttctagtagcattatggatggatcaaatattctaaaaagcctatctctaaaaagcaaaacactaaaaagcctggataaaattttaaaaatacataccattttaattgcatggctgagctggcaagaaagtaagaggaatccttagagatatgaaatggagagaaagcaaggggcccaagaggtaaaccagtatagaagctattagcttccattggggataggtgctgatttctggcgacccagaactttgaatataaaggctgcattctggaggcaggaaataaacacagggcttttacaaagtggggagtaagactgaagctgccaccaaatctagggcttttaaaaacatgacccaggggaggaaaatttgccagggaaatttgccttttcaacttgggcactggtagtgggaagtctttcttgagaatctgtaattatagcaggcactcatggggctaggggctaagttcatccttctcctgaggtccagaaaaaaatagagaaataaaaacacttcaaactggaatttaatttaaaggggtcctggactgacagcactgctggcctgacagaagtagatgcaaatggtaattggagaaacagacccttattacaggccttagagaattcccacagttccagtcccagtaagctcctagtcaccaaatcataaaacttatcaggaaacaaggcacttccaccaaaaactatacacagcacaatggatctgcagacttgacaggttagaattatcaaataccaaacataaaatagccatgttcactgttttaaatatataaaagatggaatcaatggtatgagcaagaaagaagcaaacaaacaaaaaacacctcaaaaatgaagcggatttgtgggaaaggagaaaaaggccccagaatgagtggcattagaaaatattagaaaattgtacmtgtcaatgaacacttgcggagcctcagaagcatctccatggatcaggggtttaccttgttttggaagatctttgttgagtcttttgcaccatttaagagcacaattatttatttatttatttatcagaatgcctttcctctggaagaatctaggtgatctcattccttgaagtataggaaaggtgatggggcatgattctagcaggtttgattgctcaaggaagtcaggaattccaaagatgttttgaagagatttaacttcatcattgccatcatcatcatcatcatcatccccatttatacttattaggggcatactatgtatcatgcattgtattgaaaatataatatggattattttacttaaacttattataatcttattacataattactattagtagccctatgttacaagtgcgataattaagccttagcgggggtcaatggtttgctcaagattaagccttctgagcacacatttctgaatgttgttgcctctggaagctgctcagtgtcctctctttgaagcagagcagccagtgtcgtatcctgaggagtctggggcattgagtgcagtctctcgcccatgtctgtggaattggaggtgccatgaactctgctagggtggtatcaaggagtggagctctctcacctgtatttgtgatgtcccatgcatgacaggcctcccaaggcaggagccagcagagccagaggccaatgcttggtcctggagtccagcctgatccaacccaggcagagaagtgagagagtcaaggtctgcagtcaaaggagaaagtgcccaaagcaaggaagaaaggctgggggcttggagaaagccttgagtaaggtaccaattgtggtttgactgctgcctgtgcttactatggccacaggcagggttatgccgttaactaaattgtaatgggcaaagaacagtggctagagggctttttccagctaaatctagattttgatgtagaaaatctgaagcatgaatatttctttaagttgatggggaaggactttagttctgattctctgcctaagataaataaacgaagaagctttattatataacaagataaaatgtttgaaataaggacatttgaaatcagattttttatttcctggtagaataacacacagtattttctaggaaaaggattttttaaaaaatcagttcttatcttcaattagaagataaataatagcattgtgttgaccatgtattacccttctgatgtcttctggatcttgtggggaatatgaagttagttttctagttgtttccagaggagaatgtctgaaagactttttttctcttcgaaagagttatttaaaagtaaaactttaaaaagttgttgctcatttgttaggggttcggcttaaattccttattctcataattcagctttaaaattgataggatgtgtttatatatactaatagggagatgccatatatatatactgtggagaaaagagcaagttttagaatatgcaaaatatgatctcatttttaggaaaagattacatatcaacatacataaataaattatgcatagagaatttctggaggaatacacttaacaatgattacttctaagagcagtattgkggatctagggtagaaatgggggagaggacttccacttttcaattcatactattttgcattatttgaaattttgctgtggtcatatattgttttctaatctaaaaattaagaaaagtttcagaatattaaatttcaagccatatctgtcatagatgtaaacgtttattccttgcacgggagttttgtatatgttttcttcttcaaaccaatggaactcttaggaagggtaggaaactaaagcatgtggtcccacaacattccaggcactaggggttatgtctgtctctttctgggataaagaaacagaccacttccaacaatcccgttggattttacttcttagcagatttatacatgtggagagtttgattttgtcattcttgatgatattggttgacctttgtcctgagtgtgtgtgagtgtgggtctgttccactgccctgtggtgttgtgcctctcactgtttcttggcactctctgggttgctatttgtgtattcatttaatcatttatcatttatttacgaatcactttccatgtggcacatactgtgcttcattcttgaatttttttttttttttttttgagatggagtctcactctgtcgcccaggctagagtgcagtgccacgatctcggctcactgcaacctccgtctcctgggttcaagcaattctcctacctcagcctcccgagtagctgggattacaagtgcccgccaccacgcccagataattttacgcatttttagtagagatggggtttcaccacattggccaggctggtctcgaactcctgacctcaggtgatccgcctgccttggcctcccaaaatactgggattacaggcatgagccaccgcgcccggccgaattttattttcttactgtttacttatgtatttttgtagagacagggtcttgctatgtcacccaggctggtcttgaacccttgacctcaagtgatcctttggcctcagcctctcaatgtgctgggatttcaggtgtgagccacgacacctggcctcatacttgaaattttaaaggacaagtgatacacttatagaagcttgtaattttgagtaagatagacaataacatgatgtgaccagtgcaatgatatggacagagttctaacctagcctgcatgcagggctggagggtgaaggatgactgatgggaatacagattaaccaagaaaagggttggggatggggtgtcctaagcacaggggccacactaccctaaagtatggaggtaaaaaataacatggaatgtgtgttaggcatttgtgtcgctcacaaatatttccatttgtcctccatctggacacgtgacaaattgcacttccctgcctccttgtggttcatcaaggttatgcaatgtgaggagaaatgacaaatgttttttctgggtgagatcatttaactatgggtgtcaagttctccagagcactcttcccctggcctgggcattgtaggagtatcttgacacagagaggtattacttagccatagtatggaggagagctggcctaaagagttgcctggactcagagaagaggtgacgagtgaaaaatgtacatttgttgtgattttggagttgtttgtgaccagcccataacctagcttctttggaccagtgcagtatacgagaaacaaaaagcaggtggaggcagggagtcagcaatgaggctggagcaaaacgcagggtcagagcagggaaggccttgtcttccttcttgggacagaacattgcccacttctcacaatcacatcaggttttatttcttagcagatttagaagtacagagaattctattttgtcattcctggtgatgttggtccctctttctctatttgtcctaacttttcctctgttctaacattctctgctccaaagggggagaaggacaaactggaaaaatcttttaaaaaatcttcaagaggcactatgtttcttcagggatggctcctgggggctgtgcaaggaaacaacactatgaagtggcatgtttaaaatccttcctcctggcctttcatcagtgagaatcagggcagcagttctctcccttcatggtggttgactccctcaatctagcacactgtgcagaaagtttggagtgcctgatctcttctcctgatgggggtacaccagctgggggttatgcaggaacaaggcaaaggtcagggtgcctgaggccaaggaagactgttttgaagttgtatctggagagtgttgggatcaaagctaaaaaattcaagttcagacttgagttgggaagagtagaggtagaagcagatcacatggaaaatagtatccaggaatggagacacatttagacagtggaagagacaggaaaacagtgagtgtgggcaagtggaaagccacctaaattaagtacagaggtagagggtgagtatatagtgtatgtttctgtgggagaccccacttcatttaaaggagccacgtttgagcagtcatagcagtgggacttttcgtttagtacagtctctgttttaggatgtcttagcttattttctgttgtttgtaacataatacctaaaactgggtaatttatgaggaaaaggaatgtattacctacaattatggaggctgagaagtccaaggttgaggggtcacatctggtgaaggccttcttgctggtagggactctgcagagtccccaggtggtgcagagcatcactcggtgaggggctgagcatgctagctcaagtctctcttccttttcttataaagctaccacttccactcccataataatctatgaatccattaacccattaccccactaatccattaatccatgaatggattaatccattcatcagggcagagccctcctgacccagtcttctcttaaaggccggacctttcaatactgccacactggggattaaatttcaacatgagtttctgaagggacagacattcaaaccatagcacaggaggataatcaagagctcattatgtccagtggtctactctgctatgctgaaatggctgggtggatagagtaatgtcaacatccttgtcctttggaatccatggttcagctagttagaatcaactttaggggaaatggaagattgaagaactgtaggaaattgtagccttggaagtgttcatagaggaattttcagcatggacagaagaggaagagatgaaggggtgtgtgggatttgggggtggtggataaggaagtggcattgttacatcttgctacagattttgatctctcatactgaccctrtgtgctttcacttcccatcagctgtcacaggacacagcaattaaggacccaactccttgtttccctgaattgtgcaataacctcattgttcacaactgctggttatctggttttgtttaggatagcaatgctttcagttgagatagttgcctcccagcctctcttcgtgctatgatggtcaggttacacagccctggccagtgagaccaaaatgaaatttcttgcaggtggcacctggaaaagttcttaaaaatggacagacttggttggcattatcttttgccttttggccttttgcctgtcttcttgcctggaacatggatggtgtacctctttttgtaggaggcatcttttttttttttttttttttgagacggagtctctctctgtcacccaggctggagtgcagtggcgtcatcttggctcactgcaacctccgcctcccaggttcaagcaattctcctgcctcagcatccttagtagctgggattacaggcgcccaccaccacacccagctaatttttgtatttttagtagagacagggtttcaccatgttggtcaggctggtctcaaacccctgacctcgtgatccacccgcctcagcctcccaaagtgctgggattataggtgtgagccaccacgcccggcctgtaggaggcatcttaaggccacaggtaagtcttttaaaaatgggaatttagaaggatgttgggtcctttgggtcgttgacagtattgtagagtaagtgactatacctgtcctggcctgctgaccctcagaggaaaaccttatttatttaagccagttagtgaggctattatattcagcccaaaaacattcctatctgatatatactcacttattctacagaattaattgctctcatttgccatgccataatgaattcttgccagtcctcagctaactaagaccttcaattaattagattttctttcctttgcctctctgtatgtggacagctattatggaataacaacactgagaccgtgtagcctttgtaatcagcaaagaaaattctattatagtctgtataccatacttatctaagtggatatctacctaatatattttagaaagatttttcacattaaggagcaaaacatgaatcttaggattcaaaaaagaaaatgatcttactccctaagtattactcttaatctgatattttccacataaatattggttttaaaatttaaaaaacagaacaaactcatgttctttcaacctatgtgacatgtgaggtatgaagtttaggaaattacctgtatgactaaatcaaatttaaattataaacttcagagaaagaagaaaaggttagaagcttcgcatcttgtctaaggtttatagaatttattcacttattaaaggatataaagattacctacctgctgctttctcaaataaatatctgtgaattagagttggtcagcatacatacatatgagggtgtatctgaattaaaacatttgaaaatgaaaagttagagacagcagaagaaggaaacagtgtccatccaacagacctgagtgatattggatatggaaattagccagacctttcatgattaaagtatttacgaatttaagtagtcaactattacagacatgaaatagtactgagaacagactgggggaacaaagagcaggtagaccctattgtctacacctgccatatcctatatggtaggcaatagccatgtggggcttttaaaaattggaaatgtgacccatgagaattatgatgtgctgtcagtgtaaaatattcactagatttaaaagaatttatgcaagaaatagaatgcaaactatctctctaataattttatatgtggaaattatatttaggatatgttgtatgaaaaaatatattattaaaattaatttcacttgtttatttttacttctttcttttactagaaacttcaaaatacacatatggctctcatttgtggtttatgttgtgtttctcttgggcagtgctggtctcaaccaagtaattgaaacattctcagagatacagaagaaagtcagtgaatagaaagcactgttcttgtaactgaagaaaaattgaactgagaaaagctgtcacaaattcttcaagaatctactttctagaattttgtctctatagagtctgttatctacagaacagcctgagtgagcactaaaaaatatgtcaggccaagtcttcccctgctcaaccctccagggctttcttagaataaaacaaaaggcctcatagttgcctgctgggccctgtgaggtttggcttctgaccactttggaatgtatcacttccctttccccttgcgtgtgtgatgctggccacactggcacttttgctgtttcatgatcatggccacatggtgttccctgtgggcctttgcatgtaggattctcttcctcaacatcttcacacagctccctctttcacctcttgcaggactctgctgggacagagacctctcaactcgccatcacaccttaccccctccctctatccctgtaattgtctacacagcaccgagcacggcctgaaatcaccaaggatgatgatttgtttccttgcctttatcaccatcctatcactattgcctcgaagagcagtggaatgtagtaggccctcgacttcaataaacacatcaatgaatacatggatgaaataagtttaagtgaagcaaacaaaaagggaaaattattagaaggatatacatcaaaatattagtaagacctatttctgagtgatgagagtatgggtaactttaattttcttctgttttctacccaacggcatatctcatcttcttcgttatttagagagctttattttctttaggcagtccctctgctgcacgcagtcatgtttcactaaaccactcaggattgttttatattttgtatattttatatttctacctgtgattcgtttaagaatgggtatgtgatgtatttcttaccactgcgctatgagtggagggctgaaaaggccatcttggaaaggtttcatttcttaaaaagcgatgcttatgaagaaagtttgtcagagttttgctggtcttggtttgtatgtgatgtttgcaactgcagcagccatattgtggtcctggggctgtggggcccatgcactgaggatggcagagtaaaaagatggaaggaaaccaagtccctcaccgtgtcattgggctgccaaattaactatttcagatctgtcctacttaataaatcattcttatttgggccattttgagttgagttttctgaaaaatttttccagcaaagtaactatatatctgactgatgctatgtcataacaaaattcacatgaagcagcctccaaattataaacctgtcagataaaactgcagaagtcataataagaggtactattgtagaatttctccccaaggaacaagctggtgacgtaattaacacaaaatgagtactgagtactaagggaactgacaactccaataaagaagaaatactttgaatgatcaatatatttatataaaacttgattgataaatataacagaaaagtggaaaaagtagaaagctgctccccttttcatgtaatctgtgctgattcagacacatttggagtctggagttcaattctgtaaaaaattgatgccatcttctgtggraaattctgatggtatcatttgagctcctggatcaagatgggcctgaagataacctgagcttttttttttattcagtgagccattatgtttgccatcttgcttattcctgcttgagcttagggttatatcatcgctaatggaaaggacctaactgaacagaggatgtgaaaggaatgtatcacaaatgtcagcagtcatatagttggcagatcggaaaaaaaaatagccttattttcaattgctgtaaaagaagaacacctctgcactcccatgtttgttgctgttgttattcacaataaccaagatttggaagcaacctaagggtctatcacctgacaaatggataaaggaaatgtggtacatatacgcaatgcagtactattcaaccataaaaaaagaaggagattctgtcctttgtaacaatatgagtggaattcgaggttattatgttaagtgaaataagccaggcacaaaaaggcaaacatcacatgttttcacctgtgggatctaaaaatcaaagcaattgaacatagagagtagaaggatggttaccagcagctgggaagagtagtgggggttggagagcaggtgaggatgattaatgggtacaaaaaaaaagaatgaataaggcatcctattcgatagtacaacagggtgastatagtcaatagaaacttaattgtacatttaaaaataacttaaaaagtatcagtagattgtttgtaacacaaaagataaatgcttgagaggatggacacttcattgtccatgatgtgattattatacattgcatgtctgtattagaatatcctatgtacctcataaatatatacacctattatgtacccacaataataaaaaaaaagaatgacacctatagaggaaaattcattaaaaggagcattttttcttgacttaatgtagaacttttaaacacttgtgactatcccacagtgtagctggttgcttcaagcagctgcgacttctctgtcaatgtatgagtttgaccgaaagcaagggatgctttaaatgggtatttctatactgagttactgtcagggtttctgagtttttcccaactagaaatttcagttattcttcaactggaaatggaaaattgggattatatgagaagagcatgtgtatggatatactttgtaaatgattatgtgtgtgtgtattggttaagaggaagctctggagtgagaaaactcatgttgaaacctagttttgagctttattatgtgatgttgggagagtaaacctttctgagcctcagtttcctcatttgtaaaatagggatgataataatatctagagggttgtaaagactgaatccagtgctgtagataaacttttatcccagaccctggcatgttacatatgctcagttagctagtatttaataaaaacatgaggcagaattaattttgttcttgttctgcttttagtaatacttattctgggcataaaaggaaaatatataccatgtttcattaaacttagacaaagcagttgggtttctgggtagatacatgtgtaaaataatatgacgccctcaccacacacacacacttagaaatggacggtaagtttattagctacaattttaaattctggaagatttttgctttattttaaagatacgtcatgtgaaaagggactacaaggaaataggagataaatagcagcatcctttgaaccgaacttgtgtggttttttaatggctaatatgttaaatgggagaggtagaagagaagaaaaatctccactcttattgataaattttttatttcctagaagaaaagtaagacattgaaattattagactataactaatggctcatataggctactactattgaatattatttacatctattataatgattccattttaaaagaaaaacatcaaaaggatatgaggataaaggattagaatgaaagatgataataaataataaactctatatctaatgactatttgcttttttgaaagtattaagtaagagtaaaaattatgctgctatgacctagggttttatttttagaaatttgactactgtctgaatatagtacgcttaataaattttatggtaattttgtcattgattttctacttcaactaacttcctaaatacttgtatacataaatggcttatagttctgaccaaaagggatttttttcctaaaaaaaaagttattttaaaaaatttaccttgaaagttaggtatcttttacttttttttccctctatttcctttcccttttaatctctcattttgttataggatttttgggttgtcatttctctggctggaaacctctgtctggtggtgcstttgcctgagttttgcttggggctgctgttcttgttctgcccactcggcctggcaggctgcacttggcttgtgctaccagcctggatcccacaccttcaagggagattgtgagtcaggtgtggagtggtgaggggtgtgtgagtgaatgtggggtctggccactgcacagtcagacatgctggctgctgccatggggcaggcagcyccaggtgctggcatgggcgtcagctctctgggaggctgtggctggaccaggcacactgcaagcagcttccctggctggcattggggaatgtggtggcacccagaagcttgaggacaccaggaatcacaggtctcaaagagggagtcacagccctggctcagggagctcctcaggtctggtctccccaaagggccacagctcttctctccttctctttgcctgcaacctggtgagcagtgggtatgtttcagccctgtttgtgttatagcagctcttttagcctcgccatttggtgggtcctgagttattgttctgcaaacaggaagaatgaggtatgcggacaagtgaagggtgagcaagaygaagaggagctttactgagcaatagaacaaccagcagagacccacagggtgcagctcctttctaaggccagggtgtcccattgagtgttcagctcctagcagagagggtagctcctctttgcaggcaggtcttcccaacaagtgtttggctcccagcagagagggtagctcctgtctgcagctggtcatcccgatgagtgttcagttctcagcagagagggtagctcctttctgcagcttgtggtcctgccatcccttctgctctggctgagcctggggcttttatgggcctcagatgggaggaagtgtgtgcccattagtccatgggtggccatgggtgggtctgaaaaaggcaccacaagttcccatctcagtccgtgtgggactggcagcgtgagccccagtcttcaggccctccctggcccgaaggtggggcctcactgggaacccaccgccttctgcccaggagcctttctgcctcctgctagggtccatggcacccaggctgcttgggccaaggggcacctgcaggccagtgccgagctgccctcagcacccaccttggcttccctgcagtgcttgttggtgcccaatgtctagagagggccagggcgacagggggctggcatgtcagtgctgtcctgagtgtgagcacacctggctgggctgtgacagtgcccgggctcggccccaatcccgctctgagatgggagcaggcactgggagtggggagaggccaggcagcaggagcagacaacccaaggggttggtgggccttctgggcccctgaggatacagagtcagagaccccaggtcctgtgcctgggagggtgggagccccgccctctccatggagcctgcaggcagcccaggctatgcctccttgcagcctggggtgggkcctccaggtcctctctgggctcctctctgcctgcccctccgtgcccaactgtgctgctccagtgctggcaggtagctcggctcagccctgtcgcagtggcccccagggcagcaggctctcagagggtccctcttatccctggctccctccagctccatggagygcagcaccatcctgggcccagctctgcctccttcccgtgccctccctgcaggtgccctccccgcaggtgcggtatgctagaatggtcatgctgggccagggcttcagagtcctggaggctgtgggcctgggggcaggttccgtctggctgcgcaagggtgggtgcagagcagtcagctgccttggggatgcggggcacaggggtccagccactgccactgctgctcccgcagcggctcctgctgccaccactcgcacctccttgctgcagccagcgtgatggcagcggctgctctggactgcctgctgctgctgtcaattttgttgcctgtaaaagggattttcagttttatttatttttgtcagtaatttaaataataatagttttatttttgtcaataatgtttgttattttggcaactggttttgctgttaaagtttttgctttggattttggaatctaattttttaaattccttttctaggttggaatatataattgattttctaattctaaaaattcttttgttcatttatcctcatggctattttaaagtgcatatttggttatagttgtaaagtctaaagcttattatttaaactttaaaccaraaaataattttgataagtatataaggatttgtattttactctattttagtggaaatatatgaacatttgtgataggcctcgatcagataagcaatttaattcagaaagaaaacacattgaaaatatgcatacatatgcacatataacatgcatttaaatattaaacacgtttgttagttgattgctttgggggaagattaatggaaatgggcaaattaattaacaattatcaaaagtaatgaataggaaagagagtatagagtaaatttaatcccaaactttccatacgacttccttaagaaagagaaatggtcttatcaaagtatgaaatatggagacaaatgtcttactcaaagcttacccaggtgccacagttttatatgcttttaaaaacttgaatatggatggatttagattactatgcatggtatccttacagttagaagtaaaatgtttacattcaaataattcagcaattgaggaaatttgaggaagctcttcttttctgcaaagatggctctgggacacacacccttagtaattgcaggattttttttggaacgtagtgctgtgggctgtagtaatcaaagtgttcttggctagtgggaggaatcatcagtactgtgctgtttcagtggtaccttctgtaactgaacacgagccttggccaacaacattcttccttttcttcaaaggccaactgaaggactgacagccactaagttttagggttcacattaccgaggaagaagttggagttgttttattctttatgtttgatctttctcatctgaagtgtggatttcattttgtccttgattggtggacatgagrataagaatgatgtgaatatcatttgaattcatttatcccattgcttatttattactggataaatgaatgatggcaaagtcccacaatttaatacttgcagttttaaaaaagcatgagggagctcttgatgcactagtatggaagtatcttgaggatatattaagtgaaaaaagcaacatgcagaagagagtatccagtatgctatcttacatttaagaaagagggagataagaacatatttgtatttgcttgcatttggacaaagaaaagatgaagggcacacaagattttaataaaagtgatacatattggaggtgggggatgaagaggatggaaacagaatttgaagcaaggtttctcaatatatgccttatatatcttcgaagtgtgtgaaaatgtttcatatttgatgaaataaataacattaaaagaaagatcaccctggatacctgaggataatgggttaggaaggagaatagtagttgcgagggaaccaatttagaggctattgcaatacttgcggacagagaatgattcttaaatgatggcaatggagacagaaaagtagataggttttagagatattgaggaggtaacataggcagagctgggttaagatggtgaatgagaaggactcttagatttctgggacagactcactaagttggggaaatggaaggatgttcagttttgtggagatgatatatttggacatgtcgagatggtgccagacttatagaagtgtttaataaaaacttgttagaggaaggagtgaataagacactttaaagatacccaagtagagatgtgaaggaggcagtcgattcatgggtctggagctccaaggggaagtcttggctgggatccaaattttgggataatctaagaagcttccacctttactgcttggaaaactccccctgggaagccagctgatacataagaagtctgtcgtgctctgaggaagcctaggctaactatgctaagaaggaaagcataattggggaagcactgagaatgtgagtgaagcatcctacagcccaaccaaataccagctaaatgcagggggaattttccaagcagtaaaggtggaagctgcacatctcttaagggtcagcctcagaagtcacatggcatcacttgctgtactctctgttggtaaaaacaagtcacaaggccagcccagaataaagagaaggagaaaaatttatctatcaaagagggatggcaaagaatatatggccatatttagtccaccacagctcattgggagattataccgttaggatgcatagaactttctcccaacatttacttaataaactaagaagctaacgagaattcatagtgcaaagataatttgcaaaaatttcagagaaattgaatatggttgaatcagctgttaattccaaacttgccaagttcatgaagagatttatataaagaaggactaattggcagacaaatgaaattaatggctgaaattataattttaaagtagggtttacccctaggccccacctaaccagggagctcagccagcaaccccacccatctgtggaacccagcctatgaccccactgagcagagagccaatccagtagccctattcaattgaggaacaaagcccgtgacctcatcccaccctgcctggccatggagtccagcctaaggctcttcccaattgctgagcacagcttgtgggtagagtccagctagtagccccgccagaccagggagcccagccagtggccctgcttgacttcggatcccaggcaggaaacccagccagctttagagtacctgcagtggccccactcaactagagatcgcaacaggaagctctgtctgtctgtcaatgctaccagttggcctgtcaagaaccatagrctggactgagtagtgaagttctttccctgccaaagtgaacctataaaggtttgaagagatgactgtagagttttatgtgcagtggaagttaagttgttatcagcttaaattagggtgatgctataactataagatattttatgtaatccttatggtaaacacaaaggaaagacctgtagtagatacacacaagataaagagaaaagaaagtataccaccactacaaaaaatcttcaggttacaaaggaagacagcaagagaggaagaatggaataaaggaactacaaaacaggcagaaaacagcgaacaaaatggcagtggtgaatgtttacctatcaatatgtaatttcaatgtacatggattaaattctccacacacaaaagacatagaatggctgaatggataaaaaataagagccaataacatgctgcctacaagagactcacttkagctttaaggagacacatgggctgaaagtgggatggaaaatgggatggaaaaagatatttcatgcaagtagtaccaaaagagagtagcagtggatccacttatatcaaacaaaatagactttatgccaaaacaatcacaagagacaaagaaggtcattatgcaatgataaagaggtcarttaatcaggaagatacaacaatttaaatatttatgcatttaacattggaacacctaagtatataaagcaaatastaatagaatagaagggagaaataaacagcaatacaataatagtaggggacttaaatatcctactctcaacaatgaataaatcatccaagcataatatcaataaggaaccccagatatgagcagaactgtaggccaaatggacctaacagacatatacagaacattccacctggcagcagcagaatatacattcttctcaagcacacacagaacattttccaggatagatcatatgttaggccacaaaatatgcttcacaaattcaagaagattaatatcatatcaagtatcttttctgaacacagtggtatgaaactggaaatcaatcacaatagtaaaagtggaaaattcacagctatgtggaaattaaacaacatagttctgaacaaccaatgggtcaaagaagaaatgtaaagagtaattgaaaattctgaaacaaacaaaaatggaaacacaacataccaaaactaacaggatgccatgaaagtatttctaagagaaaggataggaataaacacctacatgttaagaaaaaaagaaagaacctaaataaacaatgcaactttatatgtcaaggaattatgaaatagaaaaaggccaaatttagcaggaggaaggacataataaagatcagagcaaaaaaaaaaatgaaatagactagatgaacagtagtaaagactaacaaaccagagctagttttttttggaaaagataaatcaacaaaccattaactagactaagaatgagagggaataattaaataaatcagaaatgaaagaggatacattaaaactgatgtcacagaaatacaaaggatcataagagactatgatgaataattataaagtaactaatagggatacttctaggggtagcctagaagaaatgggtaaattgctagaaacatacaagctatcaaaactgaattaggaagaaagagaaaatctgaacagaccaataactagtaagtcaattgaatcaataataaaaaacctcccaacaaactaaagtccagagccagatgacttcactggggaatctacccaacatttaaggaagagttaatgtgaattattctcaaactcttccaaaargttgaacaggaaggaacacttccaaatccattttatgaggctaacattaccttgataccatagytggatgaggactgtatgagaaaataaaattataggccaatatctctgatgaacatagatgcaamaatcctcagcataatattaatactagcaaaagatggtccaatatatgcaaatcaataaatatgatacaccacattagcaggaggaaagataaaaataatataattatgtcagcagatgaataaaaagcatttgacacaattcaacatccttttagttaacatcatactcagtggtgtaaagctgaaattgttttctttaatattgggaataagacagggttgtccactcgcaccacttctgttcaacatagtgctggaagtcctagccatactaattaggcaagaaaaagaaataaaaagcattcaaattagaaaagaagaagtaaaattgtttctgttttcaggtgacatgatgatcttatatgtagaaaactctaaagactccactgaaaaaaaactgtaccaaaactctgccaaaaactaagaactaataagtgaatttagtaaagttgtgagatacaaaagcaacacatacaaattagttgcatttccatagagtaataacaaactatctgaaaaagaaagccacagagtgatcagacaacttacagaatgggagaaaatttttgcaatctacccatctgacaagggtctaatatccagaatctacaaggaacttaaacaaatttacaagaaaaaaacaagcaaccccatcaaaaaatgggcaaaggatatgaacagatacttctcaaaagaagacattatgtggccaacaaacataggaagaaaagctgcacatcactgatcattagagaaatgcaaatcaaaaccacaatgagataccatctccagccagtcagaatggcaattattaaaaagtccaaaaacaatagattctggtgagcctgtggagaaataggaatgctttcacactgttggtgggaatgtaaattagttcaaccattgtggaagacagtgtggcgattcctcaaggacctagaagcagaaataccatttgacccagcaatcccattactgggtatatacccaaaggaatataaattattctactataaagacacatgcacacatatgtttactgcaacactatttacattagtaaagaccaacccaaatgctcgtcaatgatagaccggataaagaaaacgtggtacatatacaccatggaatactatgcagccataaaaaagaatgagatcatgtcctttgcagggacatgggtgaagctggaagccatcatcctcagcaaactaacacaggaaagaaaaccaaacactgcatgttctcactcataagtaggagttgaacagtgagaactcatggacacagggaagggaacaacacacactggagcctgttgggggatggggggcaagaggagggagagcattaggagaaatacctaatgcatgtgggccttaaaacctagatgatgggttgataggtgcagcaaaccaccatggcacatgtatacgtatgtaacaaaccttcatgttctgcacacgtatcccagaactcaaagtaaaatttaaaaatgactaagttttatctatgcatcttataaaaaaagaaataaaacaattccaattatagtagcatcaaaaccaataaaatccttaggaataaatctaaccaagaaggtgaaagatgttaggtactgaaatctataagacattgatgaaggaaattgaagaagacacaaataaatgtctagataccccatgttcatggagtagaagaattcatattgttaaaatgcccataaaatccagcacaatctacaaattcaatgcaactcctatcaaaattccaatggcatttttcacagaaacagaaaacaatcctaaaattcatatggaatcagaaaagaccccagacagacaaagcaatcatgagaaagaagaataaagctcgaggcatcacatttcctcatttaaaactatattacaaaatggtactgaaaacaatatggtactggcataaaaacagacacatagatcaatgtaacagaattgacagcatggaatccatggaaacctccacatacacggtcaacttataatggacaaggatgccaagagtgcacaatggggaaagaatagtctattcaataaatgatgctgaaaaaactatatccacatgtaaaagaatgaaatccaatccttatcttacaccactcccaaaaattaacttgaaattgcttaacgatttaaatgtagtatctgacaccataaaactccaagaagaaaacaccgggtaaaagctcctttatatcgatattggcagtgatatttttgaacataacaccaaaggacaagcaacaaaagcaaaaataaacaaatgggactacattaaaataaaaaccttcttcacataaaaggaaacagttaacaacatgaaaaggccatgtacagaatgggagaaaatattcagaaaccatgtatcttatgagaggttaatactcaaaatatttaaagaacccatatcactcaacaacaaaaacccatataattccattaaaaatgggaaaaggacctgaatagacatttttccaaagaagacatacatatggacaacaggtacatgaaaaggtgctcaacatcacttatcatcagggaaacataaacagaaccacaatgagcgatcacctcacactttttgggatagctgttatcaaaaagacaagaaataacgagtgttcgtgaggatgctgagaaaagggaacccctatgcacttgttggtgagaatgtaagttagtacagcctttatggaaaacagtatggaggttccttaaaaaataaaaatacaactaactgccatatgatccagtgcttctacttctgggtatatgtccaaaggaaatgaagctagtatgttgaagagatatctgcactcccatgttaatagcccactatttactatagccaagctatggaagcaatctaagtgtctgtcaagggatgagtggataaagaaaatgtggtatatatacacaatagaatatttttcagctacaaaagaaggcaatcctgccatttgcaataacatagatgaaccttcagggcattatgctaagtgaaataagtcagatagagaaagacaaatactgcataatctcatttgtttgtggaatctaaaaagtcaaactcagaaagagagagtagcatggttgttggcagggggatggggatgtgggaaatggggatatgttggtccaaacttttagttgtaggataaggtatgggaatctaatgtacagcatggtgactatagttaacaatagtgtattgtatacttgaaatttgctaagagagtaaacctcaccacacacacacacacacacacacacacacacgcatacacacaaaatggtaactatgtgaggtaatagatgtgttacctcacatagtaacacatctatgtggcccatagatggccacacgcttgtgacgaggaggcctgattgcatccttaaagacatctacatgcctggaaagatccagaagcctccttcactaactgaaacacttgagttaaaatcctggaagagtccatcagagttccattctgtacctaactttactgtggtaatcatttcacaatatatatgtatattaaaaaagagaaagtgataaggtagaaacagtccaaaaagaaaaaataaagctttgcagtattttagagtaattctttaattttttgaaaactgtctgtgctcattatgaaaattcaattataaaaaatatgaagaagaaaacaaatcatctaaactgttaggcagaaaaataaaataaataacatgtagtaagtatcattttagatgtttctttatgcttatgtccacttaggaggatggctggctagctggttagttgattcaatgacaggtagatagaaagttgattgattaaaaaatttataaaaatgatatcacactatacatgttattttaacaaaatattaaaactaagtttacttgaatttaaaacaagaaaaataaactgaagtagaactttcagtcagagctactattttttcatttaatttttttgacacataataattgtacatatttatagggtacgtgtttattttattttatttttttgagacagagtctcactctgttgcgcaggctgcagttcagtggcgcaatctcggctcactgcaacttacacttcccgggttcaagcaattctccctcctcagcctcccaagtagctgggattacagatgcccaccaccacgcctggctaatctcctgtatttttagtacagatggggtttcaccatgttggccaggttggtctcaaactcctgacctcagctgatccacttgccttggcctcccaaattgcggggattacaggtgtgagccagtgcgtccagcccatattgatgttttgatacatataatgtatagtgatcagatcagggtaattaacatatccataatctcaaacacttatcatttctttgcattgggaatattttcgataccctccttctagctatttgaatctatatatgcattgttaactatagtcatcctacaatgctatagaacactagaacttgttcctcttatctagctttaattttgtatcctttaacaaatctttgtatatcgttctttcctcctacccttcccagcctctgttatcctctgtcctcctttttactcctatgagatcaactaattttagagtgagaacatgtggtgtttaactttctgtacctggcttatttcacttaatgtcttccagtttcattcatgtttctgtgaacaacrggctttccctctttttatggctgaatagtatttaattgtgtatatacaccacactttctgtctccattaaactgttgttggacacctaggttgattcaatatcttggctattgtgaatagtgctacaataaacgtggggatgcagatgtccctttgatatactgatttcctttcctttgtacagcactaattttaagaggtatctgttcctgaaagattgtgtaaagattatgggaaaatatgaaagccatcaggaggttggatttgtataaactatatgttacaattttaaaatgttacaactttaggcagtatcagttgatctctactttgaaagttgaattgattagtgctctaacactgtatcctaccttgcttccccccagctcctgattcttgtggcttatattatttttactttgtaaaatttacattctgttatgctaatataattcccataggtgttactgttgcatttaaacaagttcagtaatagccattgtttccctggttttttttttttttttttttttttgagacagagtctcgctctgtcgcccaggccggactgcggactgcagtggcgcaatctcggctcactgcaagctccgcttcccgggttcacgccattctcctgcctcagcctcccgagtagctgggactacaggcgcccgccaccgcgcccggctaattttttgtatttttagtagagacggggtttcaccttgttagccaggatggtctcgatctcctgacctcatgatccacctgcctcggcctcccaaagtgctgggattacaggcgtgagccaccgcgcccggcctttccctggttttaaattcttcattttgattcatttttagttggatggattttatttcctcccccaaaatagggtttatgggcactttactcttcaagttctttcatgtttgagaatgtctacttcttagctttataatcttagataacaggcataatgctatttcacttttttttttttttttttgagacagagtttcactcttgttgcccaggctggagtgcaatggcacgatctcggctcaccgcaacctccacctcccgggttcaagcaattctcctgcctcagcctcccgagtagctgggatgacaggcatgtgccaccacgcccagctaattttgtatttttagtagagacagggtttctccatgttggtcaggctggtctccaactcccgacctcaggtgatctgcccacctcagcctcccaaagtgctgggattacaggcatgagccaccacgcccggccgctatttcacattttatacactcaatctttctagacattttctattatattttggcatggaattctgctgttgagaatcagcctgattttttttctaccttgcatattttctgatttttttttctttcccaaatgcctgcagtggtctttccatgtcttgaagttcaataactttactaggataagtatcatggataataattctatatcgctttttcccaactatgttatgtgtccttttgctggtaagattcagctctttcactgattcaaggaaaatgtcctaaattatatcactgtatactttttacatgttgcagctctatttacttaaacaatttcccccctacttgttaggtacttttcttcagggagatgttattattatgtcttatctttgtgtgttctccttacctgtcrccttctaattgcttgaataaattttgaataaatttttccatatgcattgatatgattacctcaagcctttttacttcatgccattgatttgcttttcaggtgtgtctgtttcttttctttcctttcctttttttttttttttttttttttttgagacagagccttgctttgtcgcccaggctggagtgcagtggcacgatctctgctcactgcaacctccgcctcctgggttcaagcgattcttctgcctctgcctcctgagtagctgggactacaggccagcgccaccacgcccagctaatttttgtatttttagtagagacagggtttcaccgtattggcagggtggtttcgaactcctaacctcgtgatccgccctccttggcctcccaaagtactgggattacaggtgtgagccactgcacctggccaggtgtgtctgtctgtttctattctcagctcctgctcattcatccattagatctgccctgatgatgttctggcctcaatttattttcttaacttagcagtctctttttatctcattctgctgttttaacatctttgagcctctacttcagtgatcacatatatttattaaggtctcttacagtgaaaagtacttttaggaaaacaacttctattctgaatgttatgtttgccttttgacttggttcttcaagtcttagccatgttctctttctttcttttttcctttcattgttgttattgttggagcatgtttctgtagttgctgtaacagtttaatcttgctcattcttaatatgagttgtttatttaaaccctaatgtttgttctcacatactgtggttgaattttcatcgatattctgccttatttgatatgctatttttctctttttaggctagtatttagtgcatctacttttcagttgcccggaagtgtagggttgcggggaaaggaagggagtagattctaccgcagctgagtgaagtttgttaaggaggattactctttactctgaatactcattagatgtcctggaccagacaacatcccgctaagctcaggatttaccagtcttctggaagttggcatactcccctggttgagctcagtgtcctgaaagatgacaagttctgttggcccttaactctgctaaaatggtatgtggggcttctgctcttcatggcttttcagtacttttctttaggttgtcttctcaccctcttgatttgcttctccccagtatgaaggtgttatttggaattttaaggatttactcaccctgtttcttgagtactgcttctatgggatggggttgaaagccacacagaaccatcataaaacagaatattttcctttcttttcctgcctctaacctttaaaaagtttttagctaaggttttatgccattcatttcttttattattgctgataaattttggttctttctttgctgccatccccgccccctttttctgaggaataaaaggccaaattctttggaaaatttagtttattgtgaatccatatacaactgaagtaattaacaagtataattcaggggtcattactatttctcacactattcattttcatgactttgtataattgtctaaaaatcctttaatagacatgtatttttctttttcttttcttttctttttttttatgacagggttttccttggtggtgttttaagccactaaagtgtggtaattagttatgtagcaacagttaacaaatataatatatgaatttttacaggcacttttagaattaagtgacttattttattttaattaaatctgattttctctcttaagggaaactctcttttttgtttaataataatatcctttctcaaagaggaggctttgctactgtgtttccaaacttggttgaattttgttgctttcttcccccctctctcttttatctacttctctccctcaatgctgagggcagaataaggaatttaagttgtttattgttcctaactgtaagtgtagcttagaaacactgatggaaatggtttaaaagtgtattggaaccccactgtaacattggttttagagaacaggttagcatctaggttaatggcaaatgataagttcagtgtattgttaaaaatttacttttagtatttaaaaaaacctgatttacatacatccggaacactgcacaaatcataactgaatagctcacttactttctacaaggtgagcatacctatgtaacacacccagaggaagagaaagaacattttcagaactccaagctttcctcctgcaccctcattgcttaggacttcctcttccccggaggtaactgccattctggcttctgtcaccagcagctagttttgcctggttttgaatagtatgttcttttttgttttttagcttctttagctcgagcttatgtttgtgaaaatcatccatgttgacaagcagtagtgggttcattctcattgttttatagaattccattgcataaatatgccacagtttatgtacttattctactattatagagttatactaattttacttctgtagagtggattagtttcatttggagctattaccaacagtgctgctataaacttttgtatgtgtattttggttaatgttcattatatacttggaattgctagatcatagagtgtgtattatttagctttaatagatattacaaatagtttcccaaagttactgcatcagtttacattcccaccagtaatgtgtgagaatcacaattgtttcatatcttcacagaacacttggcattatagtttttatmatcatcatcattaattttaaccactctgatggctgttagtgacatttcattgtgctaatctgcatttttgtcatgactcgtgatgttaaacaccttttgatatgtttggtgaaggtgagtaattttcaaactttaggccttgatccattaatgggttatgaaatcaatttagtgagttaaggccagcatttaaaaagtctgaaatagaatagaagagagtagataatggtttataatggtaaatacagatttgtgaaacttttgtttaatttcctaaatataaatatacacacatatcagtttattatataaaatgttatatttctttttgtgaaccatggtcaaaaaggttttaaaaaaccttgttgtgtattatgcatttaagaaaaatctacaacttgattaaaatataaagaccacacatatctcatttagcacaggactgggaaatctaatagctgagataatggaaacatgattcataatgattttgttaggctaaactggaagcaaactgttcagatgaaatatacagtaaagtaaagcccttcatgtggtaagtataaagtccttgtaattgaatgggagaaggctgctttgacagcagtgtgggggataaagacccagaacagtcaatcctaaacacaaagttctaggtctccaatccttgaatgagaatagtggcttgggaatctgcatgtttctaaagctcctgagtgattctgataatctggcagtttcagcagccactgacatcagccggagattctagtggattttgccaactgcaagggaggaatctcctggaggaggtgttctaagtgtgtgaacgctttttaagctgaacgctctaaaaaaccaccatatttcagaataattctacctagtttcttttactccctaaattatcattctatagcagtgaaactcagaagaagccatttaattaaagaaccattatctaccatttctatacagttagaatggaagacaggcagcagagttaatttacttccgatccctctctatgcagattataactccctaatcctctttttctctgaacctgtacttcaatggcacccctattgtgagttgcatatattcctcaattatataatacttcagtgctttcgtctctgagatttactgtactttaacattcgtatgcattttacagtaaaattttgaaggctttataagcatcctgctttctaattaacagtgaggataaaatgttagtgtgattaaatattaaacatgcatacttaaggaatgttaaaaatcagtctagttttttttttctttttttctttctcacccttgaaggtaagatttatcctatacaaggtttggaagaatgaatgtataatttagagaaacacttccctgaataccaatattactttatgtagtaattatgggattttaaakgccaatgagttctttttcttttgtataaacttatgaatgtattctaataaagtacttttgacaagctaatcaaataaaacaatgtaagatttaattatcagctttctaaagattttatgaaccagattgtttctattgccagaatcatataawttaggaatctcagaatcctcttaaatcttttattttgttcttaaaatagtgttttttttacatgctcactacaaaaatatcaagcatagaaaatatagaggaaatttaaaatcattaaaatttcttcatctcaggtaaaactactattgatattttagttgatattcttgtagacatctgagcatacacagacatgctcacacaagcatacacccagttttatatagaaaggttaataatatatgttatatgatattctattacttatctttaagagctatgtgtttttaatccactcttctgttgtttctgtgttagtaaatacagacgtacatcatcatttttaatggctgcattatacatattatatacagtatatatatatatcatatctaatctcctattgataatacttagattgcattctttttcctctattatgtgtttagtaacatgtctgcacattagtcattttgcatttgtacaattatcttcttaagacaaaatcctagatgtgtgataattgccaaactgtcttccaaaattatttcagttgacattcccaatagcaacgtaatagaatgattgctttttcagttttctaatattggattttgtctttcttaamtatttgcaaatgataaaaatgtgtcattttaaaatgtgcatctctttattaatgaagttctgaatatttttaagtgcttattggtcattagtttctttctctctctctctctctctctttaaaatagagatagggtcttgctatgttgctcaggctggtctgaaactcctggcctcaagtgatccttccaccttggcctcccaaagtgctgggattataggcatgagccactgcgcctggctttgtccattagtttttcttctttgatcaattgcttaaatatttttattgggatggttggctttttgttttttcttttacaaactctgaagttcttactatgggatggctgtgttttgtattgacctgtaggaaatctgtgaatattgtgatattgccatttagatttctagtttatgatttgacttttaactcttcacagaatgatttttgaattaaactaaatgttgcttataaatgtcacttatttattttgtttgttacaaacatttattgatgtttcattttgtactttcaagcttttgtattatagttaagaatggcctttgtcatctcagaattgtggaaatacttgccaatattttcttagggtttaatttttttacatgataatctttgatccatgtgagatttatatttaatcaaacgataagaagccagtaatacttttacctcaattgctggccagttgtgagacttcaagaatatccaattttttactagtgatttaaagtgactccttttatattgaattcccttatatatttgaatcaatttgaacctatcttgttttattgatatctttttgaataattattttggggcttttatttctgtggctttatacttttttttaatgggataagtatcccttcattattctttttcagattatctgtacatttttgcatgttgacttggtgagctttaaaatcgttaacaaaagccatgccagtttattcattgggggttatatggtatttatagattgaggggaaataggtacttttataatactagaatttcttattgaaaaaacaagttttttcccccatggatttaagtattttaaaaaatgtacctcagtagcattttgtattttcttcatatagactgtaggtattatttttaaaaagctttttcctaggtgtttttagttgttgttaattgcatcatctccacactattttctgattgttaatggttaaaacaaaatattaacttttgtttatttattttatatccagacacgttagtaagcactcattttttttctagtaatatttcagttgattttagccttatgatgtctcaccaggtggaagtgaggagcctaagaagtaaatataactaccttattgtaggatgtcttgaaatcattagagaatggtgcctaatgtagaacagagtttatgaaatataatttgtacatccagggcagactgaatatggactaatcatgattgaaatataatgtgtcagcctaagtgtactagaatgaataaacataccatttaaatgagattatctaaaattctgaaatgttctttgtactctattaatctctmcggattaatctttgtgaattctgtattatttacttagccaggaaaaagatgggattgttatttaagtgggaaggcatagttctagtaaggaaagtgtgaagaaatgggagagaaaacagatttcctcaaaataggagtttactaggttgtgaattccaggcatgctaattttttaaatgctccacaaataaaatacaaccttttttgtcataatttttccaacataatacctgttacttcaaccacctaccctattgaaacaccccccttcccagtaagtaggtgtaaaatgrtctgacaatgccatctggtggcctcctggggaattgtgtaaagtaacctctacctgctggacttcactccttggtgaacctgaggcaccatcctgggctcatgtcttggatgccacattgaggcttgagagcaggcatttatgctggggctgtagacaaagaaagacgagaaatcaaaatccatgtctgggaaaggctgctggggaaataaggaaggtgcccaaaaggccacattcacaggagctggttgagaacaaggactagatttttcttttccctccctcttcccttttccctcttccttactccttcactccctctcttcttctgagttactttcccccgcactgcccgcctttttcttagctcttattcttgcattctcaggaaagcctccctctttctcttccctcattctgtttgggagccacatcataatcctaactacagctgataaatctaagggtagtgcttgtaggtcagctttattaaggaaaaggggaggcggaagtttgcaaatgaagaaccagcgtcatgaacgcctggctccttggaagggatcagaagttcccttcaacattaccatggcctcaggttttccccttcatctgacatgatttccccatttgcctgcacgcaggattttcgtctcttctactcactgtcctatccccaacacctggaacagaacctgtccagtaaaatgagctccattaatacttattgaaggaaagaattctagagaagtaagaacatctrgctcattattttttactatatttcagtgttgtcttcctgtaagtgttatagtgatgctaattttcattgtgaaagtatgattttggacttttgtgggataatttaagtattaaaggatatttctagcagaaattgttttttgagttctaacctactaactgactaactttcagaaaataacctgttggtaagttagggactctctgtatctttcctttttatgtttcaagaatgtatcttttatacacataaaggaagtaaaaacaacaacaaaatgaccagttttttttctgtctttgcttctcaagtgctcctagctttccaaaaaagactctacgactattaaatatgaggaaaacacaggtttgaaaagctgaaaaatattaagcatttggcagaacatcttttctgtatatgttttctctgtgtgcacagacttgtttgcattacaaatccttgatcacagacttggagtaatatttattccctctatagaactaagcacagagaaaatgttggatttccctaacatttttcagaattgcacccttgttttgtgattctcctaagaactggagagagaagtcaggctgcttttatttcttagattgttcctctgacattgctgttgtgtgagaattttctgtgggcaaaataataacaataataatgataataataatgatcattttttgctaaccatttcaacactctaggattcccaaattatctcacgaatctgtgtgatcttaaagaaatgcttttgctgtaatgcaaarggaaagctaaaatgaattaaaagctggcctaaattaagacagctggggtgatcactgggtgtataataccagagtgtggtagaccttggttaagttttgagaatgtgtcacaacatcctacatcagagttgatatgttgtcctggttgattttggtggctgtggtcatggggacggagagctttttaaactttgttgacttcgtggattgtgaaaaactataaggcatgcacaaagcatggactgactttagagtcagagggctctcaggctacaatctggcaatgcctctgtgtgacccggaataaaataggtaacatctcagagccttagtttacctttctgcaaaatgggagtaatgatgcctacctagaagggctgttgcgaggactggcgctggtacctggctggcaggacttgcttggttgaccagttatgatcacggtgttcatctgttatctttccatctctccactaggtaccttgggatcacaaggcccctcacataccctgtgaggcagaatgggaaatgcatggcgaagatgattctctccgtctggcttctctccgcctccatcaccttacctccactctttggatgggctcagaatgtaaatgatgataaggtgtgcttgatcagccaggactttggctatacgatttactctaccgcagtggcattttatatccccatgtccgtcatgcttttcatgtactaccagatttacaaggctgccaggaagagtgctgccaaacacaagtttcctggcttccctcgagtggagccagacagcgtcatcgccctgaatggcatagtgaagctccagaaggaggtggaagagtgtgcaaacctttcgagactcctcaagcatgaaaggaaaaacatctccatctttaagcgagaacagaaagcagccaccaccctggggatcatcgtcggggcctttaccgtgtgctggctgccatttttcctcctctcgacagccagacccttcatctgtggcacttcctgcagctgcatcccactgtgggtggagaggacatttctgtggctaggctatgcaaactctctcattaacccttttatatatgccttcttcaaccgggacctgaggaccacctatcgcagcctgctccagtgccagtaccggaatatcaaccggaagctctcrgctgcaggcatgcaygaagccctgaagcttgctgagaggccagagagacctgagtttgtgctgtaaggtcatttatcactattttccttttatcccccaaacccttttatgcagctttttgaggcacatcacagaaagcttcctgaacgagtagctagcttagtttttactaaacataccagatttgaattgacaacagtatagactccagtcttccacccagtaaaattccaaaagccaaaaataggtacttagttggattggtagatgagactaatttgctgatgaattgcaattgatgtgattgacaacaaggcaggtgatattttcccttctttctccataaatgacatccaaatgatatccttacatctgaatttgtgtaacattattattttagttgttattattcttctgtccagtaaagcttttttgataacctcatccttcacagataaattcttcttttgaggtaggaggcacaatgatctttttagtatgcagttacattcacctgggctgaaaggaggcagcccaggaaaaagaagagttgttagtgtggggagatgccaggatgaggcaaggtcttaaaagctacaagagccggacatggtggagcgcctctgtaatcctagccacttgggaggctgaggcaggaggatagcttgagcccaggggttggattatgcagtgagctatgatcatgccactccaacctggttgacagagcaagactcgcctctaaaaaataaaagaaaaagagccacaggagcttttaggaaatgttcctgcccrtcttggcaggtgagaaccaagaattggtctaagaagtcttagtgactttcaaggaagcaattacaataggttcttgggatctgaaaaaggatctgatggtgatagagaaatggaaatttcagaagtgacccacatgttaaaaatttggcattgtaaagaaggaaagagatagtatactagttagaggtgtcaacatgtctgatgaagactttgttttaaatgtgaggtagaggagatttcttcacgtttgaaagtcaggggaaaaataaacttggaatgaaaaattggaaggttctggtgagagaatgagcagattagtgttggaggtgtcgttcttcactgagcctggcagggaggagtagactagagaaccagggaccactctagcagagagggaccttcctggtcatcttgtccacccctgtctttcaacagaagagctaactgggagttgaaaagtgagatgtctcacacttagctagtgtcacaactaagtctagattccacatcatctgaatcccagtgctactcatttttcttatactggactgcctttatcttacaactgaaagttggaagactacagctatgctaattcttaagctgagtgtagcttcacaggcattcatgtttacttctatatactcttttgtacacgagattgttcacaatataaaaagtagcattaaaaaatgtaattttaagttctagaacatgtactgtaagcaaacccagagatcttactatgcctataagagttcgttgaactgaccattaggattttgaattccttcagagaaggaacaatgtcttaatcagatttctttctgcagaatctagtacagtgcttgacacataatagatgataaataaaagtaataactgctaaccattattgaacacccgctacatgctatscagcatgctacctgcaaaataggtgcttctagcatccccacttttcagaagaacaacttaaggctcaggaacaaaagtaactgacctatgttcacacagtccctaagtggtagctgtgatatgaatcaccccgatgcttgtattgaatgttatgcagttatacttgtcaagtgacttcagtatataggcagtgaagagtctcagaatatttttgagctggagactagccataagctctctaagaagacaatgagaatgaattgttactctaagtaagtaaagtttattagacttactgcactacgagtggtatccactcctagacagtcttagtagtttctcagatgaaggaaataaggcaaggatattgatagggttttggggcttgggctgggtgatttgaaggtagggaactggtgaggattaggcagagtttatgacataatagctttagactggtaagtacagctagatgagggctgtgaagtgagtgttaatgagcaaactagtcttgataagtaggctatttttgttggcatatagtcttctgaaagtgactatttcctagaacaaatagctaggttattttgcctggctgcagcattttttagcacaggaaaaggaaagcgtgttggttttagttctcaggagtaacatgggaaggtctctctggcaatagtgaggagggcagacaagggaaagatgggtggcaggggatccagttaagcagccagtgtataaagtaggaaagaacagataaagtcatgagcaaggaaacactgctatatttgcatgcatccatagggtcaaaaaacttgagaatcattttattgattattttagttaatgattcatagataattcagatagatcataaaatggtaatctttaaaatgtagcacaaaaaggttttccagtttaaaataataacatgcgtttgctgaggattcactctcagacactttgctgagcactttatgtgaatttgatcaattaatcctcaaaagtttatgataggttagttttcttcatttccattctgaaaataacaaaacaagggcgtggagaagtcaaatgatttcccccacagtcatatagagagtgatagagctggatttgagcccaggacatctgtgttcaaaagtgcttttaacttctatgctactgtgccttttataaaaataaatcagctaacataaagtctaaagatatttgcctttgtatctttagctagtctggaggcttgggtgttgttttcctgtaagcttaagacagaggtcagcaaactttaactgtgaagggccaagtggtaaatattttaagctttgctagccatatggtctctattgaaactactcatctcactgatgagtaatttgtcactgacataagtaaacagataggcccgtgtaccaataaaactttatttacaaaaaggggctgccagttgtatttggccaacaggccatagtctgctgtatcttctttgcatttctctcagtttgaatttataattacagaatatctacttcattaaggaygattagcctaaaaatatccatcaactttargaaatttctaatatggctgccatgcattgaggaagatacagaaaacagatgatatctttcatgtccttatgcacataattttgttggatataccttacacaaacagacrtatgttgctatggcctgaatgtttgtgtctcctgcaaaattcatattttgaaaccaaattcccaatgcaatactatgaaaatgtggattctttaggaggtaattaggtcatgggggcagggccctcatgaatgggattattgcccttataaaagaggcctgagggagcttgttcataccttctaccatgtaaggaagcagctagaagttaccatctatgaagcagacagcgagccctcaccagacatggaatctattggtggcttaatcttggatttctcagcctctcaaactataagaaataaatttctgttgtttataagctaccaatttatgggattttgttatagcagcctggctaggctaagacatatgcacatggcaacctttctgtaataaggaaaggtggagacaggaaaaactatgggattcaaaggaaaggaaaataactcagagcttacactaaccctaatcagagaagacttcctgaaggatatgaactcaagcatgtctatgaagttggtcaaagcatttatagtgaaaggagagcagaaatggtattctaggtgaagaggactttttttgtaaaggcaccaatgtgggagcttatacaaaggaccatctggctgaagctaagcatttgggtgcaggaactgttagagatcaaagcagaaaagtagattgagatgaaattataaaggctcttctatgctagctccaagaatttggacttttaatattgacaaatggttcttaatcaggagtaattttgcctcccatcccaactctctgtagccatttggccatttctggagggatttttggttgtcacaagtctgggtggcacactactggcatctactgggtagaggccagggctgctcttaaggattttacagtatacaggccagcaaccccccgcccaccccccaacaaagaagtacctartccttaatgctaaatgtgggacactctgtagtagtaagccatcagtgaatctgcaagtaggatcagtgaatctgcaagtaggggaatggagtcatcaaaatggtcaagactgatgcagtagcactgtgtggataactccaaatgtagaaaatggatgtaaggagtctcttcattggcttgtttttcccagaaacatttgagggtctgctatgtacaaagcatggaaccaggcatggtagggtagaaagatgagtaagggacagttgaagtctctggaagcttttaatctagtgtgctggggtggctgcagaggtggtggtggctagtaggagacttgtaatcagaaccctttgctccccctgcctctctctagctctcactcatcttgtggccaccgtgcagattctggactcctccagactcagggctttctccagctcttttcctcccatctagcttctgggcttctagtctctcttaccttttcgccttgctctgccttcttggctctacgtattctcctacataatagtttctttctttcctgtacaaacctgtaagactgttcctactcccaaatatttacccatttctccccattttcttgatcagcataaccagaacctcaggagttcatcaggcactcgaaaattttccctggggtaatgaagtgaatagatggaggaaaakctgtgaatrcttttgcactggtaattttaatttactgctatcaattttaatccttttcacaagtattcacagattggtaatataaaaccaaatatgataatgaaatataatcaaggattctttttttcttttaaaatttgatttacttatgsatttgctttgaattgccataaattgcaggagggcctgcacaaggagggtgctgttgagaccagaaaagaggccacmggtatctgtgtgggtgctacaatctccagaccatcacaattggttagcaggtgggtagcaaggaaagggagactttggagatagtgctgtggtctggaggaattcagaacatgaactatgtgagcagagccgtgctgagctggagaaagcactgtctctcctgtgctgggaagagacagtggccctgggctaggaatgtgtctgtggagcacagatggttgccagtcccctcttcagatacgtggagcctagagtgctgagtctgggctgaagtgcagtacttgtcctcaggtgttattgtgtgaggctgaggggaaaagctagaaaccatgtctccagcaaaatccatctattgatcacccatctgaagggctgggctgagagggggacctcaaagaaggaagagcaggactgcaggcaagacagccaaatggcagggtagggggtgctttagatggggtgggtaggtggagattaggggcacagtcccagtctctgggtcctcatagacctagctcttaggcacatgatgtagtgtggtaagttgaggcctgtggaggtgcagagtcaggggagtggctttacaccaggagaaagggactttttctcagcccttggctgacacttctctatcactaatgccacttctgagcatctaggaacgagggagagaagtgaagtttcttggtccctacacacataccttacaataacacaccttcctaggtttgagggagagagcacgtctcattggtaatcattatttagtcattattcttttcaagtggggcaggtgcaatagtattttgcaaggatttttgagagcaaagtcattttttgctatagctgtattaaaaaggtgaatttctaaatgggttatttggggctgatttgcaaatatattaaagccttggcaacttgtggaagttatgaaatttatgaaaagagtcacaacactttttctttcccttgaaggatactcataatcccttaaaagccacaaatgattcaaattactgactgctgtaaaaattaagtccacctaccacaaaatgaaaactcacatttacagttctactaaattattttctatttttctctctcttttttttagacaaaatgctgactactgtagaaaaaaaggtcatgattcatgattgaaagcagaacaatggagatgaaataaacaaggcaaaatagaggtggaaacagaaggaagtcatttgctgagtctgcagaatggaatgcagcttctgtcctttcttgggatgtctaaaacatgacaaacagggtgatctgttgtacacactatcttatgagggagatggtgacttctccttttttctgtggatcagtgctattgtgtgttctcagtttaagatagcagatcatctcagcagtaagcacaccaacagaactgagttccagaaaggaagcagtttctggtgctttgcatatgtccaaatccatgcaagtgggagaaagttccagtgcacacttcccatgcttctgagtctaggcgttgtggtgaatatgcaggaatcattcatgagacagaatgtattttgttgtatgacagaaggcttttccaagcaaactgcggtgagcgtagtgttgaatatgttgcatgtccatgttagaaaacagaatccagtcatcagctaatacaaatgatttcccagagcagtgtttgtttcaagcttctgtcaaatagtttggcttttctgcagggtctctgtgatttccccayctatgtacttttctgtgttaactcacttattatggtataactcaggaacaggtctcaggatggagagaagcatacaacatgagcaaagctttttctcgtgctctgaagggtcttgagaggggagtgggatgccttctgtgaggatttttatcgcagtgaagctcaagtggtacccaactgcrttgtaattaacatgattattggcatgtttttgactctcattttctacaaggctgcagtgggcccacccatgggctggcccataactgtatgttatgtggaagaagtgtgggaatgatgggttttccatgaaatgtgatgcttctggagatggggcataaacatgttcattcttgttgagctgcattgtgttaaaccaaattgtgtgaagcgaggtcacctggaccactcttgggaaatgcttcagaacaccagtctgttccttctagagaatttgtttttgtgttctatgtatcttaaatcaaatgtgtgcctaagcaattctgtcctctgattcccacccctacccaccaaaaaatggtagacatgaaaggcaggtgaggaaacagaaaaggtctctttgcagatatatattttttaaatggcactatgtagtaattaagagctaaggagacagaaagacagtagatgagaatagaagagtacctgtacctacaaggggaaaaatgaatgcaattctttatttgataagagtgaactgaaagagaatattattttcctacaataaagcaagctgtcctctcacaggataaagtggaattctgacatggattatggacttcttctaactcccattgacattgcttcttaccagacatggggaaaagctacctttcctgaaaggggaggagggcactgtcctttcagacaaagcttgtacaaattcctgaaccgcaaatttgctraagtgaccgtatatattatattcataatttaaatgattatttatggtcagatacatattgttaaacttgaaaatgttttattacattacatcaaataaagtttatttgtagctgaaataaagcaacgtaagtaacaatttttaattaaaggtcttatgtcatacatgttgctgtctgtagaatggctgaagggcagacattttacgtgtttgctaaaatcctaacaggtagctaagacagctctggtttcaattccatttcactgtggattcattcacttagtgactttatttttataaaacaatgactgttcattacttgatctgattaatgagcattgtttgggctcctggcacattagcattgctggcatcaaggggacaaagatgggtatggcacagtccttgcttttaagagtttgccatcaggtagaaggcaaacatgtctcgatttgtcacaatatagtatagtaagtgctgtaacaggttttagggagtgactttttctttcctgtagtgtaagacagggcactatggttagttggattgattcaggttttcaaatgtgttgtttaattttttattaagaccttcatgattcatattggctccttatcctgcctgacttgaatgcccgactattgacctctctgcttcattctggctatagaggctgagcttcatgtgtagactgtactttaaatatacagcagcaaataaaaggaaaaggtagaaatcgaaaggggatgagaaaaataaatcattaatacagtttcacatatgacataatttgtgccaaagacacagcttttgttttaactaagaattgggaaaatcattgaaatgaacattttatatataatgactgttcaagcaagaaggactattcctcttctcactctatggtatcagctgtcattttctggcaaggctgagtactgggaaaccatgcttgagaagtaaagcacttacttgtaagagataactgaatcactgttgccttagcttttagttttattctgtaaatattaaacaggagacactcagagttcctcgattttctagcaactgtttcataactgaaagcattgattatgttgtcatggacttgatatgcttgtgcatgtatttgatgatcatattttcatatagttttattaggttcattgattgcaggcagtgggtcaaaaatatgaatggaaaatgcaggtaattttttcaaatagtttatgctaatataataattgaattaccatctggagatagtgggaatttccctttcagcattttcattgtcaatttagttttcaatttaatggctataaatgttgctaaatactggagtcttgaaaaattgttcatgctccttctgatctcaggaccttcacacatgctttccctcttggtttgtgatattcctcctgatctcatttatttgatgtatgccttcattatcatccagtaaatcttcaagggtaggggccatgtctgtttttctcaacaatatgcccattacctagcaccatgctgggaacatatatatggtaggccaacaatgggtatgttttaatgagaaggagggagggaaggagagagaggcaagagttcactggcactttttaaaaatgtttatatgaggaaacaaagaagacttgctgtgatccagcgacatgcccagtgagtggaagagaagaaactggaattaagctattctgtgtgccacttaggtcaggccctccactacatggtcctgcttctcttgcatgagttagctactcatatcatgagagcatccctttcttaattttctgcgctagtggagcagagccatgtatgtgctatggcccatatgttgaaacttgtttatctacagctagccagatggtctgtaacagcacacaaagaagccatttggaaactttcagagggtcagcacgttttgaaaacaactcagagtaatgcatattgtgatgtcattgcttactttaagcttacagtgaggaatatcttgttaggtactgaatgtgaaacatgcagactttgagaaccaactcagaggtcctagcccccagagacagaaatttatttaattggatcaccctttagacttgttttgtctacatgttctctgaaaaaggaatataatgtcttaatttaaaatactttgttttttaagttgctgctgggttaaatacatttttttttaaagaaaacctgcttatgcagtacatgttaacagatatgatgtggtcatcaataaaaatgtaaaataaaatttactgtggctgatatgaaacaaagtgagagagggtgacaagtatcagaagtagatttgcagctaacagtctgtttagtctttggtacattaaaaaagccaagatgaaagaattatacctgtactagtggagggggaaaatggtaatctaaaatagcagatgataagaaatatctggaatttatctttgatgtggtattaggtaatatttttggtaccaaattacctttttctaattacattttgattgggctattattaaaatgctctttattctttaaacccacacaatctcacagtaggagaagtggttcaaagctatgatgagaggcagcagaaagtcggctgtacatataaaagtttgttatgcataattcacaaagtacatgaatcagttgtaggaaaaatgagctataaccatatccacagacaatcacagagctggagaatcttatggatgatctaatacaactctctactcttttgcaggtgagaaaatactaaaacactagagctgtgttttgtctgaattcatttaaagaagtatggtatggagcagtgctttgctctacacaatatttggtgaagaaataatttttaaaatctgttacataggtattaataaaaatgagttataagaaaaatgcattgaggcaaaaaatcttgttgaagtatgttgaggcaaaaaaaatgaagtgcaaaaacatgcaaaagatttaaaagacataaaactacatttcaataaatatattcagaacaaatataacgaagaaaaaacaacaacaaaagtgaccattgttcactgaaagtgagcagttactgaagtagggaaaacctagcagttacctagatgagaaattactgtagcatgatcattgcatgtgcatgacgctaagttgcaaggctcactgtgatgactgcagtatagggagagcatcctgacaagaagggtgaagacccacaaggaaccccttgtgcctgagaactacacctggagtactgacgcagagaagctgcctgcttcagtatgtgctctgaaacagtcaggaagcagagcctgcgaacaactgaaactttttcttcctatgtttttcctctttagttatctacaattaacttgtatccataatgctgatctgaatgctttgaaaggtatttgatttttagaatgatcatattaatgaaatttttcttaaggactacattttgacaaaatgtccccaacagtttgaaggcaaaaggttgtgatattgagaggttactatcaagtaatcacatcattttatatcttaagcccagttttcaaacttcactctgagtaagaattatccaaggagcttgttaaacatgcagattcctgggccccacttcaagagactcttgtatgttgtgtctggtgcaggggtgggggtgaggtgatgcagagtgaagagggcttttcagcagcctagcacatgattctggtacaggtggtctgggatccatacgttaaaaactgcttttcccaacgtgctggcagactgaattacctagccagttctgtgtgctgttagtgaggaaaagcatgctcagtgtgaaataatatccaaatcattagtatatggttatagaatcttgccaaagaaatgcaccatttgttcacaagctctctcttacataccctttagtgctcagtacttactgttggcaccaaaaatccaggaagcttgcagaggaaaataatccacagatcaccttagatagtttacaaatatgatatttaaagacatatagatgtttaagtgacatctattgttatggtttctttctcatttggtcttaaggcctctcttgagagtggccatcagccaagatagccactctctagaagagacctgaccaggggaaagttaggttggagtgtgttggtcaagtgaggcacaatgaggaggtgaaaccaaaatgcatgaagcaagaaattattacaggacccagagaattaggggtgccgacaggaggcccatggtaagtctggaggtcacagggagctcaaccagcagttggggagctagacagagagaggacctgtggactttgtccttatcaaggtccatggttgtcccttaggctttcccaaggggattgtggattggctagtttcaagaaaacatctgaaaaattggggtgtgggaacttatttatattactctggtgtcgacaattaggttttgtgtgatcaacagttcacaaagggaggggaagttttcactaggccaatggtgacgggttatgactagtcaaaataacatctagttattttgaaatgtacaattattaattgtagtcaccctattgtgctaccaaacactagatcttatttctactatataactgtatttttgtattcatcaatcaacccctcttataattaattaatattggcaccagcacagggtcaaatgagaatcaatacatcacattccttatagccaagaagctgatcaaatgtttgtcaacaaaacaaagataagatctttataaaatatgtgttgaatattagccattgagtgcaagctgttgacattggccaaggtgtacacttttaccattttatgtgtgtgtgtgtgtgtgtgtgtatcatgtcaatgatagcatctcacatttaattgtttattactcatcagtcattctgttagtcttcacaacaatcctaaacactgttatctctattttatgggtgaaggaactgaggctaaaggagctcatgacattaacttgtaagtagaaaaattgagctcagctgacttgtacttttcattgttatgattttttattatttaaaatattttaaaaatatttttgtagagatggggggtgggtctcaccacgttgcctaggttggtctcaaactcctggcctcaagcaatcctttcacttcagcctcccaaagtactgagattgcaggtgtgagccaccatgcccagcctgtacttttcattatattcttccttcctgcaaaatacatctcagtggttgatgactggtttcgtggacctggaaatctgcaactgaactctgaggagactcac

SEQ ID NO: 6776 - DNA, 100364 bp, Homo sapiens
  misc_feature (1)...(100364): n = A,T,C or G, or insertion/deletion polymorphism (see Tables 1-2)
ctagttgaccttaagcaagtttttaaacttctctgggcctcagttttctcatctagaaataataatggtatccatgttatagggttgatgtgacataattcatttaaatagcttagactaatgtttgatcaatagtaggaccacaacaaatagttattgcaactattactattaagtactttacatttgttatcccatttaattttcaaacaaccctttgagttaggcacatatactaacaatatcaacagttaacagactgaggacattgcaattcatagaattaaatgtgcccaagatcacatagctagttattactatatatttcagaaccagaaaggcttgacaatataaactcatattttattgatagtctgaatgcatgttgaatttgattttatatggcaaaatggcaccattttactatgcctataaaatttttgactgaagttggttcttctgctgggttcactctgtaagaggaagaatttggagacagtgaaaccattagcaacctattgtaataacagttgtaaagagaaaatgccctgattcatgggaaaattcagacaaaaaagacaagcaagagagacatcccaaagtggaagtagaggcctaaagagaaggagtcatcaaagatcgcccattttaatcctaaagagcccaatggatggtggtgattggcataaacagggaagccaggaggggagttgacagtgggaaattcacttttagctgtgttttaaggacacatgataagaggatggagcatgggatgagtgctgtgggaactggagattccgccactaacatttttgttcctcaatttcctctttcaaaaatgataagttgatctagaattaatcctttggattccttccaacttcctagaggaagcatgtaaatgaattagaggaagtagaaggtagatttcaggaattcaagaggcagtgagtgatcaaggtattggatcattagtctggccttgaagtaaaagagagaagtgggacaattacttactttttaagattaagacaaatggtgccttttaagaaatgacttaggcaggattaattaatacacccatatgtagaatacaggctgttgacaattaacctaagaaatctaaagtaaaatgtgtaacaatgaaagtcaagtagcctttatttataggagagataagcttcagtttgtgtggtgtgatatgaaggtgttgggaaagtccagctgccccaaaaatgtcttcctgatcttcttaaaatactgcctggctttacaccattaaaataaacctctttaaatgtacttcataatataaaatgcacatttatttcacattcagctgttaccatgctttccggtgcattagggtaacaggatgacaactagctacggcgaactgaggagacaaagatttgaagggggaggaggaagggattcctttggtatttggtgcagcattactcaagtcagtcagttcaacaacatgtggctgcctattatactccagatattgagctaggttctagacattaaaaggcaagtaagttgtggttcattgcctcaagatgcttatggtcaagagagagtggactacataaaggtcatggggctggaggagttttgaaaagtgggaccagcgactaggtaaaaaggaagagggacaaagaaatttgttctcttccatcacaactttgttgaagaattagataccccaaacaatgctttttcttggtcccagtgaatccccctaaggaactactaaaatttaagctggtagagttgacaccctgtaggctgaagaataacagataatttgaatatctttaactcaatatttttggccctttgaaatttaaattagtaaaattttactatatcagaacttgtaacctaaacagttgactataaaatacaggtttgctgataatttttcctgctccctttctcccctggaacttcacagtatgctaagattgctgaggactggtggggggatccagggctagcagaagcaggaagcaggaagcaggaaatgtagagaaattggagctagaaagataactgagcacttctttaaacagcagactagaggagcaccatatcttcacagatggtgttaaacaagcatcataagacatagcttcaaataatgcagggaacatacaattagggccacaaaaacttggggtaccagttctagttctggtatttactagctggatagccacaggaagtcataatttttttttgcctatatttaatgagtactgtctatatgccaggcacctataacatgtctataattgactgaatgttcatggctcccctcaaattcatatgttgaaatcctaccctccagtgtgatggtattgggaggtggggcctttgggaagtaattaagtcatgagagtggagtcctcattaatgggatgactgccctcataaaaggaaccccagagagctccgaggctcagtgtcttttcactatgtaaggataccatgagaagtcagcactccagaggaggaagaaaggccctcagccaacccctgactgtgctggcactctgatgtcatacttccagcctccagaactgtgagaaatgaatgtttgttgtttaagccacccagtttatggtagtttgttatggcagtctgaactgggcaagagtgttttacatatgacgatatttcattctcatgacaacccactgaagtagattctatcatttttctctattttatagataagaaaacttacccacagataattcaaggtcagataaactaaaatttgttaaagtagggatttgaatacaggtagtcaaactctaatgcccatgtttaatcattatgatatcccaggtattaagtcttttgggcttcagttccctcacttaaaactggacacgttgcaccaaacaatgttgaaaattctttctggctttaaacactatgattctaattatataaatcatatctatatttaatacgctcatggttaatctgtgtttcggaatagtctcagagaactgagagctgaagacaagtttctgaaatatggcttcatttcttagttatcccttgtttcagtcaacgtaaaccacataatttactcttccaccaagaatacccttcctccatttccatctgttgaaaatctatccatccttcaagtgccagctgaaatgcacctcctctaaatagccattctcagtctttggggatttaaagtgcggatgtattagactgttgggcgttgggatttgggcgaagtatctgtgctaatgaaaggaaaagatgtaggataagaagaaaggttgcagggaaccacgtacaggaaaggtaagagaaccgtcagcagtgttgttggtgacgggcacaaagccttccttgtgacaggcaatagcaaagtcaccagattatattaaatgttgcccagctagtaggagtgagatgaagattaaatgagaacgtttgtaaaatatctactacactgtctggaagggcagcaacaggataattcctaatctcttccttccataggcaactggtcatctccttcatgctgaagaaagctgccatcctgcccagggaggagtaggacaagaagaggggagaagagactctgggggggaaaagaagtcaggcggagatatatgggaacacaaagaaaaaacgagagccagagtacacaagacgagacagaaaaaagaaatgtaagggagtgacggcgaagaagaggatagaacggtaatggaagcagaagggcaaagagggacaagtaagaaggagagaattctaggcctcgggaagagaaagttcctgctgcactgcggaatccggcctaaaggaagaggcaaccaggtgcagcacccaagcccaggtgccagtcatttgccgctgggctctcagacccattctccttttgcggctgtcacatattctgtagggattctgagccctgccctctgtcatcttgtccactggcttctcctgctttccaccactgggtgggcttggagggtgggaggcagggagaagccagggggactctcatcccctactttggaagatgtctgccgcagtagttgcactaactttgtggctccaactcctattggacaagccctccagggttccggctgtctcctctctttgcccctccagcctcaggggagaaggcacgtccagcagttgctaatctcaggattgcctcaccttaccctagttgaacgtccagttctttcaacacttgtaactaatttgctgcattaaattattgctattgactcgcttgggaaagaatactttcgctggattcacttgcagagttcaaagacacttttcctaatgggactgcaagcagcgcatcggagaaaaaaatctagcagtcccaggagtcaagaagggtcagggtctacttcagtgtgtgatcagacagcgacaaacccacactacctaacagggccggaaggctcttagcctaggaattagctgtaaaatgactgggttcatgtctactttttcatgatttactctattctctttgatcaccgccagccttggcttaaggaacatctctgtagaattcaattttattcctcaagggttacttaagtgcccattatgagtatggagggcacatagctaggtgtggtggggaggagatatagagacgcaggaaaaatggagggcatgctcagtttttggaagtgtttgcttcctgcaagatgaggtttgcggacctatcaggagagcctcttgataaagactcctgaacttttccagtctcaccagagctgcagacactcggaggcaatattagtcttacagctttcatttctcccatcaccagagctctgttaaaagcagactcctctttaaggaatccacagatcagagagggtacagcacatgcacacaactgacccccaggtcagaatgatgccagccacaaggggggattctgcttgggggagcaggaagactgcacagagatggtaggagacggctacaggagctgagtccaagaaagtttgacaggtggaggcggctaaggggtattctggcagagaacagagaaggatcaaaataaagtgtcaaaggacagacacatttcaggtgttgtctgtaaacggaggctttggggtgagggtagggaagtggaggggagactgaaaaatggaggcccagctattgaggactctgagaatgaggcattaaggctcgaggccatggtgagtcactggaggatcttcagcatcagggcggcaaggtcacttctggtggggtggcgggggtggggtggggtggggggactttgcgattagaagcaaagaagctggaggcaggaaaagaaactgcgagctctcgggtggagggcagcttatacgggaagcctggacttgaccatcgccagggaggcatactgacattcgagctgccttccatctattcaagggcacgcttcctccgtctgtggggggagaaggtgccccctcagaggctgtacgattcgaagtctccggcctgagaagtttcgaatttctccttgccaaggtcgggccactacaggtgggagactgcgagccccgagcgaaagcttggcttcacgcccgcccggggcagccgccgcggctcgtcccctccaggcctgggcaccgccgtgggccgtgcccggcaggacgctccgggagctgcgcggcggcggctcgaggaggcctggcgggcggcggcgagaggctgtgccccagtttgtgtccaatcagggagtgcgggctgtgccccgagccgggcagcaatgcgtaaacaaacccacggtaactcctccgccccctcggcgcgctcgccccgcgcccgccgccgccagcgccgccgccgccgccgcgggctctgctctcctcgcgcccgcccgccgggccggcccagcccccgccccgcgccgctcgcacccccgctgccccgccccgcccccgccggcgcgggctccctcacctaccgccccacgcgcgcgcgctcgcgcaccacgcgccccgcgcggcccgcccggatcgtggcctctcgagagcaaggtaagggcgatgcgcggggacccaggcggcttccccgcccgacgcggcccagggaagtttctggcgtggctgttttccgcggggccgggggggaggccccgggagccaggcgagcccggcgggcgggagggggccgcctggcgccccggggtcacaagttgcctaacctgacctcggtgcgggccggtgggcggcgcggccgggctggcggcgcgcggaaaggggctggaggcacggcggggccgggcgccgggcgggcaaggggagggccccgaggaactttctcttccccagaggggcgccttccagtcctggccgcggccccgccgcgggagcagcggctccctggctggagggagaccatgaaatgtgttcgaagaagctgacgcagtttgtgacgctcgcggcttcctgatggggaccggcagcagcggcgcctccgccgaggagggacgacctgagtcggcgctcgggcccttcccccgccggcagccgcgcgccccggcgcctagtttgggggccgctggctcggggcgcgagcatctgctcccggctgcgcgcgtcgcttccgttttgattagctcaggttattatataagatgtcacggagaggaaaggggcgagcgagaggcgcgttggggagggcgcggtggccttccgcgagtggcagggaggggcaggaggcaggacccggcgggacccacctgtacgccctccgcgccccctgcgggcgctgcccgcgcgcgtgccggggtggtggggtgggggggcacggacggacgtgcccgctgctcccatcccctccccgccaacactcgggcagcggccgaaacgtgctattttttcgctgccacctctcctgggtctacaggtttctggccccaggcgtttgtactttgaaacatttgtttaatattaagaaagctgcgtgtgcggccgtcatagtacacccggaacgtgtggccgtgagctccagggcggtgaatgaatcatcgccccgcggaccgggccccgatgattcatgcggggtacacacacgcgcgcgtactcgctatgtacctctgacccagggagagtggcccctctgcagtgatgacgcccggaggggcggggaagacttagtgcaaaaggacagcggggtcccccccttccacaataacttgtgggggggtcagggacgcccggagggacgggggagacttagtgcaaaagggcagcggggtcccctcttccacactaacttttggggggtcagggtccacacattccccaaggcttgttttgcgttctcgaaagagttacaaaattccacctggctacattaaccggttgaggagcgctggttcgctgcagggctgggtcctgtctcattcagtatttggtgtcaagtgagggaggtatcagactctgaaggaatcctcctagtaattgcgtctacctaactggttctgaagtaattagaaaaattttaaaagtggatcttaaaagaagactccttaagactagttttttgagggtttttaaaaagccagatcctaaaaggaacctcggttgccattcatgaatacagaatttttcccaatgtgatcactctcaaagattaacttgaytcattcccacctcacattagtaagactgaataaagttttctcatcatttaagactcacctcaaacggcatctactcagccaggccttcttgatcgccttcattatctcctgtcccctcccccaggagccaccccataatactattttattttcttcactgcgcttaatcgctatctgatcttactttgtttaggagttcttttagtctgatctcttcttactggaatgtaagctccactatgctagggatttgggctgttttgttcgctgctataaccctagcacctagaacagtgcctggcatatatgaaacacttagtatttgttgaatcgtgaatgaataaactcttttccagatttcttggtaggactgtttttgacagttgaaattcagtgctttttttttgtgggaaagtcaccaagttggtgcagttctaattttcttctttttcctcctggttttcttttgattcattttctgctctgtgatgttaacctacagcacaacaagggtttgagcatcatatcctaagacacttagtatgaaaaaagataaagcatgtggagctctgtcaagagaaagtatgttactatgtaacttctggatgattaaaaatattatctgtgctagttgaagaaaaggtgcaggatattgaaatggaatcagcaaagtcaaatcccacagtcctatgtttccacttatttggaatactaatatttccatatcttccctccccactgcctggaaaacagcctgaagtttagctgcagtttgggaaggttcataataaataccacttagtatgaaggttttttgtttgaggcagggtctctctcactctgttgcccaagctggagtgcagtggcgcaatcatagcctcaacctcccaggctcaagtgatccaatatgaagtattaatttaatcaaatgaaaacaggatttatgctgcagaggccttaactctgatttgttgttgttcatgtcggtaatgccacagaagagtacataaaaggagttatttaaaattatattttaaacatcttaaatggattctaaagaattacagctataagtcagtgatataatgtaaaaaggatgtgtatgtcatatttaataatatccctttagaggataaactttgataaagtttatattataaatcaactttggaggcatgttaattagccccagtcttgtagcaatattttcaggactcagtacttctgaagttagtgctgaagaagaatgggcttctagcagttccctttccataatagtagctgtgatcacttgcagaagcataatctcaagagtaagctcagagacaatagaattttaaagctaaaagagaccttgaaattacttggcgcagttcattcctttttaatcaatcccttcactaaagaaactaaggcatagtgagatgacttgcctaaggtacaaggcaagagtcagaaccaagagtcctgactctcataaagagcttaagtggttggaagttcctgaattagccagagctgctataggtggagaagaatggtttctatcattagttgattgtctgccttttgcttgtgaactctcagagggaaaaataatgtcttattcacctttgtatcctcccatgtgcctgcaacatctaggggctcaacaaatgcttattgaaagcagttggataaatgggttttaagttgaaaatatatttaggaagtgaaaaagcaggaaaacatatctcctttccacattgaagaagttttctgacaacagaattagatattggcagtaaataacctagaattaaccttagaacttttacaataatgaaactactgtttaatttttatgcctccagtttttttttaaagtcttaaaacttgtaagtgtgcatgtttgcttacttggtataattatttactggagaaacaggagacaggagtcaggacatctgatgggtgttgcctctgtcacagcatccaatagaaaagcctagactttgcagccagtcagatttggggctaaaacacagctctgcccctaataagtagagctttccacagcaagttacttaactttttggagcattctgtcatctctaaagtggggataatgccatctaccttgaaggattgtgtgagactgagataatgtatatatataatgtgtgtggtgtataaaaggctcttaataaatggtaactgctatagttatgactacagatttgtgtgaccatgggagcagcttaatctctcagaagtttcagttttttcaatcggagaataggtggtcaggatgggggaggggaatgaccgatttctaagatctcgtccagctctatggtttcagaaaccaataaagaaatatacagttctcctgcaattttagttaaaggtaattcatatatccttgatccaacaaaaactacaaaaatggttagtttctagaccttcttaagagtttgtctaaattaacttttatgataagtacattttcattattttatatgctatatgatggatatgaagttaacttgaatatttcaacctctcatccagcttactatatatataaagcaatataagaagaatactggttaattagacatagatactctttctttaagaggcttaagagtcatgtagagcacataagacagataactaaaggctgttttacatgggagaactgttagagaggcataaagaaaatactttgtgaattcagaggaggaaaagactatttctagccagaaaaaaggtaagacttaattagggaattttgagcaaggcttaaaaaattgagacgacttcaatcggcaaaaatgtagggaccagcctgtgctaagacttgaaggtaaggatatatgagcatgtccaggatttgagaagaatgtggttaaactggaggttgaggagcctggaggcagtataatgggagagaatgctgcatggggaggggaaattaggactatattgtgcagcatcttgaatgctgggctaaggagactgtttagttggcagtagataagtatcagaaatattttaaatgggggaatgatgtgatcaagactatgctttaagagattaatcttcatcacaggagccacaggtagtccatttaagctgttgaaatattctccagaagagaaatgatgagaacctaaattagggtggaggcagatgagttgggcaagatactatagaagtgaataaaacagaacttgttggcaattggatgtaggagttgaggaagaaatcaaagacagaagctcagtcacttaagttgatgttggcaaggattgaaataggaagggacactagtaaagcacctgcaagtagtctgcaatcaataaatatttgtctaattaatggaggtgattattggtttggatttggatgtgttaacttgtatgtggctatggaccatctagatggatgagagccattaaaaatacagaaagatttggggcatccttatggagggggatggtgaacctgtcagaaagttcagagtgtggtgagcagaataaaaggctaggatagagccttgtaaaagccagtatttgtggacttgagggagataggaggaggtagacaggatgctgagaagaaagaagcaggagggggatgaggaaaagattgggcaaagaaagataaggaaggagatttcgaaggatcctgatagggtagaggatgggctgagttgaagactgggaaaaggacattagatttgtcagtgagaccatcgtcagtagcctttgaggaacagagtcagttgggcagtggggattagtggggacaagtccgctagttacctgaagaatgctggcttgggaaggaaatggagaaagcaaatgtaaattgtgactggactgtgaaaatcagagactagggatagggagaaggcaatgacttgaggcaagaaaagtgtcaatgaagctttcttaaaaacaaaaccggcagggcatggtggctcacacctgtaatcccagcactttgggaggccgaggtgggcagatcatgaggtcaagagttccagaccagtctggccaacatagtgaaaccccgtctctactaaaaatacaaaaaactagccgagtgtggtggtgtgtgtctgtaatctcagctactagggctgctgaggcaggagaatcacatgaatctgggaggcggaggttgcagtgagctgagattgcaccattggactccagcctgggcgacagtgtgagactccgtctcagaaaaaaaaaaaaaaaaaaaaaaaaaaaaagaaggcttgataacatttgtgcattgtgcgtagagtggttgcaagtgcagaggaaaggaatgaagatcgagggaggacgtaggagggcaattaatacactaggctctcctcaagcaggagagataggatagggtaaccatacatgcaattgcccagggcagtgctagttcacaccagtttatttacggtataatatctggatacaggatacaggataaaagtggataataatgcccaattttaatcttaaaagagagcctatttttgaataattgaattgattaccctaatcatgatgcaaataaagaagttacttgtgggaaaatatggcaaaatataaagaaataaaagatagcctggttggaaaggaagaaataaacctttgtttgaagatgacatgattgtttatgtagaaaactgaaagactcaacaacaacaaaaaaacctcctggaactaataagcaattacagcagggttgtaagagacaaggctagtatatgaaagttcatcacttttctatataccaggaattaacaagtggaatttgaaattaaaaacaatctcatttacattagcacctcagacaaaacaaaatacttagatatacatctaacaaaatatgtataaaatctatgtgaggaaaactatcaaattttgataaaagaaatcaaagaagaattaagtaaatggagatatagtccatcttcataggtaggaagactcaatattgtcaggacttcccaactgtattcatatatttaatgtaatgtcaatcaaaatcccagcaagttattttgtagatattggcaaactgactctaaagtttatatgcagaggcaaaagacctaaaatagcacaatactgaaggagaagaacaaagttggaggactgacactacctaccttcaaggcttgctataaacctatagtaatcaagacagtggtattggcaaaaaattaaacaaatggatcatgggacagaatagagagcccataaatagaccccaataaatacagtcaagtgatctttgacaaagaagcaaaggtaatacagtggagaaaggatagtcttttcagcaaatgggtgaggctgaaacaactggacatccatatgcaaaaaaagaaaaaagttaatctagacacagacttcacccgtgtcccaaaaattaattcaaaatggatcacagacctgaatgtaaaactgtaaaactcctagaagataacataggagaaaatctggatgaccttgggtttggtgatgactttttagatatgacatcataggcacagccatgaaagaattgataagctggacttcataaaaatttaaaaatttctgctctgcagaagacattgtcaagagaataaaaagatgagccacagactgggagaaaatatttgcaaaagatatatcaaataatagtctgttatctaaaatatacaaggaactcttaaaactgaatatgcaacccatttacaaaatggaccaaagaccttaacagacacctcaccagagaagatacacagatggcaaataagcatatgaaaagatactgcacatcatatgtcatcaggaaaatgcaaatcaaaacaaccatgatataccactatacacaattgaaatggccaaaattcagaacactgacaacagcaaatgctgacaaggaggtggagcaacaggaactctcatttattactagtgggaatgtcaaacagtacagctactttggaagacagcttggtggtttcttacaaaacgaaacatactcttactgcacaatccagcagttgtgtcctttggtatttacccaaaggagttgaaaacttgtggccacacagaaacctgcacactgatgtttatagtagctttcttcataattgccaaaacttggaagcaaccaagatgtcattcaggataaactgtggtacatccaggtaatggaatattagtgctaaaaataaatagctatcaagccatgaaaagacatggaggaagcttaaatgcatattcctaagtcaaagaagccaatctgaaaaagcttcatactgtgtgattccaactacacaacattctgggcaagcaaaaccatagagtaaaaagatcagtggttgccaagggttagaatggaggagggatgaacaggtatagcacagacgatttttagggcagtgaaactactctgtgatataacagtgcatacatggtattatacatttgtccaaatccctagaatgtagaagaatacaaaatacagatgtggcatggaggaagaaagaagttagatgaaaacaaaaggaaattttgagttctgaagaggaaagttgatggctgggaggtggctgcatttgaaatgggttggtttttttatattgatttgccaaaagtaagtggagagtaaagtgtaaagctgaagtggaggagagttgaaaaggtttggtaaactttgggtttgcgcagtggggagccaaaggtgatgagggcttgacaagttgctagaaggccttagcctagtgataggatgaatcactcctgtatttcatgactttctccagcaatgctcagaaaattggaagtaragatgctgtgagtatcactgaaactgccaactccatatgggcccttggttgagtaggaaggcaagtgacactagagtgtcgatgggctgggagaatagcagggaatatgagattagagtgtgtaatggctgattcagcaagagtgaaggaaagggaaaaacgaatgtggagggaggttctgagggtagtggtgaagggcatgaggaactttcagggttattgtggagggatcagttctgagtaatgacaaaaattcaaagtgtggctgagcttggggatgttgagtgacacaggccaatggaggtagaagatcattggtcttcgggaactatgaggccaaaatatcaaaatgattttgtatcagtgtcagtgtctgtctttaaaactatggaatacacctcctaaagcttttctgagcatttattccatagagatggaaagtaccttaaagataaggaagttgtttctttattttaaagatgaggaagctttaaaatcctttaaacatttttagatatatgtgatttgcccaggattacagacgtgtggcagagctagctctcgaaataactgggatctctgaatctcagttaatattgccctctagggccaggcgcggtggctcatgcctgtaatcccagcactttgggaggaggaggtgggcagatcacttgaggtcaggagtttgaaaccagcctggccaacgtgatgaaaccctattaaaaatacagaaattagctgggcgtggtggcatgtgcctgtaatctcagctacaccggagggtgaagcagaagaatcatttgaacccaggaggcggaggttgtagtaagctgggattgtgccactgcactccagcctgtgccacagaatgaaactccccttcagagaaaaaaaaaatgccctctagggcagaagaagtaattaaagtatccactcaaaaaaatcttagaacacttcctcaccatactgtgaagtagacccatgactgtcatacaccaaccaaataaatgactccacatctgtgtggaatagtatggtgtcatataagaagccaggaatggatgggtcatctctctsctttaaacacttcctcaatggcaaaaaggtgttggttacccttgaacataggttattgagtactcataacttttgtgtttgcccccaagttaaactaacctttgtggccgcagacacattgttatatcaactagaagtgaattaaatgactgagaaaggtttgcgcataggtccttagtttattgctttcacagctatatttagtggatctctccttcctcactgggaatgtcaggaaactcacaaatgccatgacagggactactagctttgagatcctgtttttgaactcagaactttgaaaagtagaaagttctttgtcctcataaaatgttaaaggaacccttaattagatgtatggaaattggaattagtcctgattctgtcactatttgtgatcttactaatcaataataagtgcctaagtttcctcatctgtagtgtaggaaaaaaattacatctggtctatctcctaggtattcaatgtgaaaactctttgcaagtaaatagtgttatgcaaaggtaagttatcactattaccatatgggatgcaacacacactgtgatrtttaagagcttaatttttaaagtgttttgaataaaacaacaaagatgactattgaaatttggtgggggattggtttaggcccttgaagtaaattatgacaacttttctcttgttatccctgtgatagtgtgtaataattctggccaagtgagattaaggcaatgtgtttcatgacaaatgaaatttctgcctttttatttctcttttaaccttaaaaaaagtttttgtattgtaaaatataacacatatacagaaaagttttgaaatgtaaatacacagttaaatgaattttaaaaagtgaacatccatgtaactaccacccagctcaagaaatagaccaatttaatttgtttttccttccatgggaatcttttattcttctgctagagggagttggctttttttttttttttttttttttttycccacagaagccatgagtagtagcaggaggcaattataagttttggcaagtccaaaatatgcgcttttttcaagtggagcaagatcaaaagtataatattagtgttttattcagtagttattctggtaatttatttcttatttcttaaactgtgaatttagtatttaggacaagtgctaggttttcagccttaaagattaaattcttcaggctaaggatcttcagatttgtgtcctttggatggaagtaaaaaaaattgtgatactcatatgtcagaaaagtcctcatgcttgattatttgttaaaagttcgatttccttnnnnnnnnnnnnnnnnnnnnnnnnnnnnnnnnnnnnnnnnnnnnnnnnnnnnnnnnnnnnnnnnnnnnnncaagttactacttaactgtaattgggctacaacttgggccactgtaggttggatatgaagtggcatgaaggattcagtgaaaaagcttcattgcattaaaaaaaagtctgtatttttaggctgggcacagtggctcatgcctgtaatcccatcactttgggaagctaaggtgggtggatcacttgaggccaggagttggagaccagcctggccaacatggtgaaaccccatctttactaaaaatacataaattagacaggtgtggcggtgcatgcctgtaatcccagccactggggaggctgaggcacgagaatcacttgaacccaggaggtggagattgtagtgagctgaaatcacaccattgtactccagcatgggcaacagaatgagactgtctcaaaaaacaaaaaactgtatttttatttgtttgattataatctactgtaataaatcctatcatgctttaagactaagttaatgaattaatagattaaaaatagattaaaagtcttgtggcatctagaaggattctcttgaatttttttatgatcaaaaaataaaggataataaacattaattgggaaagtatcttatctaatcaggcatgtctgtaaaatacagaaaaattatggctgttaaaagaaattgataaggattcatctttggtggcaatctctggttttgagatttagttcatgggacttcagattagaatttggtggatggaacgcatgtgtttactgtcagtctctcctgcaacaccattacaggcatggtaaatatgagaagaggcaacagtagagaagaggcatcagcaaatttttggaagatgaaaagcaaatagacctgtggcaactgccttastataacagaggaagttgatacctaagtgcctttaactgaggttgagaggagatgctgggaagaaacagtcactgtatccctaagaattccagaaagtttctggaattagaggctttggagtggggcataagcctgaaaatgagggataggtggaaaatctgtaagggaactagatcctcacttcacttcttctatgccataccacaagatgaagtctttaacagagactggacatgttttttctgaataaattaaagtaaaatagaggttctggatgtagggatgccagacaaaacagaagagaaaggtacaatgatcaactgaaaaaggaatttaatgaaattcggctcacaaaacagtgagactccatactcctccccaagcccaaacctaggataggtaattcagtcaggactggaggactcttctctgggtaaaatgagcagccttagaaggacttacagaaactgacatttgaggtccgacaatgaaaaaaatgacttaccacccattttttctacagtgaacccatcattcaacaaccctataaccttcctccctcttccccctacccctgtgaacatggaacttgcagtcagctttttgatgctttgttcttaaatgtaaatgaataggagacattggaagaaggccttcaataaaaaaggcaaaacccaaaacaaatgaacaacaataaaaaaatcacagaaagcagaaatgcaaggaaaagaaaataaaaatatcagagactaggattgcaacccctgcctttttttgttttccatttgcttggtagatcttcctccatccctttattttgagcctatgtgtgtctctgcacgtgagatgggtttcctgaatacagcacactgatgggtcttgactctttgtccagtttgccagtctgtgtcttttaattggagcatttagcccatttacatttaaggttaatattgttatgtgtgaatttgatcctgtcattatgatgttagctggttattttgctcgttagttgatgcagtttcttcctagcctccacggtctttacaatttggcatgtttttgcagtggctggtaccggttgttcctttccatgtttagtgcttccttcaggagctcttgtagggcaggcctggtggtgaaaaaatctctcggcatttgcttgtctgtaaagtgttttatttctccttcacttaggaagcttagtttggctggatatgaaattctgggttgaaaattcttttctttaagaatgttgaatattggcccccactctcttctggcttgtagagtttctgcygagagatcagctgttagtctgatgsgcttccctttgtgggtaacccaacctttctctctgactgcccttaacattttttccttcatttcaagtttggtgaatctgacaattatgtgtcttggagttgctcttctcraggagtatctttgtggcattctctgtatttcctgaatttgaatgttggcctgccttgctagattggggacgttctcctggataatatcctgcagagtgttttccaacttggttccattctccctatcactttcaggtacaccaatcagacatagatttggtattttcacatagtcccatatttcttggaggccttgttcatttcttttcattcttttttctctaaacttctcgcttcatttcattcatttgatcttccatcactgataccctttcttccagttgatcgaatcagctactgaagcttgtgcattcgtcacgtagttcttgtgccatggttttcagctccaccaggtcctttaaggacttctctgcattggttattctagttagccattcatctaatcttttctcaaggtttttaacttctttgccataggtttgaacttcctcctttagcttggagaagtttgatcgtctgaagccttcttctctcaactcatcaaagtctttctccgtccagctttgttccgttgctgrtgaggagctgtgttcctttggaggaggagaggcgccctgatttttagaattttcagtttttctgctctgttttttccccatctttgtggttttatctacctttggtctttgatgatggtgacgtacagatggggttttggtgtggatgtcctttctgtttgttagttttccttctaacagtcaggaccctcagctgcaggtctgttggagtttgctggaggtccacttcagaccctgtttgcctgggtatcagcagcggaggctgcagaacarcgaatattggtgaacagcaaatgttgctgcctgatcgttcctctggaagttttgtctcagaggggtaccmggctgtgtgaggcgtcactctgcccctactgggggatgccttccagttaggctactcgggggtcagggacccacttgaggaggcagtctgtccattttcagatctgaagctgcatgctgggagaaccactactgtcttccaagctgtcagacagagacatttaagtctgcagaggtttctgctgccttttgtttggctatgccttgcccccggaggtggagtctacagaggcagacaggcctccttgagctgcggtgggctccacccagttcgagcttcctggccgctttgtttacctactcaagcctcagcaatggtgggcgcccatcccccagcctcactgctgccttgcagttcaatctcagactgctgtgctagcaatgagcgaggctccataggcrtaggaccctccaagccaggtgcgggatataatctcctggtgcgccatttgctaagaccgtcggaaaagcgcagtattagggtgggagtgacccaattttccaggtgccgtctgtcacccctttccttggctagggaagggaattccctgaccccttgtgcttcctgggtgaggcgatgcctctccctgcttcagctcacacttggtgcacggtgcactgcacccactgacctgcacccactgtccaacaatccccagtgagatgaacccggtacctcagttggaaatgcagaaatcatccatattctgcgtcgctcacactgggagctgtagactggagctgttcctattcagtcatcttggaactgtccctggaagtattttaataacgattggtatagctgtaccaaaagacacagacaaaatgttgaccctggccataactgactgcaatgtaggctgggaaaaaacattgacataactgtacagtattatgagatggaaaaaaataagttagtgtacaataggacagccataattatatcaataatgtctaaaattaataaatcaagacggcagtttaaacatttaagaatatgcaattaaatgtcagaagaaattgctaaaattttaagtagtttgcctttgggagtgactggagaggtgaggcagggtattgctgtttctctttcttttcttttcttttcttttttttttttgagatagggtcttgctctgttgcccaggctggagtgcagtggtgtgattatagctcacagcagccttgacttcccaggctcaagcaatacccccatcacagcctccaaagtagctggaaccacaagtgcaattcaccacacccggctaatttttaaaatttttgtagagacagggtttcaccatgttgtccaggctggtctcaaacccctgggccagccagtcctcccacctcggcctcccaaagtgctgggattacaggtgtgagcccctgcacctggcctgctgtttctcattttaaaygtagtagtacactttgagtttaaacataattttcatgggttactttgattaaaaatagtaaaaaaaaaaaatgtaatgatgatgagtagtttggaaaatgatttacttgtgtccagagccattcctttcaatggcaaaaactgcaattacttttgcaccaacgtaatacatgaagcattattatttggaagttagattcatcctctacaactgatttcagcactcactctatctcaacatcttttggrggagcttttagaaaattcaaatgactctcctatctcaagattctgacttacttgactttgggtaagccctagggaattagtaatttttaaaagcttgctagctgcttctgataaggagctagggctaattcctctagcccaggtagattaaacatctttgcttgcttcctaaacatcttttgtattcttcccatcctgtcctctctcattactttggtttcaagtcaggtcctctctatcctcagatctgaactagtgtggtctcttttaagtcagaggaataggaggaaagcaagggagagacatgggagaggtgagttagattacccatgaataatcagagtggctgtcagggagccaatatttgtttcttttttaaaaaaaaattaatcttttaaaaatttattttaactttaggggtacaagtgcaagtttgttacatcagtaaacttgtgtcgtggggtttgttgtacagattatttcaccatccaggaattaagcctagtacccattagttgtttctcctgatcctctctctacttctaccctccaccctccaaaaggacccagtgtgtgttgtttccctctgtgtgtccatatgttctcatcatttagctcccacttaaaagtgacaacatgtggcrtttggtattctgttcctgtgttagtttgctaaggataatggcctccagctccaaccatgtccccacaaaggacatgatcttgttctttcttatggctgcatagtattccatggtgtgtatgtaccactttttgtttatccagtctgtcattgatgggcatttagtttgattccatgtctttgctactgtgaatagtgctgtgataaacatatgcatgcatgtgtcttttttgtagaattatttatattcctttgggtatatacccagtaatgggattgctgggtcgaatggtatttctatctttaggtatttgaggaatcgccatactgttttccatggtggctgaagtaatttacacccctaccaataatatataacatttctttttttccacaaactcaccagcacctatttttttttactttttaataatagccattctgactggtgtgagatggtatctcattgtggttttgatttacatttctctaatgatcagtgatgttgagctttttttcattacattattggcggcatgtatgtcttcttttgaaatttgtctgttcatgttctttgcccactttttaatggagtggtttgtttcttttcttgtaaatttaagttccttatagatgctggatattagacatttgtcagatgcataggttgcaaaaatgttctcccattctgtaggttgtctgtttattctgctggtagtttcttttgctgtacagaagctctttagtttaattagatcccacttgtcaacttttgcttttgttgcagttattttggtgtcttcattatgaaatctttgcccatgcctatgccctgaatgataggttgtcttccagggtttttatatttttttgttttacatttaagcctttaacccatcttgagttaatttttgtatattgtgtaaggaaggggtccagtttcaatcttctgcatatggttagccagttatcacagcaccatttatttatgctatttatgaatagggaatcctttccccattgcttatttttgtcagatttgtcaaagattggatagttgtaggtgtgtggtcttatttctgggttctctattatgttccattggtctatgtgtctgttcttataccagtaccatgctgttttggttactgtagccctgtagtatagtttgaagttgggtagcatgatgcctccagctttgttctttttgcttaggattgccttggctattcaggctcttttttggttccatgtgaattttaaaatagtttcttctagttctgtgaagaatgtcaatggtagtttaatagaaatagcattgaatctataaattgctttgggcagtatggccattttcacaatattgattcttcctatctatgagcatggaatgtttttcaatttgtgtcatctctgatttttttaagcagtggtttgttgttctccttgtagagatctttcacctccctagttagctgtatttttagctattttattawttttatggcaattgtgcatgggagttcatttgtgatttggctcttggcctgacccttgttggtatataggaatttgattttaggctagtgatttttgcatattgattttgtattctgaggtttgctgaagttatttgtcagcttgagaagctttggggctgaaacaatggggttttctagatataggatcctgtcatctaaaaacagggatagtttgacttcctcttttcctatttgaatgcactttatttctttcggttgtctaattgccctggccggaactttgaatactatgttgaataggagtagccagacagggcatccttgtcttgtgccagttttcaaggggaatgcttccatcttttgctcattcagtatgatgttggctgtgggtttgtcatatatcacttttattattattttgaggtatgttccttcaatacctagtttatggagagttttaaacatgaatggatgttgaattttattgaaagccttttctgcatctattgagttaattgtggtttttgtctttagtttgtgtttagttctgtttatgtgataaattacacttactgatttgtgtatgttgaaccaaccttgcatcccggggatgaagaccacttgatggtggcagataagctttctgatgtgctgctggatttggtttgccaatattttgttgaggatttttgcatcaatgttcatcagggatactggcctgaattccttttctgttgtatttctgctgggttttggtagcagaatgatgctggcctcatagaatgaattagggaggagtctctccttttcagttttttggactatttccagtaggaatggtagcagctcttctttgtacaatttcagaactcattattggtctgttcaggaattcagtttcttcctagttcagtctttggagggtgtatgtgtccagaaatttatcaattttttctagattttctagtttataagcataaaggtgtttataatattcgctgatggttgtttgtatttctgtgaggtcagcggtaatgtcccccttatcatttctgattgtgtttgtttgaccttttcaattttttggaatagttcccgtaggaatggtcgcagctcttctttgtacaatttcagaactcgttattggtttgttcagggattcagtttcttcctggttcagtcttcggagggtgtatgggtccaggaatttatcaatttcttctagattttttagtttataagcatagaggtgtttataatattctctgatggttgtttgtatttctgtgaggtcagtggtagtgccctccttatcatttctgattgtgtttgtttgaatcttctttattagtttagctagttgtctatatattttattatttttttcaaaagcaagctcctggattcattgatcttttcaatggtttttcatgtcacgatctcctttagttcagctctgatttttgttatttcttgtcttctagctttgggatttgttccctcttggttctccagttcttttagttgtgatgttaagttgttaacctgagatctttctaactttttgatatgggcatttagtgctataaatttccctcttaacactgccttagcagtgtcctggagactctgttacattgtatctttgctttcattagtttcaaagaacttgatttctgccttaatttcattatttgagattctggtacattgtatctttgctgtcattagtttcaagtaacttcttgatttctgacttaatttcattatttactccaaagtaattcaggagcaggttattcaatttccatgcaattgtatggttttgagtgaatttyttagtcttgagttctaatttgattgtgctgtggtccaagagactgtttgttactatttcagttcttttgcttttgctgaagagtgttttacttccgattatatgatcaattttaagagtacatgttttgtggcaatgagaagaatgtatattctgtgatccagtgttgtgtatatatttgatccagtgctgagttcaggtcctgagtatctttgttaattttctgtctcaatgatctaatattgtcagtggggtgttaaagtctcccactattattgtgtgggagtcttaagtttctattagggtctctaagaacttgctttatgaatctgggtgttcctgtgttgggtatatatatatttagaatagttagatcttgttgaattgaaccctttaccattatgtaatgccctttgtcttttttaatctttgttgttttaaagtctgttttggcagaaattgagattgcaacctctgctttttttttttcctccatccttttattttgagtctatgtgtgtctctccatgtgaggtaggtctcttgaatatagcacatcgatgaattttgactctttctccagcttgccattctgtgtcttttaattggggcatttagcccatttgcatttaaggttagtattgatatgtgaggatctgatcctgtcatcatgatgttagctgattattttgcagacatgtttatgtagttcccgtatagtgtcactggtctgtgtacttcagtgtgtttctgtagtggctggtaatagtccttctttgccatatgtagtgtgtccttcaggagtcttgtaaggcaggtctggtggtaatgaattcccttagcatttgcttgtctgaaagaatctatttctcctttgcttgaagcttagtttggctggatatgaaattctgggttggaatttcttttctttaagaatgttgaatattggcccccaatctcttctggcttgtagggtttctgctgagaggtccattattagtctgattgtcttccctttgaaagtgacctggcctttctttctcactgtctttaatattttttcttcgtttcgaccttggataatctgatgattatgtgtcttggggatgttcttctcatggagtatcttactggggttctctgcatttcctgaatttgaaggttggcctgtctagctaggttgggtacattctcatggatgatatcctaaaatatgttttccaaattggttccattctcctcatctctttcaggtataccagtcagtggtagattcagtctctacataatcccgtatttcttggaggttttgttcatttcttttcattctttttttctctattcttctctgcctgtcttatttcagaaacacagtctttaagctctgagattcctctacgtggtctattctgatattaatactttttattccgttatgaaatccttgtagtgtgttttttgtctctgtcaggttggttacagtactctctactggctgttttgtctgtcagctcctgcaatgttttagcrtgatttttagcttccttgcttgggttataatgtactcctttagctcagaaagtttggttttatccatattctgaattctacttctgtcatttcagccatgttgtcctcagcccagttctgaacacttgctggagaggtgatacagtcatttggaggaaagagggcactctggctttttgagttttcagtgttcttgtgttgattctttctcatctttgtgggcttatctaccttcagtatttgaggttgctgttttgttttttttttcctatttttaaaatctggctacttttctgtagtgctgctatggtttgctaggggtctgctccagtccctagtggccttggatttttcagtatctggaggtatcaccagtgaaggctacaaagcaacaaagatggcagtgtaccccttcctgtgggagtcccatcccrgggagttatggacctgttgccagcctgaatgcagcggtaggaggtagctggagaccccagttgtgaggtctcacccagtcaggaggaacaacacaggggacctgcttacagaagcagtttggccacattttttagaacagctgtactgtgctaggggtaccccctctgcccccagttggcttgggctctccaagcatgaagctggaacagctaagtcacccagacagcaaagatggtggcccacccctccttctgggaactctctcccaggaggttcttaaatctctgtcagccagaaaacaccagtgggggtggctggaggcctgggttgggaggtcccacccagtgaggaggaatggatccgggattcacttaaagaagcagtctggccatgttttggtagagcagctgtgctgtgctgggggatcccttctgcccccgtgggtttggactctccaaagcccacaggctggaacaggaaagatggcagccaccccttcccccaggaactgtgtcacagctccatgcaacgctgttgtccgtgcctggctggaattccaagccagtgtgtcatcctgtgaggtgccgtggaagtgaggcccgctgaccatcactgctgagccccatggattcaacctctttcctaggggtatgtatggaggtctaacctccctctttgcctgagttgtagttacttttgccaggaagcccagagctggattatgtaaagctcctgggtttctgtgtatgcctgagtggctgctctgccaagactccacatagttctgtgtgtcggactgaaggccctagtggagtggtttcatgaagggttctcctgacccgggagttgcaaagattggtggggcaagtgtggtttccttgggtcacacattcactccctgcttccctggrcaggggagattcccttgactccgtgtgrctccctggtgggccatcattttgccttgcttttctctgttctctgtgggtcaggttgtttccttgattagtcccaatgcaggtacctggatgtttcaattgaaagtgctgtatttactcgcccctttcattcctgtctttgagagccacgcaccctagctgcttctagtcagccatcttggccgctccctgcttcaatatttatttctttatgttttgcagacagtagttaaattgatgacatcttgaatttcctgtgcagtaattttagagctcaagttcaagtaaattttaacttaaaatcattttggtatttctttacttttaacattacctcttgggctaaatcagctgtaccctcaggttgccctcaagttatttgatctcacctggattttgccccractctcacagctgtggtgtaccaggcrttcattcaccagtagcagtattgccaggttgcaactgggatcaccagcagttttcatagctcactagttgtctatggcgagaattcttaggtgattagcaagcaagagatgaaggaatataaaagctgcatgatttcacaaggttggaagtcttattgcattgaactttcaatgaaagaaattttgtatacttgaaagaaatgtttattgtgtagatgaaataaatattttagacctcagggaaaaacttcatatatatatgtgtgtgtgtgtgtatatatatatatatgtgtgtgtgtgtatatatatgtgtgtatatatatgtgtatatatacacacatatatatgtaacaaattaaaatgtttaaaatgttaagttacaaagtttcttttgtacctttcaccagttccatcccskgcctccctagattcaactagggatgtactagtaactgtttcacttcaagccaatgccctgctccatatattgataggacttgcctctaacattctttccacgtatagggagctgtcccagctggtttctgggggattgctttacatttatatacatttatactgctggatcagtgtaatcttcaaggtgagggtttgcttcatcttatgagtgtcatttagaacttgcccacacaatgcaagaccagtgaaaatcgctaggccagtgattctcatacttgaatgtgcacagaaatactgggaatggtattacattgcagattctggtttagttagtctcaggtggggtctgagattctgcatttctgagtttcccaggagatgcaactggtctgcagaccacattagagaagcttcaggctagtagttctcaaccctggtttcatattagaattatctgaggacttttaaaaaatactggtatctgggacctatctatagtgattcggatttaattgttctaggatggggcctcagcatgatatatagatatataagatagatatataagatttgacactaatgtgcaaatcggtttgggaaccactgttacaagctctgcacacttttgctgtgatagataaagatcttcatgtgcagattttgtagcgatctggcaggcaccttactgagcttttatgatgtgaatgcacctgctttgtggatacagtccatagagaagggattcctcttcactactagattcccagagatgaggtagaggtcgctatcagagaagcacacctaaggaaaaacaaatagtcttttcattaaaaaaaacaaaaacaaaaacccagctatcgcttgatataggaaagaggtttgaagtgataaatgaatgcaaagttggtatctcttgattcatggggtccttctgttttctgcatcctttcagtaagagatcatggggaaagtgtattatatacacaacttcaatgcttcatgttttcttcaaagaagtctatatatttacttcttactatctgtgtgtatatgtttacctataaatatatgtacctgaaaaatgtctgtgtagccagaattctagtatttatttttcctttgctaattatttagaaaaaacttagagtattttctatacagttacttgtcctaaaaactaagtgacttgacatcttgatgaaagaactgttgttattcctaagttctttccatgctaatggcagatggatgattctttttttttttattttaaacttttaatttttttaaattattattatacttttaagttttagggtacatgtgcacaatgtgcaggttagttacatatgtatacatgtgccatgctggtgtgctgcacccattaactcccccgaacaggaacagctccggtctacagctcccagtgtgagtgacgcagaagacgggtgatttctgcatttccatctgaggtactgggttcatctcactagggagtaccagacagtgggcgcaggacagtgggtgcagcgcaccatgcgcgagctgaagcagggctaggcattgcctcactcgggaagcgcaaggggtcagggagttccctttcctggtcaaggaaaggggtgacagacagtacctggaaaagcagatggatgattctattggctctaaaatcataggctttagttcagttcaaatgttgttttattattattacaatgaagaccctagaagcagaaaatacaattttatatatattaaaattatgctaattgcaatttcttaggaacaataaactttaaaaccagtggattaaaattaaatataattttgctgctaagaaattggaatcttctcccttatgtacctactattttattataaagtagactttgattttatttccttaatgttatcttgtctacttcatggccaccgccttcatttggattctcattcacgttcatttcctcactgaccctcactacctcccctcttgccccttaggaatcttctgccagagtcctcggttatggaggtagtaggtctttggctccttgtctgagaaaaaagtccagatctacagagtgtcatttggagcctgttgacctacccaaccttttttccacccttgtcacttgtcatttccctagatagcagtttattcattccttagctgagatggagcatcaggaaagaaatattggaggcttgaagagaaaggtaaagaggcatacagagtggtttgggagaaagggagagtagatagcacaagggaaatgaagtgtgattgctgggcagcatttaaggtctactgagataggtgattatggatttaaagtaagattagctagcatgtggctgcaggaatacaggtgtggagaaggtggagtcttgcattctgccagggctgactaagacattccacttctcatctgtgcttttgcataatggccatggcctccatctgaaacacattccttctcttctttgcctggcaaaatcttcttttacaaccctgattgataattttctcctttttccagacatcctytcttgaccctcatgattcttggtcatctccctgtgttctgtccccatttttccatgccatgaaaggtgtctgttcatacctatctccactagacagtgcactcagcaaaggcagggaggtgatgttttgaaatcccagtttacaacatggtgcctggtacatagtagacacacataataatatatgctagataaatgaatataagatttctctgtaaattattgagaatctacacttgctgtttgaggttcaagatgaattctacttagtaatatatgacataaaaattgtattgctttaatttctattctaatatacccttaccaaatatccaagctgataagatctttccatatatacatacatatctacatgaaaatggaagaaagttaaaaagaccaaagaatatacataaatattaaatatctaggataacacacttcatagagccctgcacaatgcatggggtttatctgttctttttcgcttaggccttcttgcctggtgggaaacagttaaaatcctaagaagcatctgagccagtattgagcacattaatattttcatattgaacacgtctatattttcaagttgcactgaagttatgagtataaaaatgtagttttgaaaggttttcctcaaccatgtggaaacatacggagattttaactgctgaaacaatttcaaatagtttacaaatcaataaaagccagacagaaattaaagtgtatcttttttcctgaggttaatatcttagtttgtttgtgctgctacaacaaagcaccacaaactgtatggtttatatacaatagaaatttatttctcactgtttttaaggttggaaaacccaacatcaaggcatgggcagattggtctctggtgaggacccacttcctggtttccaggtggcacctgatccctgtgacctcacatagtggaagggactcgctggctttctgacatctcttttataagggcactaaccccaatcatgttctcatgatccagtcaccttccaaaggtctgacctcttaatcccatcaccttgggggttaagatttcaacatatgaattttgggggaattcaaacattcagaccacagcagtaagtgatttcacatttttccttaggagtgaggagacttgagttctggttgtgatgtgtcgctaaaggtctgtggtgtcagataatctgccccacctctctaagctttagtttccccatgtataaaacatgagatttggtctaaattattaccaaggtcattttgaatcatctgtgattctggaaagttatgaaacacagcctgtaaccatggtgaggaaagttgattggtggctccagaaatagacttattttctccttctgtgtaacattgatgctctcccattgaatcattctctggatgttgcctaaataaaccaatttcttgatttttttccccttaatgctaagtgctcaaaagtgaatgaaagattgtcttaaataccaaacaaatgagctgttgctttaaatgtagatctggattattgtgctggttttcattcctgttataggtattcaaaaagcagaaggttgtgatgtggtaaatttagaaactatttcacatcagttcctgctgtcttttgtgtttgtgtgagaaccctattcaaaatatatcttatttattcttcccttaaaatatgcttcacttcatttttgcctttctgctggcaacgagtccagatctataaatacttacaggttttgtcaaaatccttacgctgacagttacagtagttctccctgatccacagggaacatattccaaggcccctagtgggtgcctgataccatggataatactgaaccctatgtatgttatattttgttcctgtgtatacatacatatgataaagtttaatttacaaattaggcacagtaaaagattaacaacaacaacaactaataaaatagaactggtataacaatatgcaagcatcactactcttatgctttggggccattaagtaaaataagggttagttgaacacaagcactgtgatgctgcaacagtcaatctgataactgagatggctactgagtgactaagaatggtggcacagacagcatgggtacactggacaaagggatgattcaccacagagagggaccacatgagatatcatcacactactcagatggcacacaatttaaaacttatgaattgtttatttctggaactttccatttaatatttttggactgaagttgaccatgggtaactgaaaccacagaaagcaaaccccagataagaagggagtactgcactttttcctactaacatgtaggtaatctagtcagacacaattgtgttttaccccataagctttttggtttcttggtgtgtgttatcataagcttgtcctcagtacagtgatgtcctatgtagccctctgagaatcactctgattgcaagatctttggccatgcttctttgggattgtcccctgtccagaacactccacccaaaatgagacattttgacctagttgggacaagtacaaggctggtaggcaaagtctcactgtctgtgagcattcatgttggatccagccctttgaagtagagaatcagctcattaagtgaatattttaaatgcttaaaggaataacagaaatttaattttcactctctctcctgtagtaatctttatccaaagtatcacatcactggtgagctgtgagattagacaagttatttaccctctctgagcctcaggttcctcctctataaagtttggattttatttctaatgtgattttggctccaaaattattttttttctttatagttwtgtcatcctctttccagccttaaactggctgaaggcaattagtagtcttaaacttaagcaagtctcactcatttctgatagtacttccttaaacaaaaatggttcagttttccaccccagaggcatttgtggaatttttttaaaaaagcatttatgactattttagtttatttttctatacatttgagacaagattaactcaacaactcaaggtgttttgctcgtatacctggataatagtctaaaaatgaagcattcttattttcataaaaacaataattaaatacattgctgtgagtcttcattaataagaactaagctagtcagatgctattgaccacagccatgggaaaatattaagaaagcaattctttggtatttatccatcttgctcatcgtcaattaagaatctttattctaattagcattttcaaacagttgaaagtaaaaataaccccatggaaagataagttcatttatttattcaagaaatacctattgcttaccaaccagatagtctttggaatatcaataaacaaaacaatgattcttgatctaatggagtctgttttctatcaggaaacgacatacaataaaacaggcatagtaaacatttattatatggtttgttataaggtggtaagagcagtggtggaaaaattttaaaatagagcacagaaaggagaaatcaaaagtgggtaggaagaagggagctgggttgtagtataaataccatggtcaggaaaggagatgtggcaggcagagtgacccctaaaagtccataccctaatccttgggacctgtaaatatttaggttaaattacatggcaaaagggactttccagacctaattatggttacaaatattaaaatatagaggttaacctggattatctgggtggcccaatctaatcaataagcccttgaaagtcaagaaattatactggctagagttggagagttgtggcaacagttggaatgatccaaaatgtgagagagactccacccacccatgctgagagtgcatggcaaacgcaagaaggaaggcatgtagccttgaagagcaaagaatggcctccaatgaaatggggcatcagtcctgcagctgcaagaaactgaatccagccaaagacccaaaggagcttggaaggagatccatccctagagcctccaaaaggaatacatccctgctgtcacttggattctggccttgtgagactaagtagaggacccagctcagccaaattgtacttagacttctaacctacacaactgtgagatgctaagtgggtattgtttttaagctacttcattagtggtaatttgtcatggcagcaatagaaaactaaaagggatgggggggtgggacattaagctgatagtggagtaagaatgtgttctagacagagagaacagtgacagccaagtcctaaggggaggtacacctgcgtgtttgaggggtggcgaggggtagttggaggggagagagcagggggatgagtaggagatagggtcrgaaaggccctccaccctggatggagggtggagaccatgaagggctttggcttttgttccaagtgagctagggagtcattgcagcattttgatcacagaagcaatataatttgatgtaattttttaaaggatcatgcttaaactggctgaaggctgctcagaaaatagactctagtagactgtaaagaggaaggggagaagcagggagaccaattaggaagtgatagcaggaatcctaatatgagaggatgatggcttagaccagcagtagtggagatgttgagaagtgatcagattctagatatgtgttaaagacgaagtccatttctttgtgacttagatttgggatgtaagagagagaggagtttaggatgattccttgggttcaggcctgaatagctagaaaaatggagttgttatcaaccaagatgcagaaaactttgggtggagagatctgtggtggagggagaattggaggtcagcttggacatactgagtgtgacatgtctgttaaacatccagttaaagatgcagagtgtggtaggcagaataatggcctctaaagatgttcatcctaatccccagaaaatgtgaatatgtcactttagggagccagagggacattgcacatgtgatggttaagataacaactttgagatggagagatgatcctagattatctggtgggcccaacctagtcacagaagtccttagaagtagagtatctttcccatggtggtcagaggctgaggtgactacgggagaatggccagagagatgcaaggttgctggatttgaagatggaggaagggggccmctggccaaggaatgtgggtggctgctagaaggtggaaatggcaaggaaacaaattctcccctataacctcaagaagggaacacaaccctgcaaacccttgatttttgcccagggagatggatatctgacctgcagagctataagataatacatttgtgttgttttcagccactaagtttgtcayaatttgttatcacagcaatataaaatgaatacacagagtaagcagttggatatgagtctggaggtgaggagaaaaaggtctcgaattcaaaagcatagagatggtttaaagccacagactgaatgagatcaccaagagcatawgtagagatagagaagagaagaggatcaaggtgggggtcaagagaacttgtattgtcctcatttttaaaaaagatagtattaaggatatgtttgtgtgctaatgagagctgtccctcagagaccaaaagttgatgatataagggaaagaaaagagtttctggggtgttatcctcaagtagggcaataaagatgagatgcagaccatgtgtgggggcatttgtgattcactatggtgaaagcagacagtatagggggagtagatgtggtgagagtgtgtgtgagttctcttctgatgactcagttttctcagtggaataggaagcagctgagagtgaggatggggaaggtggtttgagggtttaagagagagaaaagatgagaaatagtccatcgggaaattgggagattagtagaagagggtcacatagattgcctgcagcattaaaggcccacttaaagtttgtggttatgaatttaaaggagtaaatgccaccatacaccgttgaaaaaagtgcctctgaacattagctatcacctccttcaaaaaaaaaaaagtcaaatattaaaagaaaatttagggtggaattagacaggaaaagcccagtattgttatcctttctatccattgtstagactcctagaagatcacttgccttagagggttaataatattcttaaataattgaatataaatcatatgtatatatatryatatatatatatgcatgcatatatatakragagagagagagagagagagacgcagggtctctgtcactcagacrggagtgcagtggtgcagtcacggctcactgcagccttggcctcctggcctcaagtaatcctccacctcattttttaatttttttgtagagatgaggttctcactgttacccaggctagtctcgaactcctgggctcaagcaatcctcctgctttggcctcccagtgttgggattacaggcatgagccaccatgcctggcctaaatcatattttttttaatgaaatttaaatgctatcttagactggttctttaaagtagcagagcctagacaggggcttaggggcaattagtttattttgaggaataatcccaaagaacagcatttgtgactggtaagagttaatagggaacaaaggaaacccaatccaaggtttgttcatcaacttggtcactattgtgggcaactgggacctgttcccacaggacaccctccaagaatgtgccttaaaattggctactagataaaattggggtgggtggtattcattatttgtccactttctcgcatcccctactggtcaagtgttgccccatggggtgttaagtctatcatgggactgcacatttgtcagaatggctcactggtttcctacagatatttcacatggtggcagagaaggcccagagtagaaagcacatgtgacagtgcagctgaagtgacattctgtcagcaagggctagaatgtcagtgccaagagaagtgatgtgaggcaaagatgtccaatgcagaaatgtgctaattacaaaagtatctcctaaaattttggccaataaaccataatcagaccctaatttcagtttacaaagttcaaatgtttatatattagactttctaagcaagaaacctgtgcatgcacattgaaacacccaagccccacagtatcattgaagcacaaagcagagctttatgtcccttctcaccccagggcttttgcacttgctaagccttcttgttcctttattctcccagatctttccatggcttcacagtcatgcaggtttcagcagaaatgttgtatcttcagagaaagtttccttactaccttgacaaaatatcccaccccatcccccacctctgacccacacttgcccagctcctttccattacactgatgtgtttttccgtatttcagagggtgacaaatgctatttgtgtatttcttgttggtccccctcacagactctatgagggcagcttgacaatagtatccccagcactgcatggaaggagccttgtctatacttgttgaatacctggttatcataattcatcttctttgtttactctttccctgtcatctggtttcatcccagccagtgaaatcacttactagatgaggaactgctgaagtactgggaattcactggtggacgagatataatccccacctcaagtctcacagtctgtcaaggagcctccagattctttttatcctgtgcatgatgtggaaccattcaaatctctttttaaacaacaacaamaaaaaaaacatgatgtggtttttatattagacgtggacaagtgagccagttaatggcatgtcctggttgtctaaagctgagtgacaaactactccaaaacttaacgatttcaaacaacagtaatcatttatctctcacagtttctgtgagtcaggaatttggagtctggtcagcagcgtagcctgtctccattccgcttggcatcagcaggggaggctcgaagtatggggaaatcatctgaaggctcgcgagctgactgtcatgtcctgggtctagtctgagactcctgggctcctcgggcacgtccctctctctatgtgactgctccgtgatgtattattttctgaggatggctgcacagacgtatatctttggaaaataaaatctccacgggcagtgttatcacaactgctgatgtttattgaggatgagggcttcctgtggtccaggcattgtgctaagtgttctccgtgtattatattatctaacccctgatgagtgggatttgtaaggtagcccttttgtacagtgaagcaatggggactcaccaaagttaaatgactggtatgagctcacaaagaacttttgaatttactggggaaagggctaatggtggtagagagtgcgtgggagccttgcttccagagggaaaatgggtttctttactgactcctctgtcaaccggtactggacatcatcctctcccaccatattcccctttttccttcctattttcagtacactttcattttgttatattaaatttcaattatattttacctgtgcccttttccattgtgaacttatttaaaaacacttatttaaaaacagacgttccaaggaaatagaaacaagattttctttgtctggattcattttgccatttaggaaagagttctcctggttctcaagatgtttcattcattcaataaatattgattatctactaagtgccagacattggggaagtgaatccacatcagtgaacaaaacagacaaaaaatacrtgccctcacagagcttacattctaatgggtagagataaatatataacatttttacttttcaggcaatgagaaatactgtggagaaaagtaaacccagagaaggggaagagaagtgtcagatcacgtcattttatgtaattatgtttccttggatttccgtctctctaaattgaacccacagtccttacagtggcccagaagagcctgcgagacccatcctgtctccctgacctcagtcccatctgctcattctcaaccacactggcccccttgctgggggaaccttggacatcagcatcgttcctgcttaggacactttcctttctctctgtgtagtcactcatccttttgataactataagaccaacttccttacctgttttgtggtctttacccagatgccatcttctcactaatgcctttgctgacaccttgttttaaatttcagtcaccctccttacctacccctagtacccctactctcctggaggtcaccccaaaccactatttcagcatgaccattggcaaagcagcatcactggctttctctctagaaggcagacctgcctacgggctgcagagttcaagcttgtctctgtccttcgatcttcttgggagttttctgtaaaggccctgattagtggcagcaccatgggaatctccctggcctattcagtagcattgaatcaatcctgagtttaattagcagcaattgccaggatgacrttttggccttgtcataccacggggcagtacctcttaaggattggatgtagttttgtgcaatgaagagcccttcttcagatgggttatttctaccccatggtctttggctgagtgtgtttcgtattagtcttcttccttttcttgccaggccattcttgttctcctcctctctcagatgttcttctctttcatcaccctctgtgattgcctcatctgagttcttagctttcagtttcactggccatgctgaccttttatgtatttattgtttttgttcagaaactgaaactgcatcacatacatgctggtttgtatctgtctctcccattttattaaaagcctagttttttcttctgtgtctctaccactttctgggtcttacagcattcaagggatcatccctgcttccacaagcaaagttccagagtctgtgaattttatgacataataaacaagtagaaaatgtacttgtcacaggttggkttccctgggaagctgactcccaggtgtagttttgtatccaggatgtttattagggaatgccctttgaagggtgggaaggcagcaaggggggcagaaaaggagttgagctgtagagccagcatggcaggagctctggaactagaatgactcctctgagttgtcttgacttgggccaagatggccaggcctttatactccagcatccctcagtccttgcatccttgggaaagtgaccttgggcaaggaggatctttgcagctgaggacatgcctgcaagaggccaacaacatccccatcaagtgcagcccaaaggcttctctgaagagggatctgatctctgcttcccagcatcttccacattaatgtacgtgaaattcagccacggctccaaaatatgatgcagtattttagttaagaagtaacattcaaggctagttttagtttaatactgaaatttgattgagttcattgaaatcctaggatgttagagtccaaagaggccataaaaatcctttatgcaaccctcttgtttgacagatagggaagtggagtaaatmaaggagaataaattttagtgtggtttccccagaaacagaccccaagacaagaatttgagagtaagtggtttagttgagaggttctcccaagaaatatcaacaggaaagtagagaagtgggacagggaggaaaaagaaagcaataaagggtatagtttcaagagaattactgctgtgggcaactggagctcaatccgtttaaggaactctaggaactagtctacacgcttcaggctatcctacccaaaggacagggaaattgggttacttgcccatcaactatccatcctccttgactgagggctgtttcctggagatgctaacttccytgcatttttgcctyactgtgggagagggcccagcctgctcccagagccagaataaaagccacaggtgttcaagaaggctgccttcagcatgtagagatgagcgtggaggagataagagggaggaggagacagtgacagtgtctgctataggggattgcctgaaactgaaccagaactctggtatcctgactactgaccagggttctttatgctgattattaatatcttcctactcagtgcccaaaattgttcaactaatctagttaagagagagtgagggtatagaaagaacaggggatgtagcccctttctgggaagtgcgcatatatgtttgaaagaagaagagaagattttataagcattaatatcaacaggtatggatgagattgcattgaaagctgtgcattgcatttgtcattgttgaggtgctgctataagggactgtgccagaagggaaggtgctgtttgttttgttttgtttttaagatattgagtcttgaacacagtctcagtgggagatttgaacataattggcagaggctgagaggcaggattgtgtactggtgaagagttgggggcctttctagtgggcaatctagtttatcctatattcatcactttgtggtcattggacagtgggcaaattaagctttggtttcttcctgtatacggtggggccaattatagaacccaattcataagggtgttgagagcattcaatgaagtaattgatgtaaaaatattaacctagagcttgctgtgtaggaggttgataacattagctgtgttcgtgattactgttgacagagggaagtggaaagggggagggtcaggtgggagaatggtcagagcttgggcaagcacaagattcaagaggcaaatggaaaaatagtgtgaagtggaactcctgagacaccagggaggtgatggggaaagttttataaaagtgagaagagctgcccacttagaccacattttcatgggagctgtcttagtttgttttctgttgctacagctgaatacctgagactgggcaatttataaaggaaagaaatgtattgcttacgtatctggaggctgggacatccaagggtgaggtatctggtgagggccttcttgccggtggagaccctctgcaaccttctgagctgggcatcacatggtgaggggctgagtgtgtcagctcargtctctcttcatgtaaagccactagtcctatcatggtccccccagtgacattactaatcttaattacctcccaaagccccacctctaaatgccatcaacgtatgaatttgaagattaagttatcagcacatgaaatttggggaactcattcaaatcataaacaggagcttaggtcccatcaaagtgaaagcttaccaggaagcccaatgtgtaaaaaaaatacgtaaacagagttatgtgtttgaaggtggagtggagaactatcttctcccctcctccctccacccacagcccctgagggaattctgagaaaccccaaggcagcaagaacaaaaacaatgtctgcagaaagattttttaacactactgtaacacctcatttgttctgtattgagttcattttccagaaaaccttttttttttttttttaagaaacccatcttggatgaaattttgtttaagtgtgttacttttttgccttcttaacaaggctgaatgaaaaccttttaatctgttcttgatgacttttgatcatagtgatgaacatttagttaaggttctgtgctttaatgtggtgatttccaacctcagagtttctgaagtgttaggactgtttactggcactatgcttttgaaattgttagaagaagcagggtggcatcaagggagggtcctggacttgggagctacactgtccaggattatatccaagccttgcattttattagcattgtgaccaggtgtaaccactgtttgcctcaatttcttctttcccaaattgagaagaataattgtactcaccccctaggattattgtgagaaataaataagtttttatatgttcactgcttagaaccatgccttcgtataaaatgtgctgtataagtgctatgatgatgatggtcgatgtatctgtttttatggttcttctgtcttttttgatgtagtatggtggttaagcctatagactctgaagcaaaataacctggatttgaatccaccaccrttgtgatctgattgttttaagctgattaatttttgtgaacctaatgatttcagtaaaacccaccattgtgaccttgagagagttaatttaattccctgtgattcagtttattcttctgaaaaatgaggcaaataatacaaagtagttaacaggattgttgtgaggattaaataggataaatttgtaagctcttagcacagtatttggcacatagtgagtagtcattgcatagtagtcatcgttactgttaattattaagagtctaaatgagggatactgtaatataatatacagccagaagttgttactatatttgactccttagaagccttgaaaacttccttcttgtacttaattggtttcagtaaatagaggttattaactaattattgatcttaaatagtaagttattttcaatgtgcttcttaatgttggggcaaggggtagttaggcgaaaagattggccatttatgctatataatatgcttactatcaaactgtgactcaacttttagatgtatttatgttgaaggagttagatcattctttgcttaaaaggttgacatgattaatgttcagatgaggggatattttcaaaggaagaaaaacagtaaagaaatgtgtttgtgaaaatgactaaaaacaatacagggtaagcagcaaattttctgatgcagaatacaggccaaacatgatttaaaaaagcaagaaagcaaacaaacaaaaatggtgactttgcagccttgatggaggtaggggcaggggaagtgttcagccacaatctaccagcaaaccccttggtactaagcattttaagggctaatttaggtctctagagcatgccactatcaagactaacccattcagcagggctttgtatagccaaggttttgttgcatattaaaatgtttaggaaaattatccaacatttgggaataaggcacaggatgattgcatgtctttttagcgttttcttggagcacttaagacaccagccaaggatcatgtaattctctaggaaagtgttcctttgtttaacttactttttattaggatccagattctatgaagttagatgttaatttgtagattgatcccctgcaaatgacttctgtctgataaagaagataaccccaaaggttatagttttattgccctataggatagtaactagttttatttctaaattagcaatcttatttcagtattctgtatttcattgactgtatacacttcagtctttcctgtattacattgaaccagatgtgccatcctgctgagttaaaataaatttttgacatatgcttaatatatatttgtacaagactcatgtttttaatttcttgaaaactacatcctgataaaccaattacctatattaatggaaattttctttcctattgttttctccgttctcttaacatttttcatttccattgtaaatttgaaattgaaataaattttatagatcctttattcttttaatataggaaatttgtcaacaacaaaaacaagtgtatatatttaaaagttttaaacctgattgttttaggctgtttaatttttgtgaacctaatgatttcagtcaggcccacatttctgaaatgagcgttatgtcagtgtaagctaatttaacacttttatgcagttttcataagtgattgtacaactatttgatgtttattgttgagtttgtgaagcatgacaccacaaaatcataaaaatgttctaatatctgtaaccagaactacagataaggtagtgataacatttagagaacatgtttttgaatagtgatttgcttttataaagattaaacttttagaattatgaatataatgtttaatttgcataagtttatgtctactctttactcctcataaaatattctgacaagctttgcaatagggaagagggctgttagggatgtcttagatgggattccagcattggataataaattgaacttattggattaggttttaattaaaccttaatctgaattaaggttttcatttaaaaaaaaacccttacattagtctttcctccttttgttagatgattgcactcaagtaactgtcttatatacttttaactaatatttacttcatagatattaatttaattcttctagaatgcagactctatgatgaccaggccaggtctattttatttactattgtgttccaggcacattttyacaaacagcctgtttggaagttactaaaacacagaataagtggatatgaaatggtagagccattcctttccagacaaatgtttggttctcaagtcttggaagatgataaacatgagaacccagaaaatgcaaagaaggagagctcygaggataaaaatagttgtacataacaaaagttccccactgccaactcattattgccaygtcctgccctttttctctctcttcttcagatttcttcctcctttcactgcctcactgtcttttgtgaaaatgagtactttgggtattgttttgattctgtgtaggtcaccaagatcaagaaatgtaataaatgcctttatctgggcacaatggtgaaagatttccttgatgttcaagttttaacttctttctcataaaataccagaaataatgtttcttaaaatttggaatacatagctatatttaaattgaaatatatctgtaaactatctagcaaatttgtaatttttatctacataaacaattttttaaaattttatgagtaaactaagttatatgtaacacagtttaggatgctaattcttatggtccagtgagattagatatgtaaatacagttattttaaatgcataaaatatatttatctctctcactagagtcactaagttgggcaaaatcttcatttctttgattttccctgtcatccagccttgagcgcaattgttcccaaatattttgaaaggctattatggaacgatttttcttttttctgggtttctaaatgactggacacacacacacacacacacggcccagctaacatggagcaaattatcttccacccttccccaggtcagacstggcactctaaatccttcacagataatctgtgaataaaaacacacccatagacctagatattagtattttaagtgacaagggtatattccagcgttcattcataaactgagccaagctcaaagtacatttttcctgaagaaacaatgttgtaaacattataaatgatgagtttctcaggccaggccacacaagtcctatctaatctgtgtttgtccattgaactattcctctatccatcaaacacctagagagtttctactttatgccagattccttgccctgcatcggaccacatcagaatcattgacagtatatttacagttaataaaactgaggctgggcgtggtggctcacccctgtaattccagcactttgggaggccgaggcaggtggatcacttgtggtcatttgttggtcaggagtttgagaccagcctggccaacatggcaaaaccctatctctgctaaaaayacaaaaagtagccaggcacggtggtggatgcttgtaatcccagctacttgggaggctgaggtgggagaattgcttgaacacgggaggctgaggtgggagaattgcttgaacccgggaggcacaggtttcagtgagctgagatcacaccactgcactccgacctgggtgacggaccgcgactctgtcaaaaaacaaacaaaaaaactaaaagacatggtataccaacattttggcaaattttggcaacagcctaacaataaattggctttttaatcttttatttataaaatagtgccacaaatatttatcggagaactactatgtgccaaagtctgtgcttgccactaggaatgaaagaatgaacagggtagctcctgccgtcaaggagctgaacagcagaactcggagaaaaagcaggtttgattaaaggagaatggaaaggtaggtacagatgtaacatttggaaaggatggtgacttctgtgaaaacaagcactagatgttataaataagactcttcaacatgtcagccatgataagccactttttttttaatctcaaaaaccaaagagacaatttctgatgcctttgaatgaggattaaaagagagtgggagggagaaaggaattaggcagagtatgaggaagatatcacctgggatgaaactagcagatagggaaagcctgcatggagcctcagtgcacttaggagagtacacttggctgcatttccccacagtggtcccttcattatgcaactgcatagttgccagtctggagcaagaacactgggtaggtagaaatggtaggaggcagcagtcagcttagagtaaagggtgaagtctcagtaacagcctgtgggggactgcatggtctctgacttcctttcctgtgctttctctgttgctatctgcacctaagcatgatcctgcctccatgcctttgccttacattstgtattctctgcctggtacrctcttcccccagttacytgcacagtttagtcccttacctcattcagatctgtgctaaatgtcacctaactaartccttctctcacctccctattttaaatagcactgccccagagtccctcttggttttatttttctttacagcactgatcactacatgaccttatttatttgtttattgcctatttccttctaggatgcaaggtccgtgagaacaggggctttgtctggttcagtgctatatttcctgtgctgagaacatagcctcgcccactgtagaaggaattaggaggtgcattttctaagaaggggcttttagcatagaaagacccttttcctaaaaaccttttaaagaggaattttttcagcctatcatttacttttatttaagtttaagaccactttgrtgagggatgtgcagctggtggtagtattcttctactagagagttgtgagatgagccatttgtcattgcattacttttgatcttacacattttttctactttcagcttcttgagaaattcaaaatctacagaaaagttgccaaaatctttcaatgaacatccgtatatctctcacttagattcactgtttaacattttgccccatttgctttatctctgtatatacatgttactacaattttcaatgaaccatttaagaatagttgcagacatgaccctttacctctaaatacttcaggttgtatcacctaagaaaggacatacagttactatattcaggaaatatggcattgttataatagtatctaatgtgcagacctgtcccaatgatatcctttataaccgtaacaataatgaagtcccaattcagtaaacagtctaaaatcacacactgtatttagttatcaaatttctttaatctttctcaatttttctttgtctttcatgacattaatattttcaaaaagtgtaggccatttgttttgtaaaatggccctcaatgtggacttattttatgtttccaaatgatwatagtcaggatagacattttkggcagaaacattacataggtgataatgtatcctcctaagagcatcatctcagcaggtacataatgtcagattatcccattattagtgctgttagatgcaatcactgtttaggtagcatccaatggattgctccattgtaggggtaccttttcccctttgtaattcataaatttatagtatcaattttaattacatgaaattagactatctctgtcgagagacactgtacaactatgtaaatatcctctacccagcaattttttcttaatagttttaggatccctggagattcttgcctgaatcaattaataacatggttataaaatagtgattttataattctttcattccttacataagttgacattctcttgaaaagaaggattcttcttttcctcccatttgtttatttgcttgcttgttgtaaatatggactcatggattattttctttaaattcagtgtgtatgatccattcctcttgctcattttgatgctcagattgtcctagagttggcctaactgcactgatccttggcatctggggagagaaatacctaatccgggagtaagagacatttttagtccattcacagtgccacttcaattttaattgtgtatgaatcacctgagggcccagattctgcattcctaacaagatccctgctgatgctggctgatctgtggaccctggctgaagtaacaaagctgtaggcatctatgggctcattggaaagagccaaaacacattgctctccctgtattagtatgaaaaattcacctcattatcatggaagagaatgatctcttggaaaatatatgaactctggtaggcataggggagagaggatgtgtaccccacctgcttgagtcccagaaatcatgataatgaggaatgctggcctcacactcatgcttattttgcatttctcttgaaatcctgaactttcagggagctggcttcagttcctggtttctgggaccatgggaaatagtgacaccttcagtgttggatgtgtctctactggttttctgttagtcaaaccaaactttattggtaccaagggaagttaggcagtttaaactctcctaatcaaaaagaaaattctcatttttcttgctctacaggagtgtgagctttctgccattggtaggtttcagtggcttttggtcaaatactttttttccctttagaagtaatttataggcagattgttgttggcactctggccatttgtagtttgttactgttacattcaattcatttattcagaattccaaatatacatagtattttgtgttgcttagtaactttgtttaatgtgtttacattttatcattaatccttttttctgacataatttcatttactcatctgttacctgactaatattttcccttagtctattaattatgttaattgatggaatcttccttgtagaagaagagaactttacaagtgagggacttcctctttagacatctgtcagaagtcagaggatggggctgggcacagtggcacacacctgtaatcccagaacttttgggaggctaaggtaggaggatcatttgagaccaggagtttgaaaccagcctggacagcatagtgaggctttgtctttacaaaaaaaattagattaaaaagaaaaaggaattggaggatatctgctgataggagtagagtctcccagtttagtagctatcaatgggcattagggaatgaatgaatgaatgtggaaccaatatgcacgtgtcaactcaatgagattgacatgtggaaattgagattcccaaatgggtgtttttgtttgttgtttatttgttccttttaatctctaccatttgtgtcttttgccacttctggcatttagatggatagcagatcatagcattagacaatctataaagcttgggcaatttctaacatataaatgatttgcaacttcatatgccccactgctctcccttaacgcttccttcttcctagagggatgggcccccacctgtctgctgggagatttggatgcccttccccttatagcaaacagtccacctgctgcttgagatcctttttctgccagagagtgctacagctcttgtgcttcctggtcacagcacacacttgtgttcattgaacgatgtggagttagtatgaattttattccccatctctcaattatgtatatgttatagaagggtgtttaacgtagccacactgtgaaaacattactcattacttctaaatgctaacctgcaaatctagtaagatacacaaggtggtaccttttaagtcatctttgttagaggatgccacctgaagatctctaatgtcaaactggataactggcttagcttggtaagagatcattggcccacagaggttcagtggttgctatagaagcacagggccagcagaacctgtggtctgtggaggccactagcacagtattcaagggctttgtcatggctgggtgccaacacctggtggaaagcagaaaggctgtttcagtgcctctagtgctagacacctggtaccaattaagaccacacctgctttctgttgtttggtctctccctttctctgtcctgtgagctacatttaaaaataatcactgaaaatcagaaatgtttccagttctaactcaaatcactgtaacatctcaaaaatgtgtatgtattctggagatagtagtaagtaggagagcaagtttcacctattctctcatttaaatgtagaagaatatctcattttttcagacacgaagaattatcagacaggtgagctgcttcacacaaaaacccagaaggactatagtagcatcctttacagtgcctaaagcagtgtttaccatgcattaggtaccaggaggcatttgttaaataagtggtccaaagcaaaaaggaatggtaatggagtgcattttatttttatttcccatcttatcagctttttgcaagcattattttgattacagcaaacttaaattcctcattagatttccaatgctatgtttgaacattgcttgaatgtcagtccctggctgtttatgcacatgtatacaatactgacttggctatatccagacacagaaatgcatactttgttgatgtgattagctggggggattagttgttaagttaaagaatattctggaaagttaggtggtgcctttaatgtctgaaagtcttgaaatgatttcttagagtgtttctccatgacagtgtgctgtgttactcttactgtattgctatagaggttattgtaaatttatccagcatttgttgaactcctgccaggttcccagacctttgcaggggccatacttgtccctgccttcaggtcatttactatcggacctgatctgcataaatgtgaaacgtcagtactgacccaaaaccaacttaggtatcaggttcatgggtctccagcagttcttctatcttcataggaagagagattcctatgaggtagaaaggctggaagaatgaacagtttaggaagatgtagaattgcaactgaatagtgaagaagaggaagaggaggaggagggagagcattccagttagtagggctcagtgtaagcagaagctagaggttggcattcacactgtgttcaagggatagtgagaagcctggtcgagttgttaaagtagaggctttgtcttggaaagagtggagacaaggttatagagcttatctggaaccaggccccagaggtgttgcagtgctgcagagcaaagtggtctggaaggtggttgagcagcactagaatggttcaggagctgcaccacaaggttccactcctgcctccattgtcaggagcggtgtgatactggttgttgcacaaactctctgtaccatggtttcctcatttataagatgaggacaatgattttatttatcttacaggattgctataaataataaatgaaacaataatgatataaaatgcttagcaaaatactgtgtacttggaagagctcattccattgttagttattaggcaagggagagacataaagctgatactcagaaataggttaattgaagcttgagaaagctttgtagagttgctttttgccttcatgcagttgaaaatgaggtgttagaggtgtcaccataatttccacactgttcaagaaggcacgggaagatacatgaaatattgtgttgcatgaggccattctgttttcactacatccccatttcacagatttgatgaacatgcttaaaagccattgagaaataattagatcagagtaatttggagtgtctcttaatagtcacagagaactcttattctggtcagttagaggaaatgaattatttgaccagaagtagctggaagtttggtttgcttttttttcttgattaatattttatattgtatactcagaggctactctactgacaggaatgagatagagaattgaatctgaataaatcaaagtggaaaataactatgaatatccctagaagaattgtacagcctaacttctataacgcatgcccactaattctgtttgttgtgttcacactttgggtaggtaagaaaatggaaggcagctctctataaaaacaagagttctgttttaatacccttgcttaaagtttttctttaatcttaagatttttttcttagctggaagtaagtttaattcatctattgggacgtttggatttttattaagcttgatgtctyctctctttgtaaagatctgaataagttgtgcttcagactcatcttcatggtagaaactatgaaaaattgtacagcatatgtgttatactatatgaagaaataccatcttcaaaggataatattacactcacattttaatcacaataagttatacttcctaagcgctgctcgtctgtatcttattctgaatattatagatgtttccatatctggtatagagagtgttcttatgtgcagtttaagtgttttcaagggtcaaagcttgtaaatgctaatagtttcttgtttagcactccaaatataatgccatgcatttactggcatgaatagttattaattagtattaattctatttgtgttttagaaaatgtaagagagatgaatcaaaagtatgactaatatttgaaggaacacatctatttcttagtctgtgcagtccttaaaatatactctacatatgtgtggatatatctgtatgtatttgtatatacgtatgcataagtaacctctatttggctacaagtagcacaaattagttctgtgtcagatattataagtatgtttctgtactttgttcattaacttcattattttatttcattaaaaaaaattttttttttaagatgaagttttgctcttgttgcccaggctggagtrcaatggcgtgatcttggctcactgcaacctccgcctcccaggttcaagcgattctcctgcctcagcctcccgagtagctgggattataggcatgcaccaccacaccaggcttttttttttctttttttttttcttttttgtatttttagtagagatggggtttctccatgttggtcaggctggtctcaaactcccgacctcagagaggtccccacctcggcctcccaaagtactgggattacaggcgtgagccaccatgcccagccacttcattattttaatgtgccacattaagtgttatgtactacatgttaaacattaaacagatttattctaaatgcctgctatgggttgaattgagtctctcaaaaagaactggtgaagtcttagcctctgctacctgtgaatatgaccttatttggaaaggtcatattctttgaaggtataatcagtttgggctcttaattcwgtaagactcatgtccttataagaagaggaaaaggccaggcatggtggctcatatctgtaatcccagcattttgggaggccaaggtgggtggattgcttgagcccagaagttcaagaccagcctgggaaacatggtgaaatcttgtcactacaaaaaatacaaaaattatctgagcatggtggtatgtacccatggtcccagctactctggaggttgaggtgggaggatcacttgagcctgggaggttgaggctgcaatgaggcgtgattgcaccactgcattctggcctgggagacagactttgtcttaaaaaatatatgttaaaaaaaaaaaaaaaggagagacagacagacaaggagaatgtcatgcgaagatagatgcacagagagaagacggccatgggactgctggagcagcagcacaattgtatgttgtaggggaggggaaatttcctccagggaggttgctaccagaagaagggactatacttagctacctctgggttagagaatttaagggaactgatcaaattcaaaatcatggctatgagaaataggagacaatttgtccaggcatatacaggagtaattataagaacaaagcaaaacaaaacgcagcattaagaacccagttgaccgggatagcatgtttttagtagtactgatttgcagacaagcacactggtagaggagcacgacaaacagatgaacggccaaaaggctaaagaactgcagataaaatatgataaccagaacagggagaaagttaatgatgattgcattgggtctgaggaagacaaggaaggaaatggatccagagaaaggttgattaaactaaattgaaaggaaggagcagagaatccccaaatggggatataagccagaatacagttattttaaaatcaatttatgcttataagttcaggttcttattacagaaagtctttccttttctagtagaaatgagtgttctacttaaaatttcakacttcactggtaaaaaggattaaagaatcaatggttacggaaatattgtaaaggaaatggtgatctatgaatttataatcatgaagttctaattaacttcctcatcagtacttgtaataagcatcaccctcctaacatttttgggaagtgaaatatcattgtaagttgttcaaatcaggaacaacagttcttgacaaaatttgctttttaaaagcataaatgaatacatgtaattacttctcttccttggatttttcttcagttttcttaatttaataaattaaaatggtgatattgaaatgacctggtatcaaagcctcgtcttttataattcagtaatatagttagtgaacagacctcggccttggtgacttgtgtgaaactccctgttcacagattcttcttaatatgcatataatagtcatccaaaaagctagaaaaggagaatacccatcagcagcttaaattcccttgtttaacgtcatagaaataaaaacatacgtccttctccttaggaggctgtcaggtctgatctagttcccatagctgcaatattcttattttcaaatgtgccctcttttgctgagtttgctgtctttgaaaagagatgggatggggaaatctcaccacccagcccttcagggcctcttctcagagctgctgatactggccatggtgaggctggagttgacagctaacacacttttcttctggccttctcatttatcattcatatgccattaccattcatttgtaactggcagagaaggcatttaggactaatttcttgtccacccatagtgctgctgctttcaactagagtttttgtcacttgatcatgttccatttaacactttattaataaattttgatatattgctccataattgtttcttgtggataagtctgtactccctggtgtgattttaattaataatccaagaaggcagggattatgccttaacacatcctttgtaaggatcccttcaagaagaaacccaagaaagaatacataggatcagttcttagaatgtatgctgcaaattattcagtttttcaataaatatttgtttgaacacttgctttttgccatccactctgctggggatatgcatagccaagcagtggatccactgggcttacactctagtgggagatccagatgagtaaatcagataatctaagagtgtgatatttgatttgagaggataaatgtgagttgttaatgtatgaatatggtctgtgtgtatacaggaggctctttggcagctttgaggtgcctgagaaggtgacctttgaaatcagctaatacgtgaaaggatatataagggttggtcagacttagcagaggtggggaagggtgaggggataaagacagggtggtcatttggaagaagacctatctatctagctagagagtaaagaggtacattatggctggagcacagagttcaagtgggggtggggaggctgtagaagtgacagggatttgaaatggccttattaagtgtttgggcattattctagaaatgaggttttttaaagccagagagcagcatgaccctcatttatatagttagaaagagtcttctggctgtgctgtggaagatgctttggcagaaaagagctgtaggaagactacttaagagttcattgagtgatagagagtagagatgatagtggatctgaacagggtggctaaacagagggatttaagagacatttagcaagggaagtccttgaaaattattggattgtgggagaggggtgcagtaagagaaagacatggtcaagggtgattggaagttctcttcaattctctgttccccctaccattcatmcatcattgattttaggcaaacatagatttagagttataatatycatggtcataaaataaatatatgtgggccttataggatatttatgttcaattgtaatattttctgtaatctctataggaagacctttatattacagagagtagtttatatgttaaagacactctatgttaaaatattaaacagcattcttaggtacataatttataataatgaaaatttcaccttttttttttgagacagagtctctcgctctgtcgcccaggatggagtgcagtggcacgatcttggctcactgcaagttccacctcctgggttcacgccattctcctgcctcagcctcctgagtagctgggactacaggcacctgccaccacgccctgctaatcttttgtatttttagtagaaaaggagtttcaccgtgttagccaggatggtctcgatctyctgacctygtgaccacccgcctcggcctcccgaagtgctgggattataggcatgagccaccgcacccagctgaaaaattcaccttatttaatatttcagggagatgtaaatatataaccacatttttcaatcactttatgccattaaaagtcagttaattaatgatgtatttattaggcaggaaaggaatgtgaacttttagtatagaactacctacccacccattgcccagccataaatgaaataaaaatctagatataaaatataaagtaatgaaaacatttgttaggtatacagatagctccaagtagttccaggagttattaagagccatttgtggttctctggaagagtctgggccaatactcaaatgcagcagttatcactttgggattatgcttctttgatagggaatcaccagtggccacttcactcctaagtgccatctagacagttatttccctccctctcctcatccattcttccctttctttcttccttgtttaacaacaacaaaaaaagttaatctgtgtgttttttctttagacatagtctcgctcttgtgccccagactagagtgcaatggcgcgatcttggctcactgcaacctccacctcccaagttcaagtgattctcctgcctcagcctccctagtagctgggattacaggcacctgccaccaagcctggctaattttggtatttttagtagagacaggatttcaccatgttggccaggctggtcttgaactcctgacctcagttgatctgcccgccttggcctcccaaagtgctgggattacaggcgtgagccaccgtgcgcagccctaatctgtttcttaccagacctcccttaagttctgggacttgagaagtactctcaagaggtattaaagaaaactgaagctgacacctttgtttttgtcttggctctaccagaatcagctctgtaattatgaattcaccacgtctcaggatcttagtttctacatctataaaatgagaaagctgaagtacattattgataaggggactcccagctatgattcctttatcctgcctttttttttcccctggtcctatatccagttgcttccaggcctttgtttacttgagggtcccactggtacttgagatttgttatcagagctaccccctcatgttgtagcttccgtcatttgtcctctgcccccactggcagtaccaagggactagactaggataagtaactggtaaggagccccaggggagaaggagaggcagcacagcagctgaaagtcccatgttttaatacttacaatctgcatacacatcacacaggaaagttgccatttcacaacactccctcttaccattacttttgttattattcttattttattattattattgagacagagccttgctctgtctcccaggctagaatgcagtggtgcgatctcggctcactgcaacttccacctcctaggttcaagcgattctcctgcctctgcctcctgagtagctgggactacaggcgcatgtcaccatgcccggctgatttttgttttagtagagatggggtttcgccatattggccaggctggtctcaaactcctgacctcatgatccgcccacctcggcctccagaagtgctaggattacaggcatgagccaccgtgccaggcctattattatttttttaaccagacaaatgtttgagtttttaaacttgtttttattttgtgtatgtgtgcatttttttaaattggggtgggagagatggaatggttgctgaagaaggcagaggcgaaaccacagaacacttaactgcaaactattgctgcctctccagacacaaagcacagattgccttataaaagttgtagttctccctcatcccaagtccattctggcaaccccacctccacattcatcctcaggtactgctgtatcacatgtttgtgaccccttccttcattgctaacatatgtcatcctaaaacccgccttcaagctcgtttccttcaggaatactgattaaccgcacttgtgataggtcaccaatcacatttaagccccctggactccactgttattcttttaaaacatatttaaaatagtttcagacacaaaataggaacataccaagtcttttttatatattgtggtatatatacartaatatcctccaatgcatattttaaacacactagaagtagtgtgatttttcacatactgttctgtttagtctctgaaatgaaagatatgaagcataaagagtaatcctactgccatgaagtcatttgacctcacttgttttctcttactcattgtgattgctgcgacttatgaagttgatcccagcttggacattggcatgtatgattttggaaaatggttctttaaaggactatacgaatgtggtcatttaaagctgtttcagaaaatgtattgctcctgctgtgatattagaaatggcaatttttaaacatgtcaaagtttgattataaaatggatagtttaaaaagctgccttggtctactgcttgatgcattttaaatttgaaatggatctttgaacacttgtatggctgctggactagcggttgttaagtttgttggtttgccacttagagtcatctatcactttagtaagaagttaacgcctatcagttggagaaaaagcaaatattttgcattgacagtctcccctaccctctattattgtcattttcttaagccatcactgctctggcttctagaatacacatttttgaatgaaggtttttgcagtgaatggtctcttgtagatctcaaagtccactagaaagagtactgggtttttgtttgttttgaacgttgcaaacagtaatgcttctttaccactcaccctccccccaccctcaacctccacaacgttcccgtttgcttatagttgtcaacgaccatgatctctggacccacactacagtaacaagtttgtcagtcattttcagataaggtgcaaatcaagggatggctttgtccccacttcggcgcaggtgggacagacttggggaagacgcagctgaagagacaaattctcagggtgcgtcagtctcatcactgaccgttgcttttaaaccctccagggaaaatatgccagtcattgttatgatgtaaacaaccgaaggggtggacggtgaggataagaagaaccgagataatatttggccagagctacgttgtagctacagggagcctgggtcggtctagctgcacctgtcgagcagcgnnnnnnnnnnnnnnnnnnnnnnnnnnnnnnnnnnnnnnnnnnnnnnnnnnnnnnnnnnnnnnnnnnnnnnnnnnnnnnnnnnnnnnncgagtggccccacagagccggcgcgctcccgcctgcagggggagagcagacggggcgcggggaccggccaggccgcggcgggtgctgtttctgtttcactttccttcactctgaggccggcgcgctggcgggcgaggagcggcggcggtggcggccgctgggtaggtaccgggcgggctggggagctgcagggacgccagactcctcacccaagtttgcgcctcaggcgagagcgacacctccagacacctgccctggccggcccagcctggagccgggagggcccttcgggtgcagggggctaccgacccgggcgggggcttcggagctgtgcctacctcggcggggagagcggccggctgcggacgccggccccgggaaaggctgctcgctctccccggcatgagcagcgcgcccgcggggcctgggcccgcgcacctgccgggcgggcgcggctgtgctgggaccccacagggctgtaccgctgggtcctgccggagaacgcagaaaagttcccccttgcccccgccccgtcattgcaagttcttgcttcccttaactgtcttggtcacagggctctgtgccttaggatcttagtaccaccccaggtcgggaccgtgcatttcctcttccagaggactttctcttactttggagtttcatggcaaacctgtgggaaaggcaaggcagttaatcccaacttatagaggaggaagccgagacccaggcacagatatgaaacgctttgctgaaggtcatacagggctaagggccagaaccctgattccctgtcttttaattatgcttgctttctgttacacgcacgaatacggtttcccaagaggataggatgattacacgtagagcctattccctgcacattcgcagtgggtatgtgttgatggaatgccttttacctttccggttgctttatatttaccaatgagttaacagctaagatgggggaaagttcctgtttatagaatgcacttaggaaaatcaacacctttcatgttgtgttttctgagaggatacatattttacagttaaaaaaaaaaaaacctgagacaggaaagtagcattatccaggttatatatctactaaatatgaccagtttctattgaagagtttttggtctaacaaagaaggtaaagaatgaacgtaactataaatcaaaataaaaggcaaatgtaataggaaagaagtaagcattaaaaactagggaaagattgcactgagaatagcattggagaagggcttgaaggataggtggcatgcagacagaggagagaaagggcgtgttggatagagtgcttagaacctgcagaggagacggtgggagaggagtgatcccttcaggttgaagaaagttgttgaagggtatattaaggttaacctgtagaaggtcttatgtgacagaatgggaaacatttttctgtttgtaaagagaagacactgacattcgttgataagaagacccaaccaagtgtcacaaaataaaatgtgcctcgtagcagaatataagatggactgcaggtggagaggtgatatacaagtagagcagccgggcatggaatagcagaggatatcaacttggtttgactcgtaactggatgaagggttaaaaatggaaatggggaacattttgatagggaggataattacttaagtttttaatcttttaacttgtattggcagggactcctaatagagcagtcaagcagatagttaaaatgcattagtgaagaggtaaagatatcaaactgtagttaatagctttgggtgtcattagtatagaggtgrtagttgaggttccaggactggatgaatttgtcattattctgaattatagcagatttgcaagttaatgatacaatgaaggatatgttctattcacctattcacccaattgggaacatgtaacacttgctgttaatagaatgacattaatacattatgaggaatttgacgcttttttctctcatctttttgaaatgattttggaaacagacatgggaaagcggaaccaccaaaaggagtgatgatcaacgatctcatgataaatctggatgctagttctcatgcctcaggacatcctactgggaacgacacaccagctcctgggatcagactttcatctacttaggacccctctttgcccagactactaaagccagtcttcactagccacgaatggctacccaaaggaaacacttggtgaaagattttaatccttacattacctgctatatctgtaaagggtatctgatcaagccaacaacagtgacggaatgcctccatacatgtaagtattcttttaggttattatacctatcaaagtttatatgtacattttgttcttttaaaattgccatgttttgtttttatctatgttgtaacttttaagaaatgagtattctaataattattttaactttgaattttcagaatatttgtcattgggttgccagtggcatgaaattttgcttttatttgaatctcagtagttgactcttatcacattgtaaaatattctaaaaatcataagcatattatcagttatggtttttttaagtgaactatttcaggtttttttattttaaaaatttatactcaaggaattaatctcagagattcttttaggatatgcagactcttaattcgctggttctcaaagtgtgattcctagactagcagcaccagtgtcattgcaagttctaggaacttgttagaaatgcagattatcaggccctaccctagatttaatgagccggagactctgagagtgggcccagcaatctgttttaacaagccctccaggtgattctgaagcatgcttaagtttgagaatcactgttctagtagtagtatacctgtggagctcctagcagatttcattctcaactgtcccattggaagaggaagaggcattttttactgccacttatgccaagattacacatactctttgtgtttctgccagcatgatttcattttttatttcagtgaaagtaattccagtaagttatagtttaatgcctagtatgtgcaccaaaatgagatatatgtgatttcatcttagctttacaatgacctgggagcattttggagtagatgtagggggagagagaaggtatagagatttatcttcattttatggatgtggaaactaatggataagtaacttgtctagtctcatagctaatgagtggtggacctatattcaactccaaaacccatgctctttaatataccatggtactttttttttaatttttatttttgttagtaagcctcgtttttcagctattcttgctctgctgaactgacttaatgttataccagtagttttaaatgaatgctagatggaataatctggaaatggttgaaatggcaaattttatgttacatttatgttacatttattttaccacaataaaaaatagaatcatctgggaagctatttaagcatacgcatgctcaggaccctgcctggggagataaagtgggtcttgtggtaaggcctgggcatgcatattttggaagagctccccaagtgatgctgatgtatactcctttggggtattactggcacatcttattcaattagcaattaactrtgtactatcttgtattactagtttgctgttgccctgtattgttatttaacttgaacagttaattaactatcatcgaacagacatttattgagtactttgtgtgtcaggcactgtgctggggcatgagataataaagaagggcacaagataataaagaagtctctgctcaagaagtataattctagtaggaaaactaattttaaaaatgccatattagtgataagtagtatgaaaaagaacaaagcacaattgtagataggagacatggaggtaatttatagtgggtcagcctctttgatatgatgacatttgaacagaaacctgaagggactgaaggactctgtggatatatgggaaagcagtctgtataaagggaaaattaagtacagaggccttgagatggaaatacacttggccagtttaaggaatagcaaatcagttagaagcctattactgtaggaaagctaaaagattatagggcctccaaccaaggctataagatatgaaatggaggtggagaagggtggttgtattgtggacatactttgaaggaagaaccaattggctaccctagagttatattctacttccgtttcccgtttcaccaagcatggaacctggacccagtccacagtgtgttttgttttgcttctttgaacatttgttcattgtttttaatttttggattcatccagcaaaaactgtcaactctggatgatgagaagaargcacaaactctcgcatttctatctatatgctacaaattttatatatgtcctttggaagaaaattttctttgggtcatagtgaaatcccaatttaaatgtaacttttaaaaaaaggaaaacaaaagattatagaagtataaacaattagcttataagcaaagggatatatatatttttatatatatcatatatttgatatatatcatatatgtatatatgatatatatcgtatatatgtatatacgatatatatcatatataacatatatataacatatatatataacatatatgtatgttctcaacagcaatttaaagcctaaaggggtaaattaaatgacagtttaactgcacatgtcatcctagcctgaaagatcccttggtggccatcaagcccttttactgagagagaatgaacattgtagaaatgtgatttaaatacaatggtaagtcccaaatgtggcctttatcgtcaacagagaacacagaaagtagagtaaatgatggagtcaggtactccatcgcatctctgaggagatctgaggattccggtagcactaatctttatgtgctctcaggtcctttgatttctgtattgtttgtttgtatttatattgaagcttataggtgaaaactatcccacttgcaaggtattcccttgttagaaatatttatatacaaataaatacaaatatatatttatacaaataaaagaatactttgcaagtgggatagtttttgcctctaagcctcaatataaatacaaacaaatattgataacataaattgtactgcaaagcagtattcctcagcctttggttgggtctttgatatgtggtgatatcctgggtttcaactcttctacaaggttttcttatatataatgtaggatagatacagttgttctgtgatttgggatggttataaaattaaataaccaaatggaaaggcagaaagtgagaaatgttaagtgacattgtagtaccatataatattttagatcttgacttaggcatatacaaagagtatcttacttattttatacaaagtctacaatgttatgatgctacaaagaatgagttaagaatgagtaaacgctaggttttatggagactcataagaaaatataaagattttcgtcttactattcaagtttgaaatgcataaatgaagctttataattggtgtgcaaaaccagacatagaacctgcccttctggactctctggtcaagtgaagaaagagtaatcaagttaagaaatgtaaaaaaaaaaaaaaaaaaaaaaaaaatgctgttaagtgcaatgaggaaggacagactatgatataatagcagatgtgtatcaggatactggagcagaatgatatgcagaagaaactcgtgttttgtgaaattcctgaagctacagaccatatgccatctcaggcagatagtagcccttgagtagtggtgcagaggactacttatgggtgggaggcagggattattagtagctctctctgctttgatatgggtaaatgaagttacttcagtcttctttcagatgactatgcaagtgcatttcaactctttctcacctcaaaccagataggttggtgcttccccattctctcagagagaaattctggatccagcactgctgggctgccctgtagaagtaggtagatatagaaagaagggcccaaaaggtgagctcatcaaaaggaaataggaggtagagatggtggggcagcccagggtcctggcaggagatgcaaaaaatcacatcatcatatcacatgatcacatttgatgacatgatcaaatcagcatcataaaaaccacatatttagactcttcttacctactaatacctcttcccttcagtaggccagggacatttgataaatagataaaatttttaaatgagttaaaattttcaaacacaaatgagttttagctttaaatgatcacttaatactagatgaactaaatccgcattaaccatggtttacatggctgtgagataattttaatagcctaacaaaccaaaggaaataaacatgtctgcacaaataattattttattatttaaactaagtaattacatatcaggcactttgctagccactgggggtagagtggtaaataagataaatgtgaaatgtatacactattgagcaaacttatatgccaagaagaaatttctaacacatgtatttagatgtatgttcttttttttttcctgtgtgaactcatgtattctgagacttcagctacctgtgctgaggcctctcaaatctttatttttggcttacgcttttcttcttagctgcagaatcctactggatgtccacttggatgtcctgaagccacctgaaactcagcatatctacgaatgatcaaatgggatgccagcactcagttatccaagcaagaaatatgctccatgcttgactctttaccctcactaacaaaactgggcaaagtcctgctggtctctctctttaatacttctcaaatctgtccctttagtttcatccctctgttactgttctcattcagattcttattacatctcaccaaagccactgcagcacattcttaactgtgtccaagtggtaataattaaaaacagcttactgtctttatcattatcactcttaacccaccctaaaatttcctaaaggtatcccgttgacctcaggatacattaaagctacttagtggtgactggtttctgcctacyacttcctcccctaccacctaacactcacacatacaaatacttggttcaactgtttgctctccttgaaatgaatgcctcctctgtgcccagctagcagttacccatcctttaaaactcatcccctctaagatgtgccctaccacctgcagatttgggttaagtgtctcaataaaatcttaaatgaataaatgcatggctaataagttattttattgtgtatttttcctttcaaagattcaaatgcagtgataggtaacttgaaacatgtaggcattgttggttaggaattacaaatttaggaaaactgtctcctaggatctacataggcatctttggggtcttagggagagggagagactctggactggggactagaaattgatggccctagattaagggatgttctgtctctttcaccaggtgaccctggtgaaaagagaaactttaaagctgcttagaatgtatctgctgggtggtataggttgttgatttaaaacaaaagactttttacttaaactaaggacaaaggggctatgttccagcagctcaaatgtgaccaatacagtgtattggttcttaacccttttgtggtcagaggcccctctaagaatctagtgattctttcctcagaaaaaaaaaggatgtttatagacatagaattctgtggtacagaaaaggaaagctttctttcctctttctgctcttcagagattatggcagtaatccctaacctaagaataaattatttgcaaaaacacattgttatactaattttttaacttctacaaagaaggattaattgataatatagttgacgtgataagagactcggcgattttatgtggtaatatgtaagaaggaataacttaaccctaagatgatagaatttaagtattaccaaccatttattgtttttgaacaaatatcataaatatacaagtacttaaggtacagaaaactcatgatgctttgrtattcaatatttgaaaatcttacactacatacacatgctactcaaagtgaaacctctgaattagctgcatccaccatcagcaacatcacctgggaacttattagatagaagtgcacattttggggcttcactgtagacttactgaatcagaatctctggagagaaggccagaaatctgtaataacaagccctgcaggtgattctctggtacactaaagtttaagaagcactgctttggatcagacatttataatactagcatcctttaaagtaggcagtttgtatttttaatcatagaattgttaaaataaatgctaataaaggaatgaaatattagctattgttttattgaatgtttgttatatgaggcatcatgagctttacattcattgttttattttacccaaccaagaacccttctagttaggtggtattatttaagcatcaacagatgttcattaacttttacatgtgccagtcatcattctagccactgcaacacagcaataaatagaacaggcatagtctgtgccctcctagaacttaacattctaataggacagacagacaataagtaagtaaagtggaatttcaggtgctatacatgacaaatgctatgagttaaaaacagaaaggtctttcttggaagtggccatctgagcagggactaaaataataggaaggatcaatctatgaaaaggtttaagggaagagtatttcagattcttattccagaggtaagactgagagaggttaagtaacagccagtaagtgctagagctgagttctgaatcctggatatgtgactcaggtacatctacataatatatgttatgacattttcctaattttatttttcttttttctgctttattttctaaaaatttttaagcaacatgttaattaaaattatagctaatatttataaaataaacctgttttcatgactatgtaactgttgtgtacccaatactgatctgaatttatgattctgaatgaatagccattttaatgaaaaaaagatataaattgaactttacmataatgtattcttaataagaataaaaaacatgttttggaataaaaaaggccaaaatagaaattrtatttatcatctcagtaggtgcaaatataatgttttaagatatactagaaatgatgtcattggtatactgatgttacatatttcaaacagtattttggcagaaactagtcattcattcatgaaaatgattataatgttcattttgatgactttttttaaataagaaagaataattataggtcttaatcttggtgtcatctattattagtaataatgttaaagttatgtgtatagttcgtttagcttttgaaactatgtattagatagcaaggaatgtttaaatagttgagcaaaacgtcatagtggacactaaagcacacaaccaaaggacaacagacgtaaaagagtgaaatcttctatattgacttatgagaatatatcttggtcagaatgagttggaactgatatcagggttgggttgagaaaaagtgtgtaacctaaactacaaaaatattcatggttagaaatcatgatcagtatacaggtatgtttaagagtctagcacaagggttcaatatamgcattataaacaattagtctaactttgtaaaaaagacaaaagataattttcatttgggtactctgaagacttctggtgttttatatgtactgatttttaccagtattatgtcaaaaatttaaagccagggcgcaaagctatattttctcagaatatatatgtattcatatatacatatatgaatatataatgtcagaaccactgacattcaattaatagcaaatgatcaatgttatattttagtttatattgaactaacatttatttatttagagacagggtctcactctgtcgcccaggctggagtgcagtggcaagatctcggctcactgcaacctccctaccccacttccatcccccacagtctcaagcgatcttcctatctcagctttctgagtagctgtgttacaggtgtgcaccaccatgcccagctagttttttttgtattttgtgtagagacggggtttggccatgttgcccagcctggtcttgaactcctgggctcaagtgatcaatctgccttgacctcccaaagtgctgggattataggtgtcagccactgtgcccagcctatttattttagagacgggatcttaccatgttgcccaggctgctcttgaactcctggactcaagcaatcctcccacctcagcctcccatagtgctggaattacaggcatgagccaccagtgcctggcctaacttactttaattgtcaaaaaaattactagtaaactcagtcgtctcccttgctttagttgaaaatgtaagcttctttcccacttgactgcaatagtaacaygtgtagggtctacaattttggttccctttagtattcctaaccattgtgttctcatttatattataaatcattactaagcactttgtcttccagatacaattctgggcacttgagactcatcaaacaacctagtaggcaataaacaaatgatagtgtgtattatattaggtgataaatactgtagaaaaggggaaagtcaagctgagtaaaggaaattggccagtgaggtgttacaattttaagtaaacttgtgttgaggataggcctcattaagagtgacttttgaacaaagaccaggtaaaggagttagccagatatctgaggggagaggtgtttcaggtagagggaatggcaagattaaagactctaaagcaggagtgtgactgagttgttgagaaatgacctgaggcccatgtggctggacagcagtgagtgaaggagtgttagaggtgatggggttgggcatggccgcaggcacgtggcgcagttcttgtagagccatcttaaggattttgcttttactctgagagaaatgaagatccgtttcaggcagggttttgagtagaagaattatatgatctgatttatgtttaaagraatcactcagactactatgtcgaaagcagacctgttagaaggccattgcagtaatccaggcaggagatggtaatggcttgcatcaaggtggtggtaaaaagtgatcagaatcttgataggttttgaaggtaaattcatatttgctaatgaattgtatgtgggtcatgaaaagaaaacggaatgtaagttataacatattcaaatggagatgtccatttgggagttggacttatgactcctggaatgatcagcatatgcatcattatttaaacaatgaaagtttgaagggaggaccaaggactgagccctgaggtaccactaaaaggagaaatcagtgagataggaggacaatgggaatagtaggtcctggaaggcaaagtaaacacatagtgttgaggaggtgggatcaactgtgttaagtgggttgagtaagatggggttgagaatagattcctagatttagcaatgcataggtcatggtggtcttttcaagagcagtttcaatgaagtggtaggagcaaaagtctggataatgtcagcagttggaaatttttttattttctggttttgaatattgtactatgaatacataagtatttaatcttaataaagtaaagaaaaggtgaaaaaagaatgggaagagaggagttaaagagaataagtgccactatgtcaaggagttttactgcaaaagaaagcaaataaatagctaataagggaagtagggtcaacagaagtggttttagggggttctttttgagctggggaaatatgtttaaatgtcattaagaatcttcagtagatggcaaaagatgtaagtgaaargggacaattacttgatcagtgttcttaggtcatggtgacaggatctggcatatagggcagaggatggctttagataggtacatgaagttctggaaataggcaagaacacaaagtatagatgctagtaggtgaataggtgtggtggtaaaagttctctttgtttcagttattttattgccttttgttttcagtaaaatagaggtcctcagtggagagtgaggatggaggaggatatgttgggggtttgaagagagaggagaaggtgtgaaatactagcaagaagcgtaatggacttggggcattgagtatgacagcctggcagatgaaggattcacttgaggttcatggtcatgaatttaaggtgagagaccagtcagcatggttgcatgtttttcttccacaaagttccactgtaatcttgtagaggcagagtacatagagagttagatagagttagccaggattagagtttagttgagcaagtatgaccaaagaagagaggggaaggggagtcgaagtacaaaagagtgacactatcaagggtatgtgtgaggaattgattattttgattgatcatggaatttatattggtaagacggggaatggggccatcccagtcttaccactgagctaccagcctctatgacctaggggtcccactcgactctacaagccagcctacagaagtagggtaaccttttctgccttcctagacctttcaaggtctgctggcttgctcagtctaagatccccagaccatgcttaaacccccagactctttcctaaccctgttcaagcaaggtgtgcttcgctgcctgttgctttgtcttagcaaaaaataaaaataaaaaaaaataaagtgttgtactcggtagaagaaaatgctgtccttagggttctctgtgaaattgcaactcgtgtaggcctttgaaagaaagaaacgtgccaatatayggcacattatgtaatatatatacacatatacatacataagagaataattagttcattatacaaataaaacaagaagatgcatggaagcgaattacagctattctggattttttaaattagtgttagtttcacgtgtaagaataggtatcaaaagcaggaaactgatgcctcttctctttgaacatgaccacagtttacttataaactgttagcagataagagttttcaagacaaaaatgtatataaaatgagcattatcaagaaatgtgtatgaagattgtgaactgcttaaggaaggaagaaaaaatatgcatctaagttgacagataaaaccaacacacctaaaagattttaacaaaggaagtcagcctttggtcagttttaataaacagagcattactaatcaatgaagacacttaaagacatgagagaaaagattattattgttttatcatcagtgatagcagaattagcactcaagagcagaaatttgtatattttgacatcaaagctgggaagctcactctctgtgatacataagagacctgggtggaccacacatacatctaagatagcaacaacaaatgaccttgtaccttttgtgtagacaccctcaagaacttgaaaataggaaataggatagctctataatagttcaactatgaaatcaacatgtaatagtgcatcagagagggtatatgcaaaggaattgggaagcggcaaaacaaaatagcttctagaccagtgggactgtactggaatgtaaacatatgtttatttttaacataaattaaacataaagtgaaggaaagaatgcataatagaaaarcattggtcaatcttggacacacacctcaccctaccccagtaaaagaagtgtactgcattcaaagataggctcttcctattcaggtgaagaaatgtgtcttaaatttcatacttgagttgcaagactatcactagggtagaaatggctagggtagaaatggcggcagggaattaataccagtgaatgatacacatttcaagttccatcggcatgatatctgttatttatgattagtgcatcaaactaatcatagtctgatattattcagtattgtgatgctgattctccttatcattttatgctcatccagtgatctaatttatggtaaagctcacatttattgaatacttacaagttaccagacactgtaaaccagtaaactttacatatattatctcctttaagcctcacaagaaccctgtgagataggtacctttgttatcttccttgtacacagaaacacaaagtagtttgcctaatggcagtactgggattcagatctaggcagtctgcctcaasattatctggaacaactatgctatactaccttggtttttcatgtatatctgcattatagggagagtacattgatcacaaattctttaattattttttgtcctgtcataatggtttcttaatggtgataataaagtgacttctgatgatggtttagcagagagccaaatcctggaatgggcaccctaacgatggtactagtcagtaagatttttgtgactacctcctactctcccttggccaatgtttccgagtcatcttttggctgcatcagtgagagggttttgtagagttatagtcctggtgcgaatctcctagatattctgaattaattggtctgggatggagcctgtgagtcaattctttaaaaattctaattagtgatcatgatgcccatttaaattttagaaccactgctttagatgatgcagtggccatttttctattaatttgtccaacaacctggttcaaatctaacaaatggtaaaagtagggaattcacttagtaaacattaggcaaaagtttaatgatgtttgtgatgaggtaagtataaagggccaggtgtgctggttaatcccagtactttgagaggctgaggcaggaggatcgctttaatgtgggagtttgagaccagcctgggcaatatgggaagatcctgtctctacaaaaattttaaaaattagccgggcatggtggccgatatggtttggctgtgtccccacccaaatctcaaattgaattgtaactcccacaatttccatgtgttgtgggaggaacccagtgggaggtaattgaatcatgggggcgggtctttctcacgctgttttctcaatagtgaataagtctcacgagatctggtggttttaaaaagaggagttcccttgcacaaactctctttttgcctgctgtcattcacgtaagatgtgacttgctcctccttgccttctrccttgattgtgaggcctccccagccatttggaactgtaagtccaataaacctctttcttttgtgaattgcacagtctcaggtatgtctttatcagcagcgtgaaaacagactaatacagtggcccatgcctgtagtccaaactactcaggaggctgaggcaggaggatcacttgagcccaggagtttgaggttgcagtgaaccatgatcatgccactgccctccagcctggatgaccagagtaagaccctgtcttaaacaaagaaataataataaattaaaaaaatatgatatgaatttttgattttgatgccagggaccaaatgttactaattctgagatgcattgcatagtggtttggattttaggcctggagctgcgcagcccagggatggataccatctttgctgcacagctgtgcagctgtgagcagcctagtcaggctctccagcactacattcctcacttgcccagggaggatagtaactgtycatactataatccatacagagtcctgaggccaagcctgatatttggttagtgctcattaaatattagctaagttgttacttaagtgttttcccacctgaggacatctttggtgagcctaactccctttctgacccaggtgcttcttatggctatagaatctgtgtggagtagctgttgagaatgaagactctacttggtctgtatacatagtcttaaccttagactaggacctttttaacatcattcttggaccaattgggttaaccactacagcagttgagcagttagagagtttrgcatgaaatctttaagatatttttaaaatgtgctgtactgctagtatggacttcaaattataaactaagaattagaagtgagttttgtagtratgagaagttttttaagcatctatgggaaaccaaatcctcattttactttttccagtttcaccgagcttcaagcctggatttcctcaggttctaatttatgtaaggttgtgctttaacagtttttaaaagccatgtgggagatgtatcttctagagatttttttaaaggaacaaataagctactgaaaagggctctatacagtttaaaaggagatctaattgtacaagtagacatatttaaggctcctaaaataaggagtaagacattctttttctatatatcgtagatctatgtaaataaagtgtgaagaaaatgtatcacacatacattggttaasaaaatggattcaaatattggttttaaccactaactagcttcataattttagacaacttgctcaaattctctactcatttttttatctataagaggccaaatgctatctaattaataggaatgtagtaaagattagattattaaattgtattgaattaaatatatgttgattaggacatacatggacatagtatgttggatacatgtgcatatttaagataatgcctggtacgtaaacccattaagtgttaactatgataataacagtatatcatccaaacgaaaaacaaagcaagtcagaatattacattgttcagcatcttaaagttgtcttttactaaaactatctgaaaaaaaattgtcaggaaagacagtttttggtattagtctctgaaaaaatgctttcaaaaattcacatcaacgctgggcgcagtggctcacgcctgtaattccagcactttgggaggccgaagtgggcagattacttgaggccaggagttggagaccagcctggctaacatggcgaaaccccgtctctactaaaaatacaaataattagccaggcatggtgatgggcacctgtaatcccagctactagggaggctgaggcaggagaatcacttgaacctgggaggcagaggttgcagtgagccgagatcgcgccactgcactctagcctaggcgacagagtgagaatccatctaaaaaaaaaaaaaattgcatcagaaaacctgaatttatgtctttttgctgccattcaccagaataggcaggtgactgggcctattgaaacctcttttttaccagcaaaagtggaataagatactgcatctcagttgttggtgtgaaaataaactcacctcttgataggagggattctgtctccatctagaatagcaccctttggtagagataaaatgtgagccatgtgtataatttaaaattttctagtagccacactaaaaaagaaacaagtaaaattaattttaataatacatttaacccaatatctctaaaatattttcatttcaaaatgtaattaatataaaattattgagattacctgttcaggttatgtctgaagtctagtgtgtattttatacttacattacatctgaacttaaactagccacatttcaaatgcttagtagccacatgtggctagtgacttctctattggcagtccagatctagaatatagattagtattccccatcactgttcttgggtactggtgctgctttgactttaagcaattagcataactttactctttaatgtatgcacctttggatgcttgagccctacaactctttcatgagcagcctagcttagtatagcttctgggaagatagggtcctacccttagccttttggctgatccaggtgaggacttgttctgggcatgtcacatacctctctatttggtcaagcctggtagacaaccaaggattgccaacccgttgagtacaataaaccttttgaactacaaagatcagagctccatgtcaggatcaggcttttaaaatccctccactctcatttctttctttctttctttctttttttttttttttttttttttttttttgcctctttcccaaatttcagagacttatctatcatccctgggaaaagagcaaataccagcaatgttctgaaggaattcagcttctctgtcttctacttcaacttggcataataaggcagtcctctcttcccaaagattattttgacttgagaagacatttagaaacccttttggggacaagaaatttgggaagaaggcaaagtattcaattgtacataatagctctaggccaagcttttatatctaagctttttctttttttaaggttttctgatactgtcttttacccacattttgtgagaattgtcatgaaggcagtgttatcctaatagctgtgtgtaatggtgaaaagagagagtatgggattcaggtacattcatccaacaaaactgctcaaatgtcaccaacttaggggtcgctaaggggtcctatcctgatcactttatttaaaatagctgccggctcccagcaccctgtctctatcttatttttggggggcggagggggaggcaggtaaaaataccacttatcactaactaaaattgtttgtttgccttcctaaataaagtataagctccataagaatttgggctttgttttgttggcccctgcatccccaactcctaatataatgtctagcattcagtaaattcctattgaatcaatgaataaacaaacaagaggaaatgctgctaatctctgtatgtactaaatgattttaaaattagatacctggtagagttcttccatgaccattgttgctttggtcagtatatgtgatatgtcacattttcaaacctaatctcatttgtaagaatcctagtgtttagttttgaccaatcatttaagtaaacttttagatagtgttgatcttgaggagaaagaagtagcttgaaatgcagctgtgaaaggggagtaggagagccaatctataccatgtgaaaatttcaggttatacggggtaatagaatggaggaggagtattaggatgaggaattgaattaatattttatagttcaggtactgtaaatattgtctaaggttttggggcaaaacattggcatagtatgtagtagaagcttaggtgaaagatgagagagatttatagccagagagattagtagtgtttgtaggaaatgtgggctgtataggcttgtggccccaaatccacaagtcatatttccattgtctttgtttagaatctttatttgaaattttatttatccctgtcagtttttcagtcattcttccaatttacctctcatgcctttgtcccaacttgataccattattcatacttcgtgctccatggaattatagtacctatgagcagaaactcattacaccctgccaaggccagcaaagtccattgtgactcccagtttgtccctggagcaccctgccaataaaagtaatgcaaacaggttgaaaactctcaagttgtattgagttatttatgttgcatttaaataaatgtttagcaaaggaaataaatgcagacttagtttttatctttttctgtcctacttctttaaatgagaagaacctattttatgtaaatacaccagcttttttagtttaatatgatgatgagtagagtagtatttggtgtgtgaatgcatttaagaaaacaataagcaaaataatttatgctttttgtttgtggcagtagacttttattgcagttgggtgttattacagtgttacaattgtaaggtttttgaagcttaattaaataatgatattctacttgtagtaggtagttttaaggtctgtttctaattacacttagtttaacattaaatgagcgttcatatgatgcrttttaacctaacatcttctttcttcttagtctgtaagacttgtattgttcagcactttgaagatagcaatgattgcccaaggtgtggcaaccaagttcatgagacaaatccattagaaatgttgaggtaaggatgttatattttacagttcatctaatttacataaattgaataggctcttaatttttattgtatgtcataatatttcatgttgtcttgactcagttaatataggacttatgattttcattttaaagcattttattttaaagtattttattaaggagtattaaaaataaggttttacatcttaaatatttaagaaatacatttccaaactaaaagtacaactttctcttaggctgtaagagtgactttaggttacaggtattttcagtattttaatagtccatgttatgttgagctacatggtagtagaaagagggagaactcatagaaagactaatattaggactgttaattttttaatttaccatatattcaaaaagtatataaacatttatgtaaaacctaaaagatttttttaagactaccatttacttacccctcaactttagcagtataatcatatatatatataatatatattttatttatttatttatttatttattttgaggtggagttttactcttgttgcccaggctggagtgcaatggtgcgatctcagctcaccgcaacctccacctcccaggttcaggtgattctcctgcctcagcctcctgagtagctgggattacaggcatgcrccaccacattaattttgtatttttagtagagacagggtttctccatgttggtcaggctggtctcaaactcccgacctcaggtgatctgcctgcctcggcctcccaaagtgctgggataaaggtgtgagccaccacacctggcctaatcatatatttttaaaactggaagtggtctatgagattctaatccaaatccctttattcccaattaggaaatctagagaagtgatatgacttgacttaaggtttcacagaatacctcaaatgccacttcccagctacaggccgtatgtcctcaccactagacccattttcatttcattgttcccaccatagctctaaggcagatcacctgtgtgatctttaagaaactactcgtctagaatccagtgaaaagcacaaaaggggtcaattccggagttagctttttagtacttttgaacttaaaaaaaaaaaaaagaagctactcatctaaagatagagctagatagtctctggaacctttcataactctcttatctgtgtgatatttgccatcattctataaatctggatttgcaaatcttacatttcagccttttgtttttcaagtttaatgcctgtttgggataatttgtctacaggtaaatgtctagccctgtggttttcaaagtgtggttcccaaaccattagtatcatgttagaagtgacaggtctcagaccacacatcagacctgctaactcagaaactttgggattggagatcacttcgtttagcaagctctctaggtgatgctaatatatgctaacatttgggaaccactggtcaactctggtctgtaattctgagtaagccttgttctggttagatctatatcagtgcctctcaaccaggagtgattttgcccccgggatacatttagcaatatctggagacatttttggttgtcagatctgggtgggtgctcctggcatctagtaggcaggggacagggatgctactaagcatcctacaatgcacaggataggccccacacagcaaaatttatccagcctcaaatgtcagtagtactgcagtaaggaaactgaataaagcaaacattttctctcaagtaattcttttcttaattttaaaataaaaaactgttaatatccagttgtaatgaaagattattaccaactgttaaaatctataataacttatttttattaaaataaaaaaactgttaataaaaacagacagttaataattattaccctctctgttcttaaagggccacatcataaggcaatttatcttaatcttttgattctgaccattagatacctgaaggaatccagtcactgtttaatcaaacccgctcccttggctaaagtataacatcatatattttttaactttttatttggaaataacttcaaacttagaatcccccaaataaaagtagtacaagagccacttgcattctgttcacccagattagcttcttagtaacgttttatctcgtttgctttatcatgtgcatatgtgtattggatgctttatttttttctgaactatttgagggtaagttacatgtgtcatggccccttactcttaaatgctttagtgtatatttcctaagaataaggatattatattacataaccacagtatgattgcattggtataatactttaacctaacttccatattccagttttcttaatttaatgatgtcctttatagagatcttttcctcctaaaattccaccgaaattaccacaaaggaatttttttaaagacataaactcagagataataaaaacaagatatcctgtatctttgacagctgggatagctcctcatgataggttctcagtaaacactttttaaaggataagaagaaatggtagcagaagagatgtcagcagaaactgaaagctagaaagcaaactggtgatggtgatagttgagcggacctcagaggcctgagtataccaggagactaaggaggttgtggggaggggaagatctttaccaaagtttcctacagcaggcttctttttagccaaaactaggtcacatgacagccactaggtaaagggatgtggtgggttttgaaatgctttaacaaatcatgaattatccctgaaggtggccacattgcagccagaacataattggattttgttagccagaaataaggggaatttaggctccttcattagaagcctaaattgcctgtgacacatgtagcaaraaatttaccttctatgtactttttctcagtaagctattgggagatgtgctggagcataaaccaagaaagaataaatgactctagcatagcagagaggtgaagggatatgacagttgtgcagcaggcctggggaacaagcagtctgtatttgtactctccagtatggtagcaattagccacatgtggctcttaagcactttggatgttgctagtgcaactgaggaatgggatttctaatttaatttcaattaaaacctgaagcagtgtaaatatttttccactaaatataactttattgttcaataaataaaaattactaaatgtattattaaagatattttaatatatagcaaaacattaaagttagttttatataaaaagtataaagtactggtgttaatgttcctactaaaaatttaaaattacatatttgactcacattatatttctattggtcatcacttatatagacaatagaaggaagatggagagctccatgaggggaatcattcattcagcaaatatttactggatgcctgctgtgtctgggcactattctaggtgcttgaggtccattcgcagacaaaataaagatctttgcccttgtagatttaatatttttgtagtgagagacagtcaataaaccatataataagtaatttatatggtatgttagaaagtgaaaattgcaaaggcaagaaagaggaaagtgttgtgaggtgaggaggtcaagagtgtgaagtgggggcagattgcaattttaaataagatggtgatgataggcttctgtgggaaagtgagacttaagcgaagacttggagactgtgagaggttaaccatggataggtctaggaaagcatgcctattccaggtaaagggagcagccagtgcagagtgcctaagtcaggagtgtatctacgccttgttggacgaccagcaaggagacctgggcggctggggaacagtgagtgagggacagaatactgggcaacaagagcagagagatcatgagattccagattatgaagggccatgtaggccactgtaaacattttatcttttactctgaatgaaatggggagcctctgcaggattttggttggaggattgatccgatatgaacatgttgatgactgtgttgagaacaccgcgcgtataacaaggcaagggtagaagcagggagaacagttagaaagtaattgcaatgaccctggtgagcggtggtagcagtagaggggacaagaaatgctcatattctgaatatatttcgaaagtagatccagcaaggtttgctggtggattggatataggatatgggataaagaaaagagttgaacatgactttaagatttctgacctgagcaactggaagaatggagttgccattaactgagttgggaagattaataatagagcaaggaaggggtagatcaggacttcaattgtggacatgctgagttattcatttcagagaagagaggaaggtaagtggatatatgtgtctagaactcaaagggagaggtctgggctggagaaaaacatttggtagtcttcaacatatagaaggtctttcaaactgtaagcaggatgagatcacttcagggagtgagtacagagaggcaygagtaaaggaccaaggattgagccctggagaactccagcattaagtgttcagagagaagaggaggagccagcacaggaaactgagaaggcacaaccagtgaggtagaggaaaatccaggagtgtgtggtgctctagaagtcaagtgaagatagtatgtatatcaaaggagacggagtgatccacctgtgtcatttgttgttcatgggtacaagtaaggtgaaaactgagaattcatggttggatttagcaacatggagttcatcaactttgaaaagagcactttctttagagctgtgaggccaaaaacctaactgggttgttttaagagaggaaaggagggagaggaattagcaacagtgagtatagtattgacaactctttcaaggagttttgctacaaatgggagcaaagaaatggggtgggggggtgctgtcaagtgcagccaagaaggttctttattttgttttgatataggagaaataatggcgtatttgaagggaatgatccagtagaaagcagaaagttaatcatgtgggagagtagggaatgcaatctcacagcctaagaggagacactggttttcagtgggagcattgacaaaaaaaattgtagcaacaggcaggcagacagygagtacatggtgcagatgctataggtaggtatggtggccggggcctgtggaagtttgtttttcattgctttgacatttttcattgagaagaaagtgtttgtcagtcaaaattaaggatagaggaaagggatttggagagttagggcgagaaaaaagcgtgttgtccaggggagtgagaggatcagtgcacttgtgagtgtagtatgattcctggcaaacttaaaggcatgtttgtgttgtagttaggaatttgaaggagtatggttgtgtttttatccagccatgggtgccagtgcagagttgatggaaagttggatttaacctgagttgtactaaataattttgagcaagtaagagagagacaaatcaagggtacatgtaaggaagtgatttaatgactgaccatagaacagattagtcctaaattgggctggaaggacagaaagggcatcaaagtagtaagtaatgtttcagaggaaacagaaatgaaactaagttggttcctgatctgtttgtatgtagtgagaagtgctgttttttattcactcctactattaaatagtctgggaaaactttacgaatgaccttgtcttgaagaataaggtagcattggtttggtcggagagtacagagagtrtttgagccaggatgtaaaacatgagggagaaaaatgaattggaaaagacaaggaattcttgggataattgaataagccagttggctagagaagggagacagtgagcaaatagtaccagttatggtttgtaggttggactcaagttatataaacacatgaagtcaggtagtagagagaaattagtccttgagcagggaactaacacaatcagattagcactttaggaagattgattatgaacatgtctctgctctgctcaaagcagaatggtaattaattgaaggaatggaagaattgttgggagaataggtgggacagatattgagagggagctctgaatgtggcttggtgagtaaatgtgtaaatgaagggaaagagagaagttaagatcattctcatattttgagctgatttggaaaaattatggtatcacttaaaaatttagtttaaaaaaagcgagacaatgactgggctacttagtattttattggaggaggatagatgagacaatcttgacatagattaataaaaggaggtacttgaaatgtttagcatctgttggaaatatggaacttgaaatcagcagagatgtgatatatagtcaggcagatagatagatggatagatggatagatagatagatagatagatagatagatctgcctatatgttagttttgaagccacaaaagcagatgaaatccacaaggaagacagaaaaggtcaaagagttcagagtacaaagcaagggagaatatcagatttaaaagtagctgggaaaaagaaaaatgcttagtaataaagaaagaacagacttgaacattaaaaaaaacaaaggaaattttcagggaggcaggcagtgttagacaacactgtcaaactgctgcagagcaatatagaagaaatataaacttaaaaaataatttttaagtttaaattttaattctaaaaattttaaacctattcaatatggaagttatagatgattttgagaattcagtagagtaaaagaagcaaaacagagtatgtgacagaaataatgtaggttttattttcacatttttttccagttagaaggaaagattgagaaacagaataatagtttgaaaagagttaatgagttgagaaaggttttggggttttttttaagatgtgagaaacctctatgtgtttgtagtcttgtagaagagtaatgttgttgagcaggatgaaggagatgaggcaggaagggggtgttgtgggggcaagagaatgggattgaagacaaaaggccatgaaaaagatgagttatatggcaggaaagaaaatgagaaaaatgtcaagataaacatttaaagttttcatttcagaaggtagaacaataaagtggtctaaatttctcagaagagaggaatggagattatttcctttagaggaaagagccagagctgtggtagagattttgagaatgggcatatcagctgttgctgcataacagacaacccctaaattgatgcttgaaaaagcaagcatttattattcctcctggttccctgagttagctgggtggttcatctggtcttggctgggctcactcatgcaactgcagttagctgtgcattgggtaatctgctgtgctgatcttgggggatgggctgtctgtggactagtctaaaatggcctyagcagggcagcttggctctcttctacgtggtctctcatcctccagccttgttctcatggtagcaggattctgagagagagaaatagagacaaaagcatttgatgcctcttaaggcttaggcttagaaccaagcagtcacttgtgccacattctgctggcctcaacaagttttaaagccagaccgtatttccaaggcaggggaataaactccatccttagtcaagggaggagtttcaaagtcatgctcaagagtctggatatagagagagctggggactggkaccatttttgttatcagtctactactggggaaggctgtaaataagtgtgttccatggacagaagagtatggtatagtagatgtgctaaaattgtgtatgtattttgtaacatrtataagattatacatctcagactatttacatgtcagatcttggtgtcttcattgttagtattttctttctcccccctttcraaggttggacaatacattagaggaaattatatttaagctggtccctggactacgagaacgtaagtggctctttaggttcttgcagacttttgtgttttrtgaaatcaacacttctattaaagatttcatgacttttacttttatactctttcttttaaattagaagaacttgagcgtgaatctgaattttggaagaaaaataagcctcaagaaaatggacaaggtgactttttcttatgtctgtttctgacagcacctcttaaactggtcagcttttcatagtttaggtgaactaatatgtctcttcaggctcacatttttcctgcacaaaattcatgcacccttttatttacattacgaacctttttctctatatgagattttatataaatgagtgtaaatctgaagtcactttagtgagggtaattggaaatagaggaaattggactttgggaagagaaaagggagataaaagagaagattggctaggtgtttatagtggtaatttctagggagctaaaggaagctgaagtaagaaatagccacagcttgcaactaaacagtgaagagttttttgttttattttgtatgtttgcctctaaaggagagggagctgagatgtggctgagagccagatcaggagattttactatgctctgatattctggaatgaagtttttataagtagagctcaggtgatacaaacttatacatcatggaaatttagaaagtatttctgggtgcttatgggaattttctccatcacccagatttctcctctgggtcccaaaagactcagcaattagtaatttttaataataatttcagcaaaggggcaaacattactgagcagataaaaggcttttagtgtatatatatatatatatatatatayatatatawgtataaaatctacacaaagggatattaaaattataagaaactagtatcgctcccatttttttaaatatgagatttaatttaggatgtcctaaatatcatttaaagttattcaagaatgtgtgtgtgttcttatagggtcacttgtaagttcagcctcccaatcttggttttcccataagatcataggattgtcaattatacatgattaaggtggatgagatctcycttttttaatctgtaaaatggagattatcattttattcgttcaacttaactgtgcaaggctgttagagcaggggaagtttgagaatagttttgatgctagaataaggtaacaagagactattttttatctgtaacaacaacaacaaaaaaatggcaaagaagctaagcctggccaaaaaaataactagggcttgttttacccacgtgtacactgcaattaaacaataacaaccaattatagtagtagtgctctagtaaaaatacagataagataaggctaattaaatattccagtttttgactgcctattcaagaggacaggagcctgagggattgtcatcagaagttacgtggtaggtttactctatggttctacgtatcacagtttaacttgtgaagggctgtagcctactttgtgaattttatctcccttttcctattgtttctcccattttaaagtatttctggtatttggtctttagcttgggtggagaattcagattttttgttggagctaggagtttggttcatagaaggcaactcctatctatgtatattctctataaataaggagaagaaaacatgtagaaaaaagagaacccacctccccgctctatggtatacctgtagtgcttttactacagtcatcaaaaaggatctggccagtcactttgcagggaagcttttctacaagtaatgtttagctggctgattttttcaagtgttagcttagaggtatctcatctggaaatcgtccctgcttcactcccaaagtttgggtttattgtctcttttatatgtgcatgcatagtccattttacctctcacatcctgtatttgtctggttttttcttttttttttttttttagcttgcctttatttgattccataccctgaccactgtgagagagaggatgatagctctagtttcagtattgttccctcaggccttgtatgatgtgtatccaacatatagttaraactactcaacagatgaatgataaatatagctgcattatttataggctacaggtttgtaataggtgaaatacrtttgtatataatataaagtatgccattgagatatctttaatggagttgtaacatgttatgtattaatagctatatacatgttaaaaagctaattcattatactcgttttttttcactggctgattttatgaatagtaatttgaaattttgagaacttaattttatcatttgaaaagtatttggttttaatttgaatatatacttatttataaacgagtataatttatatatacacctataaataatttggaagtatttttatatattctgtccactttctaacatagtctaattactaattgtaatcatttttttggctaaatacagctagtcctgaatctttcatttggatgtcccaatgagcctagaaatcttaagctatgttaataagtttccaawtttttttttttttttttacaaaatatttccattgctgagttggttggaacattttaaagatactaagttcttcttcaaaaactgttaggaaatttttkaaagttgatttttgttttgattatcaatgtatgattgcttaactttaaaatcaactttgatttatagctaacttagttttgtttaaattatacagatgatacttcaaaagctgacaaaccgaaagtagatgaagaaggtgatgaaaatgaagatgataaagattatcacagaagtgacccacaaattgctatctgtctagattgtttacgaaataatgggcaatcaggggacaatgtagtaaaggtgagtgaacaagtactatggtatttttatgatcagtttatagtaaacccttgataatttgttgacaaattttctaatgcttcaaaatgtttgctttcaaagttttaattaacataattaaataaaatgccattctttgacaatcctatgcttagaaatggttactattcccacaactgaactgtcttgggccaatgccaccatctagtggctaatgcccagaatcacacctctgtttctccttttatacctttgctggaaattcatatgcatggtttctgttttttagagtggtgaccaacttagacttagagaatttcatgtcactggtagttctagcccttttattcattctcttctaattttatcctttatttctctatttttatttgcaactcaacaagatttccatgtcagagctaacatattttgtgaataatttaatcaattagttttgaagtaaaattagatgttgtaaaatgcctctgaacttttaaactccttgaaggccctcagttatttcctatagaatctccatttctggtactgttttcctctgcctctgctaattgaatctttccttagaggatctttataggaagtttaaaacactctgcttttatagattttctttggtctttaaatggtgttactttaataatgttttctacctttttattacaagcagcttttatttttattacaaatcttcactacttcagctgttagatttttgtcactttatcctagcaaatgtcagccactgagaatattgtttatctctctgtattctgtgttttattcaaatgcctatattcattgtctctaattttcttttacttcctctgtgtacatctataggctagtgggttgaattttttactaatacgtttaatggcattttcctattaggaagtgaaaaacaatttttcacttcagattaagttttcctggcatcttataacaacatatatgagcacagtaattcagtgaatatttatccactatgtgaacagtagacagtgaagatgtaagtagtaagaaaaaacatctttcactcaaggaacttggttaggtcttatacatacaaatagttaaggtaattgattttgttaaggggaatttattggacagggcatgtaataaagtgcatctatctttagagaaatgaccactgtacctatttatccttacagtattttcagttgtttcttatggtctttcccaaaagtcatccccctttttgggaagttctttttcatagagttcatggtcatcctttagctctccaatacatgagttagctcatactgaaagttaaatcaatggaaaggctgaatatcttctcataaacaaacgtaaagtccacttctctgcatgatttctcatatgaaagtataaaagattgaattttagaaatttatttgaaaaattaaccacccctgcttgttgttctcctttttgacatctttgacactttgctattctagttgaccttttatccattcactttttcctttatggacttttcttcatccttgtaccttcattcttagtttataaatgacttttactaagctaccctgattcttcctttttttcctgtggcattcctgctttgtctccactgcctctacttcttgccttctacttgatatatgtaagtatgtcctaatactttctctgtatctattttaggagatcttctccattttctgtgtggcttcaactacgcaaaggattttttaacttttattttaggttcaggagtacatgtgcaggtttcttacataagtaaattgtgtgtcacaggtttggcgtaaggttattttgtcacccaggtaataagcataatagtcaataggtagtttttcaatcctgtctcgccccctaccattccaccttcaagtagggcctcatgtctgttgttctcttctttatgcaaaggacttttaagtcctcatttccagccctgctttgtttcccaagctgaagtgttatgtctctatttttaaatagaccagttgagagtttcactaacaccggaaacttgacttgtctaagttgtctaattcattatactttcatctaactttggtccaaacatgcagttttagttatgactgctgtctttcagccaatcaaataagttcaaaagcttcrcgtcatctttgatctgttactcttttctttcaaccagtcactaagtcctgcaaaattcccccagtttagtgctgctcacccttatatctacattttttaagtagttattaagtgttttctgtacccttaatttttcttttgttatccagggctagggccacttgcctgagtgtgtgtaaggcccagagtgagggccatgaccaatctcagggtcagatggtaagtattttaggctctgtaggccatatggtctctgttgcaatttactcaacttattcattatagcactaaagcagcacagacaatagtaaatgaatgggcttggttgtgtttcaataaaacattacttacagaaattgatggccagccagatttggcctgaggacatggtcattgtacaggccaaaagtttgccaccttttggcctgtacaattaagtcataactccttacattagtattcaaggcccttccctaacaagcacctcttttaataagtttatctcccattaaacccattagtaaatcgtcctttcaaaacaagtgattattcctttatgtatgtgttcgttctctctctctgtctcttcccctccacctcgtgtgtgtgtgtgtgtgtgtgtgtgtgttggaaaccatatatctgacaaaagatctgtatctagattatataaaagcttgtgttatgaatacttaagacctctaaaactttgaacaacccttcctttttggcgtgttctttcctcttccaccatcctatgcttctgtcaagacccagagatttttattttttgtgacgcttttcccaacctagtgaatcccttttctgaaattctgtagtacttatatttatctgtcaattagggattagtttgttatctattaaggatgtgcctaagagttctaggcactgatactatcttttttttatatgtgtgttgtccttgatactagactgtaaatcccttagtggcagagacacaatgtctgtattgctttatagccttctcagccatctcattcctctgcagtaggatgtgattcacaaatgtggtggggcagtagttgcatgtatagtttatacagaatatctactgcttttataatacagaagtcaaagtcaagagtgggatgtcaataaaaagagtagagtaagtatctctgaaaattcacttttccatgaaagtataaaaatactggcaaaaatgttcagtgtcagctttttcagagatctgatattaaacaaaggcttatagatgcatatagagcattttatcaagaagatgactaactatcagtataaagggtgagctttgtggcattttaacttgctttagttccagcccctgctcaaattctgcagtagccttgaaaataacagcctgctttcccattgcagcctctcagggaccaaagggaaagaacagaggtagagctttttcaaagcctcattgccaaagaatggtcattatttgacttgtctggttgtttcctcggagaccccacttacaagattgtcagtattcgacttgacttggagcttgcccccatggaaaaagccttctctgtgggtgggggaaaggggcatttgtcaaaaacaattacaggcaaatgtttcaactttacaactgcctgaggtatagataacatttggagcaaacaagagactaaccaaaaagcttaaatggaaaagctggagagtgagatgtccctaggagcttcaaaaggctgtgacatattccttgaaatctagagggccacgtgcatatgtagagttgtatgcatgttcaggaaggacctgagaaggccctaagctctcacctctgcctcaccttgaggtggtctgcacgagtaggaagtgaagactaaggcagagttgtcaacaccttagttgaatattggtggtatgcccccaaacacatacccagattcttggcaaagactgagcaacttaatggctccagatgtgtaaagaaatctctgttccattattagctgacctctaggcagaaactttcatgactacatatggtaaagaatacagactttatggaattagtttaggactgaagagcaggcaggaatctgatttccagtattgcaacattatattatttaaaatgtctagtttcaacaacaacaacaacaaaatatgggagatactaacaaatacagtggtccctcagtatatgttggggattcattccaggacccttcatggataagaaaatctgtggatcccatgtcccttatataaaatggtgtagtatttgcacgtaacgtatgcacaacctgctatatactttaaatcatctctagattacttgtaatacctaatacaatgcaaatgctatgtaagtagttgttaatactatattatttttattattgttatttttattgtttttaaaaatatttttgatctgtgattgcttgaattcacaaatgcaggactgcagttacagagagctgattgtttgacccatacacaggaaaagaagcagtcaatagaaactgtcgctgaggaagcccagacattgtacttattaggcatagatttgaaattatctatttaaatatgcacaaagaactaaaaccatggtctgggcactatatgaaaatacaagaatgatctcaccaaatacagaatattaaatgtcttttaatattctggagttgaaaagtatagcaacagaaatgaaaattttactggtgaggctcaacagcagacttgagccaaagaaaaagaacctgtaaaattgaagttaaatgaattgagattattcagtctgagaaacagaaaaatagaatgaagaaaaatgaacaggtcctcagagagctgtagacaccatcaagcttaccagcatacacataatggaagttccagaaggagaggaaatggagaaaaaaggacagaaagtatatttgaagaaataatggcccctaaaaaccaaccaaatttgatgaaaaatattaaacatttgagaagcttaacaatcttcaggtatgataaattcaaagaaattcatacctaggcacatcataatcaaactattcaaagacaaagagagaatcttgaaagcaacaatataaaagtgactcatgcacaaaggacccccagtagggttagtagctgatttctcaccaaaagctgtggaggatagaaggcaataggataatatatgcagagtgctcaaagaaagaaaactgtcaactagttaagtctatattcatcaaaaatctatagccttccaaaaggaaggagaaattaagatattcccatgaccttggatttggcagtggattcttagaaatgacaccaaaagcacaagcaacaaaagaaaagaaatagataaattgtaaatgtaaaacttcattaaaatgtaaaactcttgtgtatcaaaggacacttaaagtgaaaaaagttacagaacgggaaaaaatatttgcaaatcatgtctgataagcctttaatgtacaggtatatgaagaactcttataaatcaacaataaaaagatggcccaatttggaaaaaggcaaaaggcttgaataaacattcctctaaagaagttataaaaatgaccaataagcacaggaaaagttgctaaatatcactagtcactggggctctgcaaatcaaaaccacaatgagatatcattttatacctactaggatggccagaaattttttttaaggaaaataataaatgttagagaatgtggacaaattgaaaccttatacgttgctagtgggaaggtgaaagtgcagctactgtggaaaacactttagcagttcctcaaagagttgacgtggtaattccacttctaagtatgtgatcatatccagtagtcccccccttatctgtggagcatatgttccaagacccccaggggatgttgcaaccacagatagtaccaaataatcctgtatatactggtttttttaatttgataactgagatagctaagtcactaatggacaggtggcctatacagcatgaatatgctggacaaagggaggattcacaacctgggcaggacggagtaggatggtgcaagattttaacatgctatgcagaattgtatgcagcttaaaacttatgaattgtttatttctagaattttccattttgtatttttggacagtgatatattgactgggtaactgaaatcaaggaaagtgaaactgcagataaggagggactactgtataaaagaattgaaaacatgttcacacaaaatcttgtatatgtatattcataatagcattatttgtaatagccagaaagtgaaaacaacccaaatgtctatcagctgatgaatggaaaagcagaatgaaaggaaat

SEQ ID NO: 6777 - DNA, 159138 bp, Homo sapiens
  misc_feature (1)...(159138): n = A,T,C or G, or insertion/deletion polymorphism (see Tables 1-2)
attgatgaggagagcaagtagaaatgaaaagagaaaaccagtattaggagatctataaagaaacaatagtcagaaaaagagtggttaaagaggcagaagaatcagaagagaaccagattcatgaaataaaagagaggaatcagtttcaggaaggaaagtgtggtcagtagtgtcaaataccagagactgaatagcctaaggatttaaaagaggtcaacagcaccaccaattaagcggtttttctgagcttaagatatttttctttatttttctatgttaaaaatattttataaagaaaaagaaaaaaagagatcacatttgcccccccaacccgtccctggcctctctctctctaaggaagtcgttaatgaatttgggcagaatagattcagagctgtgagagtgaaaatttgactgcagtgggtgaggtgttaataaaagggagggggtagagatgaaatctttccagcagtttggctcttaaggggatagcttgaaggaaagagggttggaagggtggtttttaaaaagaattatcactcactaatcaactagaaatccagtggaatatgcagtacttgtctgtaatccagcaggctaacttttttttttttttttttttgagacggagtctcgctctgtcacccaggctggagtgcagtggcatgatcttggcttaccgcaacctctgcctcccagttcaagcaattctcttgcctcagcctcccaagtagctggaactacaggcatgcaccaccatgcatggctaaattttttttgaatttttagtagagatgagtttcaccatgttggtcaggctggtctcaaattcctgacctcaagtgatcacccgcctcaacctcccaaagtgctgggattacaggccagagccacagtgcccagccaaggctaacctcttgatcccaatgacaaacagaacaaacatcttactcaagtccagaagcaataataattttgaatcttgcttgcatgtcaacaggagccacattaatacagaagaggatcacattggtccaattaaattgaattgattgagagcctctgcaatacacggtctactgcacaaataatgatggttcctggtacatttttatttgaccattgattgctcgatttgtttctgtgtctaactgtgtattggaattaagctgactcaatttgaactgcaggtccttttatccctcttattttttatttatttatttattttattttaaggcatttctcactctccagaaaatctctaagatttcagctattaggcatttgtctttttttttttttttttttttttttttgagactgagtcttgctgggttgcccaggctggaatgcagtgtcacaatctcggctcatcacaacctccacctccctgattcaagtgattctcctgcctcagactcccgagtagctgtgactataggtgcaaaccaccacgcccagctaatttttgtatttttagtagagacaggttttcactatgttggccaagctggtctcaaactcctaacctcaagtgatctgcccgccttggcctcccaaagtgctgggattataggcatgagccaccgtgccccaccaggtcttcttaatcataacaaattcatcttaaaacatcattttaaaatatattattttttattcttcattgacttcctgcattactctattttttcagagtttctagcaaccagtatcattggtattttaaacaatgtgtacatgtacatttatgcagatgagttaacatatatcaaagcaacctccaaacaatgccatttaggtaatctccaatttaaaagcctcaatagaatgataagattgagcttttctgtagttccatgacctccagcagagtctgcaaggccacagctgcctgaagrttgattctgtaattagaagatgccagggtcatctcagaatagaacctcaagccacccaggctacatttacagaatcagcctctccagaaaaacagcaacaaaggagggccttcctatgtatttggaaggagtcacctagaggagggacttggggttttggtgttggtgtggggggcagggatgggatggggagggggaagcttattgaaatatactaaaagacaaaccaacctaagggctggagggaagaaaattcacacttgtaagcttctttttcaaggggcatctcttaggctctagcttttgagattcagtatatatatatttttgagtcttgctctgctggagtgcagtggtgtgatctgggctcactgcaagttctgcctctcaggttcacaccattcttctgcctcagcctcccgagcagctgggactacaggcgcctgccaccatgcccagctaattttttgtatttttagtagagacggggtttcaccctgttagccaggatggtctcgatctcctgatctcatgatccgcccgcctcggcctcccaaaatgctgggattacaggcgtgagccaccgcgcccggcccagtatttttgttttatgaagatattacatttgtaaagtatgagcttggtgtcagcaaacttatatccctgtgtacaaactggccgaatcacttagccactttgggccaaatcacttagctcttctaacagtaagaaatcaacaagaaaaataaacatttcaaacattacaatgtgttcatgtattcactgtgggggatgaccagattctcgaaaccacaggttgttcttagtgaaacaagtttgggttggggccatagacttgtgtatttagaatcaatggctgttctctctctgggactttgatttttttcttgggctcatcccctttttgtagtatcttatctttgtcttatttgtataggacttaactgttcccattcccttattagagcaatctaagtgattaccttcataccttttggaattatatgcttcaaaattccaaaaagaatgattttgggctgggcacagtggctcacacctataattccagcactttgagaggctgaggtggatcgcctgaggtcaggagtttgagaccaacctggccaacatagtgaaaccccgtctctactaaaaaatataaaaaattagccgggcatggtggcaggtgcctgtaatctcagctactcgggaggtggaggttgcaatgagcccagatcgcaccattgcactccagcctgggcaacaaaaggtgaaactccatctcaattaaaaaaaaaataatgattttggtggtcgacttcaaataggtaggagaagaaggagagaggagatggagggtcagggagatctaattactctctaaaatcatgctaggaaagataacaccttttaataacactctctgcttttataacatcattctgccaaggagctcaaaggtttcaacaaagttcactttcagaaaacccctttgaggaagacagaatatacatcttctctccattttaaagatgaagaaacaggccgggcacaatggctaatgcctgtaatcccagcactttgggaggctgaggccagaggatcgcttgagctccagagtttgagaccagcctggataacatggcaaaaccctgtctctacaaaaaaaatacgaaaattagatgggtgtggtggcatgcacctgtggtcccagctacttgggaggctaaggtgggaggatcgcttgagcccagggagtcaagtctacactgagccatgattggatcactgcactccagcctgggtagacagagcaagaccctgtctcaaaaaaaagaaatgaaagagaaagaaagaaagaggagaggagaggagatgaggggaggggaggggagsagggagggggggaggaaggaaggaaggaaggaaggaaaaaaagatgaaaaaagaaaaaaacaagatgaaacagaggcagaaagactttacgtaaattgctcatcatgtggttgtcaagtttgaccccaaaacccaatttattgaccaaggttattctttgactgaggcaagggggtccgctctcctgggccttgggctttagaaagctcatctctggcctttctgagatccatccctttctttttatttttcttgacacggagtcttgctctgtcactcaggctggagtgcagtggcatgatctcgactcactgtaacctctgcctcccgggttcaagcgattctcctgcctcagcctcctgagataacaggcgctcgccaccacatctggctaatttttgtatttttagtaaagactgggtttcatcatgttggccaggttggtttcgaactcctgacctgaggtgagctgcccaccttggcctcccaaagtgctgggattacaggcatgagccactgcgcccagctcagatccatccctttctaagggcaaacagtccatggtgcaaaggggccatgccacccagagttatgagtacctgggactccagaattccttgcctggtggcctccacatgcacttccagggcctgcttgggcctcttctatgggtctgtcctgagtgttgatagaaccactgatgtgagtacctgggcttgagccgtggcctggagatcctgttgactgtagcatggagggggcttgtgcagctgaatgtctgcatgcaggtggtgggagttctggaatatgatggagctggaggtgggaagagaagtaggcttggggcagctctctcatgccacctcattctggccaaaactcaggtcaaactgtgaagagtctaaatgtgaatctgcccttcaaggtggctacaaaggtatctttgtcaaggtaggagaccttgtggcctccacgtgcacttccagggcctgcttgggcctcttctacgggtctgtcctgagtcttctatgaatctgcccttcagggcagattcatatttagactcttcacagtttgacctgagttttggccagaataaggtgacatttagtttgttggcttgatggatgacttaaatatttagacatggtgtgtaggcctgcattcctactcttgcctttttttttgcccctccagtgttttgggtagttttgctcccctacagccaaaggcaaacagagaagttggaggtctggagtggctacataattttacacgactgcaattctctggctgcacttcacaaatgtatacaaactaaatacaagtcctgtgtttttatcacagggaggctgatcaatataatgaaattaaaagggggctggtccatattgttctgtgtttttgtttgttkgttttgyttgtttctttttttgtttttgtggcctccttcctctcaatttatgaagagaagcagtaagatgttcctctcgggtcctctgagggacctggggagctcaggctgggaatctccaaggcagtaggtcgcctatcaaaaatcaaagtccaggtttgtggggggaaaacaaaagcagcccattacccagaggactgtctgccttcccctcaccccagcctaggcctttgaaaggaaacaaaagacaagacaaaatgattggcgtcctgagggagattcagcctagagctctctctcccccaatccctccctccggctgaggaaactaacaaaggaaaaaaaaattgcggaaagcaggatttagaggaagcaaattccactggtgcccttggctgccgggaacgtggactagagagtctgcggcgcagccccgagcccagcgcttcccgcgcgtcttaggctggcgggcccgggcgggggaagggcacgcagaccgcggaccctaagacacctgctgtaccctccacccccaccccaccccacccacctccccccaactccctagatgtgtcgtgggcggctgaacgtcgcccgtttaaggggcgggccccggctccacgtgctttctgctgagtgactgaactacataaacagaggccgggaasggggcggggaggagggagagcacaggctttgaccgatagtaacctctgcgctcggtgcagccgaatctataaaaggaactagtcycggcaaaaaccccgtaattgcgagcgagagtgagtggggccgggacccgcagagccgagccgacccttctctcccgggctgcggcagggcagggcggggagctccgcgcaccaacagagccggttctcagggcgctttgctccttgttttttccccggttctgttttctccccttctccggaaggcttgtcaaggggtaggagaaagagacgcaaacacaaaagtggaaaacaggtaagaggctctccagtgacttacttgggcgttattgttttgtttcgaggccaaggaggcttcgggaagtgctcggtttcggggactttgayccggagccccacatccccaccacttgcaactcagatgggaccggaggcggtgttaaatggggagackatgtcctagtacgagctctggtgaccccaggactctgcgctgctgcgcttggggcttgcccgacggtggagaccggggagcatctctgggcgtggagacccgggcgcagtaccccgggctcagaggggtcgggggttcccgggcgtgctgagggcgctgctgccgggtggggagagctgcaggtccggcaccgagcgctgctttgttcggagggccctgagctggctagaaacccttctggttgcaggtcggccagtacctacggagacaaatgccagcactgagtcttcactcggttcttaagaagctggtctgttctgacctgggaattggctatatgctccccsggactggagcggcacagtcccggactgtgaatccgggaactcgagttggaggtgtcccaaacggtccgtggtgctattgctcactagaggccttgggtctttgtttgacctgaggggtagggaggtcctgcctacagtctccgtgcgctcagctgagctggtgtccctggcgcagagcgcggacgagttttgtttccttttctttttyttttttttctttcctttaagtctcggtctgtcgcccaggctggagtgcaatggaacgatctccgctcactgcaacctccgcctcccgggttcaagcgattctcctgcctcagcctcctgagtagctgggattacaggcgcgtcaccacatccagctaatttttgtatttttagtagagacggggtttcaacttgttggccaggctggtctcgaaccctcgacctcaggtgatccaccggcctcggcctcccmaagtgctgggattataggcgtgagccaccgcgcgcggccgagttttgtttcttttaaaaacaagacttaggagagcctgcggagacccggaggtggggtgcccaatcctccctctcccacgttccctgcagccccatcttccagaccgttgctgctggtctctcggggcagcttctgcctgggcgcagatggggaagctgggccgaggtggtgccgtggaatgaccgggagtaaccccggcgggcggcgcagaactcggagctccgccgcggggctgggctgggctctgccgtgagggtgggggtgctgggcgcgcgggctgcggtggcccccggagactggcccgcagcgcctcctggccggaggacctaggaatcggccggctctactaggtgtctttgctcgcggttccgactgtgaatccggtgaagaccggtggttgcagacggggaggaactatgaggttgaggcgaaagcccgttttgtttttttttttttgtttttttggttttttttttgttagcgtgtttgccaactcccaggccattggtaaagcaggaaggttcttggggcggcggacggtgccagggttatgtgtaggtgcctctttaggtatatcktttatcaaaaagaagcaaagaaataagattaaaaataaacaaagaaaaaagttgtctggcactggcagtaattggcctgcctttgcagcactgataccattagcttttaaaatccgacttttcattgacacttcaagaagagaatgggtagtatatacacattcatctcatagtggacaaatttcatatttaaaaaaaccttctgggtactgaaatcagcaagtcacttgccctccatggccgaatccctgcttcccacgaagagaacctcacaaaaatttcccccaagttaaagagtggaattttcttgatttttttttcttttttttttaacggccgtagtttagaacccagacttaaattatgatcttcttttcaaacaaaacttaaagtccttaagttttcatctccccttttatttcaacctattcttctcatacctaccacaaaaataatggaggctttctgttgagaaactttccgtttctgttgagagtatcattctcttgagaaactttctcctaaatcagagaaagtatggaagcatggaaagtattcctgagtagaacytctacagatattacaatatttttcaaatacaaagtttccattgtcagcctgtttcccaagtgcttccacaaaccattaaataattccacaaaccattaaaataattaatgctagggaattttaggaaaacattggtttacaatcagaaggacmggggaagtgggtcttcagccttcacgatgactacaagccatttaagggactagaattgctactgttgtcagagcaatttaggagtctgtatttgagcacccgcatagtgttccagaatgacatatctgactgtaacctggacacgtgtgatatgttgtctcccctgcagatgagcatttgaaatctcaaccctcrtatttctacgagwgcaggcctataatggaccctgggcacattttttttttttttgagatgcagtctcgctctgtttcccargctggagtgcagtggcacgatatggctcactgcaacctccacctcctgggttcaagagattctcctgcctcagcctcctgagtagctgggactataggcgcacgccaccatgcctggctagtttttgcattttyagtagagacagagtttcaccatgttggccaggatggtctcgatttcctgacctcttgatccacccgcctcrgcctcccaaagtgctgggattacaggcgtgaggcaccgcgcccgacccctggacacattttgacttagaacatattttcggtttgtgtgagacagtgcattagtgcaggattggaaaagagtgatcaggaattgattgttttcaaggattggttccttctgctcaaggaagtcccattgtaaacataaaaaaatgaatgaaactgaagaagttcagtgacttagctttttaktatcttctgtagtacttacctttttggagaggagttggttgggatatttttccatttaaattttttttttaaagggatcttctctcccrtaagccgggatacttaagctatatatgtagtggctacaaattaaggtcttcactgttttcatttttagctsctagaataagtgaacattaccttagatagactcttctaattatgaagatatctagatgtctagaaaatatcaaaatgcatgtggtttttgcatttctaaaatacttttaaaaccaaatactttttyttttttttttttttctgagatggagtcttgctcttttgcctaggctggagcgcagtagaatgatcttggctcactgcaacttccgcctctcaggttcaggtgattctcctgcctcaacctcctgagtagctgggattacaggtgcgtgccaccayacccggctagtttttgtgtttttagtagggacagggtttcaccatgttggccaggctggtctcaagctcctgacctcaagtgatctgccagcctcagcctcccaaagtgctgggattacaggcatgagccaccacacctggcctcaaatacatttttttaagtatccagatattaaataaataataccattatagtagttgttatggtcatttactctagcatcaaatgttaaaagatcattctgaacacttgttttgtttatgctgagagaaggcctactccaaaaaatgcaaccatcttcgtatctgcatgtggatacaaccatgaatggccaaagttattgcartgttgaatagacacttatatagcactgtgtggcaagtactgtttgaaatgtttttcacgtgtttattcattgtatttattttgagatagggtcttgctctgttgcacagggtrgagtgcagctgcacagacaaggctcactgcaacctcagcctcctgcgctcrcgtgatcctcatacatcagcctcttaaggagctggggccacaggcacgcaccactgctcctggctaaatttttacaattttttgtaaagacaaggtctcactatcttgcycagactggtcttgaactcctgggctcaagtgatcctcccacatcagcctcccaaagtgctgggattacaggcataagccactgtgcaggtcatcaaatgctaattgaattttcacaacaaaaccatttattgtccctagtttacaagattaagtaaatgagaagctaatttttctctggctatataccttgcaagaggcagagctaagacttgaacccagccagagttctttaactccagcactaacatttcagctgctgcaaccagggagcttttcaaggatgatcaccacattctctacattcatctgctataatccttatcagaatctacagcctgtatcatattttccttgttgctgtgagtgggtcagccaaattctctttaacttgaaaccttggttgcgtagggattgcaacatcctggaaagaatagaataaaatttactcaactcaattttttacttggttcataatgaaaactatactattgcttcagtcagatgtttgcgaatagctgtgtgatctcaaaatgttttcctatgtgatctatakaaaatggaatgatagagtattaggctgtaagggcmtaagaaacaaaggaaaaagagaagtgaactgttagtttagttgtaaaacctaactttggtgaattgtaaaaatttgttataatacaatatgattcttgcttgtcctgtccttgatgaagttgtggaccttttgaaataagctatttctctgttactgctgttactgtttagaaatcaaatttagttttttcttaagatatacgtatttttggaagataaacacagtttcaaagtctgccttgttggctgggtgcactggctcattgttgtattcccagcactttgggaggccaaagcaggaggatcacttgaggtcaggagttcaagaccagcctggcaaatatggtgaaaccccgtctctactaacaatacaaaaattagctgggcgtggtggtgggtgcttgtaatcccagctactgggattgggaggctgaagtagaagaattgcttgaacctgggaggcggaggttgcactgagtcgagatcgtgccactttactccaacctgggcgacagagtgagactccgtcttgaaaaaaaatgtctgccttgtaaaagtgaaataggatgagaaagtgcctttcttattaattggtgtaatgaattagaaataaactctttgaagacacctcttggtaaaaatagttacatttactgttgatttatggtatgttggatatgtttttaagttttccgtgtaataactcagttcattctcatgagtgaaataggtgcttttattgtctttatagatgggaaactgaggtataggcaggctaggtacattattatggagttcgtaagtagtggagctgaagtcgcatcccagacagtttggcttccgtgagtttaccaatctcatggtaaagactttgtcagactatcaaagttttgacaaatgaaatattagcaaaaggccaaaagggattctctattttcatttgagtatcttcacctgaaaatagttgcctgaataagtagcctgcatagaaaggtacattttagaaatacttgaggccagagaatgaaaagcttacataaaattgatttccggtggggccttcagttactctccattctacgaagaccacaaatagcattcaggcaaagagcatttattccaacaatggaggagcaytggatttggttcctaaaacaaaataaagtttgaaatcctgtctttcccatgttgaaaacaaagttggtacaaaaccctttagctttkgcaaacctcctttaagacccgatttaaatgcytccctcctcrtgaagctcttctggatccactcyttcccatcactaagttgaaagtmagatccccttctctttacttccattagacttggattacagcactctttgtatcatgtatttaattctgttttttaattacagttaacatttatttgtcttcctcttgagtgtatgcttctctagaggaaggtctttgattcattctcccctggccttaattcatcccacttaatatggaaaaaatttaataaatgctgacttgaataagtccaacaaggagaatgggaagctcatgtttgcttcctgtcttctaaaagactacttaagataacagggtaatcacagaaaagcattagaaatagagttatatgagaaacaactgtagttaaggctaggtttatgttagactgagaaattttagtgcatacttaagttatttaggccaggttactttttgtagaacaaacatttcagtttcgctcagtttcatttccgtttctgaggcagctgtgatttaagaaaatgctctagtctgtggcattccatattcaagtactttgagttgtatattaatttatttttgttaataagagtgasatgactcactaagtaatttagagatttaaacacttttttaaaaaacagtaacttcatatgcattggatctattcttctataaagtcttttcttggggggtgtttgtttaaaattccccggtgttttctctgccaaatccaacttccaagaagcatttggaagtcaaaacattttatctggttagtcttaaagtccagatattttgtgatagctggtatttagtttatgatatttcccaggaagaactttttagtagttgaaccatttatgaaagacttccttgaagctaccttagagagttgatttagttcttcctaaataagtaaatagaatattagtattaggacatcttggagtatagatgcaaatattggtgaaaaagaacatggatatcagagtcaaattaatgtagattggaattctggttattactaatggatatctgacattaggcaagttgctgatcactctttgcctcagtttcatcatctgtaaaataggtatttgtgtttgtgtataatgtgaaccgtataatataatgcttggcctatagtgaaatttattcatacgmgtgttttcagtgattttaaaagcttgctttaggccgggcgcgatggcttctgcctataattccagcactttgggaggccaaggtgggcggatcatgaggtcaggagttcgagaccagcctgaccagcatggtgaaaccccgtctctactaaaaatacaaaaattagctgggcgtggtggtgcaagcctgtaatcccagctactcaggaggcttaggcagaagaatcgcttgaacccrggaggcagagattgcagtgagccgagatggtgccactgcacagagcgagactccatctcaaaaaaacaaaacaaaacaaaacaaaaatcttgctttatagtttacttccacatcaaattgtctttatcccatgttacttgcattgatatcccagacatgaaaagaaaaaaagatgataacaatgacagttattaaattaggttccactcttattctagatcaccaattcatattactattcagacttggaacattaaattttagttaaactttttttcaaatatgcatataattgtcagtggttactatattttggggaagagattgttgacttctttgaagaaagatacggattttctcttcagaaraaatacacatgggctcatataatccaaattttatgtgtaattacagggtgttcatgaatgcccacaaatccattaagccatgtgaccttggacaagtcattttacttttctgttttttaggttgttggtctgtaaaatgatactacttgacttttaaagagcccttcaagctcttatgtcctctaaccccaggtctgtattcagaagaaggggtggtcctttaattagagccatctagagatctgaggaacatgctgggcattagtgtaacataccatgtggattttgagaggtaaagaaaaaataaccagggaatgcctcagagcattcctgatcagatcgatgacagaagaaaggaatgagagggaggagaggaagctgttgaaatttcctatttacctgctttgagtgaatgaagatttgaatcatagaaccagaaggggttctcatctgaaatgcaaaggaaggaggagttggtttaattcaataagtttcagttgagtaaacatgatttagtgagayactgttcttgcttctgactcaycatttggaaaatctctctaaaataaaattggactctccatctcggacatcattttgggtgtaggttttgcttttttttttgagatggagtctcgttatgttgcccaggctggagtgcagtggcgcaatctcggctcactgcaacttccgcctcccagattcaagcagttctcctgcctcaacctcctgagtagctgggactacaggcgtrtgccaccatgtccggctaatttttgtatttttttaatagagacggggttttactatggtggctaggctgktcttkaactcctgaccttgtgatctgcccaccttggcttcccagagtgctgggattacagatgtgagccacagtgcccggcctaagttttacttcttataatggactcctgttaagccaataggtgatgaaaggaaaccataaccaactcttcaggctcattcatccttcaagaatagcatgctagtacccatcctaggaggagaattggactatacctcatgaggatagtttgaagtatctcagaagaccctcactgggggtaggtcggtaagacacaaagctttctaaagcactgtaccaaatttgttgtttgagagatcataacaaattagaagtggaaagaagaaggagtaaaaggaagaagaggtttctggccaggagcagggagggggaaggagctgctaggaagatgtttggttgtcatatccctgttcacccttgctttgcaaaattcttgtaggatgccaggttgggagtaattgtttttcacaagagtcaaaccacgcttgttttcttgaagaagcaagtctttggagggtggtggcttgaaatctgttggatctggtatttaggtgatacactttgacataaaggcaacactgatgcaagcagcagctttccttggaaaggcagggagaaagtgaaggcccagactgatgagcttacactgacctgcagacccttctccattcccaggcatgtttggtggcagagtttaccttagttggggttaggctgttgtctggtactgtgagagagaaggaagaagaagataygatattaacaacaacaatacatatttatatttgaaaattaaatgcactaatacacctatagtgctattaaacaaatttatttgttcagcaaatgtttgttaaacaccatgtactgtggaaagtactaggtgctggacagaggtcaaaagacttttaagaatctgccaccattaatgatctctttctgcttggcattcaaggctctttgaaataagactgtgacscactttgatagttttgtcctggattataagacacatgctcgaaggaactatagctggttttctcaccagactgattaacatatagtatggtttggtacctgttaaatgagtctctctctacaggttttcatcttctaytttaagaaccccttcctggcattgtttggctcctcattgttctggaatctcatgtccatctcatgtatttgccttggttcacacttgatcttctrctcatattcctcacctactgaaattttacccatcaaccagaccgtgggtgatggaacacagcatgggctagttcttcttatatatgatctcatttaattttcwctggaactctgagataggtagcatttcagcccactcaagttgactcaaatttttgtaatcatcaatatattttaaaataactttatatttgacctgtaattggaaaaccaatatgagttatcataaatgaaaggtaattttaaaaataattaggatgaagacaaattatttttctcacagtctatgtataagataaactattggttcccaaaggccccagctgacaatgagacttctcttactttgttgaaaagggaattagcaagcattaaagaggtgtcaaaaagaagactaaacaaaagcttactcctttttttttttgagacgagtcttgctctgttgcccaggctggagtgcagtggcaccacctcggctcactgcaacctcttcctcctgggttcaagcgattctcctgcctcagcctccctagtagctgggattacaggtgcatgccaccacacccggctaatttttgtatttttagcagagatggggtttcgtcatgtyggccaggctggtctccaactcctgacctcaggtgatccacccacctcggcctcccaaagtgctagaatcacaggtgtgagccgccgcacccggccgcttactccttaatgtactaagaatgttatatataggctgaagaagtgctgaaaagaaccatattttctcatgatgtggttcaatgtttaatactgtgcttgttcatctcctaaaatcctctgaatatcacttaaattcatcctgtgtaactctcccacatttggggaaatactgagcttgcctattattatattagccccatatttcagatgatgcacctgagccgaggagaagttaaataacttgttcatggttccatatttggctaatggcagagccagggattcaaactcttgtctctctgactcccaggtttgtgcttttcccacttggctgaatttctcatgctacctcctccataacacctttcctagaacttttaaggaatgcttcccctgttctctcatagcattttaatgtaagttgccaaagtgtcccagtttgcacccctaccagcaatgtgggagaaaatagcaacatatttttgatgttggggtctagtgttacggtttcttctgctctttgggatgtatattccatggcwactgaatacccaagtcccaaacagttttcttagactcagaaggtcatccacttcagcttcttcatcaaaaagacatattttctggctgggcacggtggctcacacctgtaatcacagcactttgggaggtggaggcaggagaattgcttgaacccaggaggctgaagttgcagtgagcccagatcgtgccactgccctccagcctgggtgacagagcgaaactctgtgtcaagaaacaaaaaaaaggacttgttttctgttccattacccacagtggtagaatggcgtgctaaatttattctccagctgccattaactgcaaattaaaatcttagtctcttgcctctttaatccaggcttcttcatactataccagaatttaggataactattacagtgccctttataggaragaaagaagaaattgtgtctgtagatgtctgttcctttcagcttaaaatggacactgaaatgttaaatattggactggcctcatttatttctcctgtctgttggtccaatttgaatcttaaggcgtctttcaactggaattttttgtttctctcaactaaaaattgttctttgtaagtttgaatcagaacaaaatcctgaatgttgagggtttcctaaaggctgtttctttatgcaaaagcctgaaacccgatgttgatgttggctgcttaaaattaactgtgaatcaaggcagggtttttatttttattttttttttactttaatgattgtgttaattatagtgaaaaccttgagttcacgagaaagaaagcctttggtcaagtattgtttattaagttgtcagtcttgttgcaggatttgcaaatttagtggaattagtgccatttttcagtttacaattccagtcacatttcacatgatcagagcatggctttcttctctgtggagcaaatagagggctgtctgacacttggttccagtggcttccattaagcagagtggatatgtccctggagtctgcagagaagggcatggcactctgaccccagatggcactccgttttgggacattgtccaattctagttcatagcatatgtgaccaacaccagctctcacctgatgtaaacacttagcgcgttgttgcttgggggattggattgtgtgaatttttcaaaactacagttgacagaaggaggctaccaaaaatgaaacccaataattccatttttgggaattattcccacttttgttccatttttcccactttgttctttggcacacagaatgtttgatttgtgaaaatcttaataacagtagttttttctataaggaacactcagaatcttgataatattggaataatacagatccttttgtaggatcctctcagacctcatataatagagttcatgtagtcaatatttaaagaaaaacacccttaagtttttgtttttcagaatcacaagtaagtggatttaaacttgtgatcttattcccctttcttctcttaatttagtgaggcagccagcgagagggtttgttttggttattctaaagaaggagtttgcttgtaagttttggagggcaagacttagactctgtgtctctgtgcttgccctggaactttgattaaattgtcactaaccgagttagctggccctcgccgggctgcagaaatagaagtgtcttgcacacatgacatatgactgtctcaagagctggctggtgaaaggacgttctggagaaggctgccgatactgtatgaactagaactggacaagagcctggagattggataactcagtttggcgcaagtaaagggaataaaagtgttaaggtggcaaaattgtatccaggtgtttataggctccctgagttcctgacttgagcctatctatgggtttagagttcaaggctctttaccagtgctgacaatcttatactcyaggttgaacctccggggaaggtgcccttgcttgatggcatgtttaccaggggttctagagcctcaatcacagattctstctagctcacatgaagttaatgaaaatgaatgtgcttccctacaaattagagaggctttgaggaaaaatcagattaaatgcactcctgcttgaacttatgtttcttagaacacagctggaaattttgtcacacaaacctttactttcagtgacatttcttgactggtttgttactgtagtgaatctgctttaactatcttttcttatcgctgaggttttacttccattctacatgtgattgtggagcgctgcgtcattgtgggttcagtgtagtggagagtaggaagatggtgagacacagtagcttgttgcacattgcttaatttatcagggatcactgatgagttagtacactagagaagattgtaggtagagctgaaaagatggaggaattataaggctcagatttctctctttttttttttttttaagatggagtttcactcttgttgyccaggctggaattcaatggcatgatctcggctcactgcaacctctgcctccygggttcaagtgagacttgatggtctcacttgatggtttcctggctcagcctcctgagtagctgagattacaggcacccactaccatgcccagctacttttttgtatttttagtggagatggggttttatcatgttgaccaggctggtctcgaacttctgacctcaggtgatcacctgcctcagcctcccaaagtgcagggattacaggcatgagccactgcgtctggccaaggctcagatttctaatagagatttctaatggacatagaggctggaggaaatgggatggacaggaaaactgagtcaggtgccaaaaacttgtagggggccgggtgcggtggctcacgcctgtaatcccagcactttgggaggctgaggcgggtggatcacgaggtcaggagatcgagaccatcctggctaacacggcgaaaccccgtctctactaaaaatacaaaaaattagccgggcgtgttggcaggcggctgtcggtagtcccagctactcgggaggctgaggcaggagaatggcgtgaagccgggaggcggagcttgcagtgagccgagatcgcgccactgcactccagcctgggcgacagagccagactccatctaaataaataaatagataaataaataaaataaaataaaaacttgtagggaggtggcagtgtgctatggagrataggtgcaacctctgtgagaatgtagagaaaatagtataagtgagtggtgaggacccccaagagggggttttatagtaaaacaatggtcagaagtggcaacaggataccgtataatgctttcacctctaccaatgcactgggtactggagagcgctccagtttgctctggaaaggccctttctgtggacaaagaatacagaaaagagattcctttaataaaccacccactctgtgtcccacccttgatgaatacttcactgtgaaattgccagaattaatcatggtaatagctactgtacacttactttgttccaggaactggataaatgttttacatacattatcagttctattttttggagaagatacaggggctcagagtccctagggttccagagctggtgagtagcagagtcaggattcaaacccagctttctctgactctaaaacctcctttcttcctgctgaaacaattaactcaagacaacaaaggagttaaggatttggggagttttctgcatggtagaatagacccaaaggaaaagaaagaaagacagtgactaagatttgggtttgtctgccccaccaaatgctttgagcastttcataaatataaatccttcaggttgggagaaggttgaacatctgaagacactgattcttcagagatgtaatccaaacaaagtgatctttggtgatatggtcactaaaccatttatcccaaaattctcttggaaaaccgtcctataacagcagggaacattatccagccaagtttttctgcaaataaagggttgctgatagaggcttgcctgcttgtgtttctgtagctcagggtgtttatgaattcactaatcccttcccttcagatcccttttattctggtgttatgattgtgactgaaaaaaattgattttttttctatgacatagaatgttgaaaggttgatttcttttctagaggaaagattctttttttctatgtgctacataccccccgaccagggaaaaggcaaatagtggtattgtttgctgaagtcttcctttgaaggttgcttggtgtttgcttagtggaaatcagcaggggaagagaggctatctctaacattttgttagagtttcttcgtagttctatagtgatgaaacaaggacttggggtacaggacagatctgctttcagaaatcctggctcttgtgaggtttagaagccctgagaccatttagctggtggcaacgggaatgttgagggtgataaataggatctttggttgtccaagtatcagtgacatgatatagatggagttaaacctttaggatctccttatttatttgtttgtttatttttgagacagggtcttgcactgtagcccaggttggagtatggtggcatgatcataactcactgcagcctcaaactcctgggctcaagcgatcctgctgcctcagcctcccaaggtgttaggattacaggcatgagccgccacacccggtcaggatctcctgtaaaattatattgttgacaacatgaagaattatgcttctcaaaagctagttatagatttgtacaatattcatagatttcttgtttcagtttttacaaattcatagcccttattttgaaaattagctattagcaataattttgtctaggaaattggatgtgtattcaagtgaaagaaggaagtacagttacctattatcttattgtaactaacaatcaagtaagtgtgatgcatttggtactttaaaaactgcacccaagttacagattattggaattaataaaattcactggatctatatatttttaaacggacagtgtgatagcagaacctcttatagaatgatagaattcctctggaatgattggataacttcatttcatccttgacttttaccttggaggatttcttaccccttttggcttctcaaatttgactattaaaatgttgcctttaaaaataggaacacagtttcaggggggagtaccagcccatgacccttctgcaaggccccctaactcaaggtagtttccctggaactgtggtttatggaatgtttcaggagtgtgaggaggtataatttaaggctgtcctagcaaggatacccttaaggatagagggcccagtagcatctggaggccagaaaagttaaactgaggcagtcagattagcttcaggctcaattaagctgatgggtcagcctgggagaaattgcaggatgactctcaatatcccctcccacccccacagcagccacgatctgtctgtctttaatcatgggtgcagtgaacctgttctttccaggtgtcttggccttcagtaaccttgttaggcttgtccctgaacgtggctaccgatccaaagacacatgatcagagaggcaattagagaacagaccttttccaaagcaagcatgttctgttgggcttagaagtttcatgtcctaatattataggaccctgtgcatctctctggagatgaggcacatgagtcatatctgtgattcttgcttttgtgtcaacatctcatgaataggcaatcagagctttggcaccaatgtattttcagttcatatctgatgtagttaaatccacctcctgctttgtagtttactggcaagctgtttttgatataagacatctagaacactgtaaatatataacatttttatttgtctattatacctcaattacgaaaaagacatctagaagcaacctcatcaagagagatactgaggccgggcatggtagctcacacttgcaatcccattactttgggaggctgaggcaggtagatcacttgaggtcaagagtttgaaaccagcctggccaacatgttgaaaccctgtctctattaaaaatacaaaaaagttagctgggcttggtggtgggcacctgtaatcccagctactccggaggctgaggcaggagaatcacttgaacctgggaggcagaggttgcagtgagctgagatcacaccactgcactccaacctgggcaccagagtgagattacatctaaaaaataaaataaagtaataaaaaagagagatattgatagctgttgttggaaatttcaacttccatctcacttctggtaactttttggaagtttgttgaacaaagtggaatacacgcacatacacacacacacatactctcttgtttgtttaaggtttaatgaaatagctgtcatataatcactgtttttgaaagaggagaattagttgctatctgtacattttgggtatgtgaactatttggatagaactctgagaaatgcattcagaacaacaaacaaaatcataggagaaatagctaagtgggaaggggcatataagagttgttgaaaaagttatttcttgagaaaccagctctaatgctaggcaagtcacttgctttgggggaggcctcagcttctctgtctataagattgcagcaggggtgtagtgggaatgagtcttcaacattccaagagattttatctactaatacgacmgtcaaatggagcatgactttgtggaagyctctcctcttccacccagaggggccaatttctctgtcccagtgagatgttgacacttgtatgatccctgcttggagacttccctcttctggaacctgccctggctcaggcatgagggctgactgtcacccttygataggagcccagcactaaagctcatgtgttggcagtgttcttgcgggaaggaaaaagaccagccagcccatttgttactgcacaagcaaacagcttctggtagctgtacagatacatgcactttctttcctcactgtgtttccatagacagatttagtgctgtagaagagtagagggcagtcacgggaaggagttcctgtttttcttttggctatgccaaatggggaaaaatcctcctatcttgtctttttagtgtcatcctctctccccttttcttcttctttataattctcatctctcatctctcctggaaatgtgcatgtcaagttcaaaagggcacaatgttttggtgaggaagaggtgggagaacacgtgccaggtgctaactagggtcatcatttcccccttcacagccagcttcctgtgaaygtgtgtgtgtgtgtgtgtgtgtgtgtgtgtgtgtgtgtgtgtatttcttttgccagcatcactgaatctgtctgctgtctggtattccaggttttggtttagggaaaagtaaaagtaattttataatcccagctgtcatttaagccacccctttgtgggtagcatatggtccactctctcagttcattgtcctaaagatgcttcatcagaaaggaataacttccaccccgttactctctgtccccttactctgctttatttttcttcgtcartcctaccaccaccacccactgtttgaacaacccactattatttgtctgtttcccatccctggtagaataggagccccatgaatgaaggaactttgcttctgttgttcaccactgaatctctaaggtatggaacacacctggcatgtgataggcactcgataaatatttgttgtggctcatgggcaccttgcagagttaaggctgcagttgtttgtggaatttataagtggtaatgaatatttatctactattcctcttccaaggcgatcacacaataatcaggctttacactatccagttcttaggtcttccaagttatgacttgtgaggtatgttaattatgataatagaaggcagtttatttggttcagatttattgatgtgtaatttaccacagtaagacttcccctttacaaaagtatgatgagttttgacaaatggatacacatgtgtatctaccactgccatgctccttttcagtctgtcgtcccctccacccatgaccactggtcaccactgcagtgatttctgtccccttcatttcaccttttccagaatgtcatataaatggaatcatgcagtatgtagttttttgtgtctggcttatttttcttagcattaggcttttgggattcatccaggttgtcgcatgtaacagtagcttattcctttttatggctgagtaagtgtcccagttttatttatatatttatttatgaggaggtgtctcactctgtcacccaggctggagtgcggtagcgcgatctcagctcactgcaacctccgcctcccaggttcaagcaattctcctgcctcctgagtagctgggattacaggcacccaccgccacgcccaactaatttttatatttttagtagagatggggtttcaccatgttggccaggctgatctcaaactcttgacctcaggtgatccgcccacctctggctcccaaagtgctaggattacaggcatgagccactgtgcccagccccagttttatttattcaccagttgatggtcttttcgacaactaattgtttccagtttttggctattctgtataaggcttctataaatattcacaaatacctaggatgggatgactgggtcatataatagtactgtataaccttagcagaaactgtcaaactattttccaaagtggctcttccattttacaattccacagtgtattgagtcccagtgtctccatacacatgctagcacttttaatatttaatttagtgggtatgtaatgatatctcattgtggttttaatttgcatttctctgcagctaatgatgagtgtttctgcttatttgggaaggttttaatttagcagtctgttgtattctgtagatattaataacttcaaaatatcagtggcatttgcagttaaaatttccttaaaaaattggccaaaggtttccagcagtcacttctgccatgcccaaactgtatgaaacaaggctgaggtgtggagattgtcacattttggcaaggagtgatccacttgggtgactgatgagacccagagagcgtacgcctcgggcttgagggtgaggacgggcgggaagtcgactgcatggccctgctggccttgggaggctgcccagtccttagctaaagctggcagttatgggaaacagacttagattctattacgtttttcaggatgtcccaggagtcacctgggaagctcagcagtcctttgtgactttcaagcatatggtagaagctgctgaacacagagmtccctctttggggataatttgcccaaatcatttaatcaggcttgagaaatgagttaccacaggtccaggagtgctgccacccttgaattctgacaccctatttctcctatccgtctcttaattaattaagcagacatccccaagtgcttacgacaagccaggacccttttgcatactaaggaaaacagggatgaaggaaacagaaatggtctctgctctgactcagaaggtagaaatcctctttcccagccaagtcttcctagggagcacgtaggaagggctctgaacccacgtgtcagttgcaggggaggatatcaggaaaggacattgaagaagtggagacctaagtttgagacctaggcattagccaggctagcagtgcttgaaaaagtgtcttaggacaagagaactcaccagtgaagtcccagtggtaggagagcgtgcagcatattctgagcctgtatacacatctccagggcattgcttagcaggtggggagtggcaagagagtaggctggagtcacagaagggaggccaggtagaccttggtgagcactggactctatgttcaggtgctgaggagctggcaaaaggttttaagtcggggagaggcatgttcagatatttggtctagctgagtaactttgggtgctctgtgacraatggttgggagaccagtgaggtggcagttgcggtcatctaggagcaggatcagagtggcctattgactgggatgactgtgaagtgggatcctttccagccagtaactggaaatgtgtatgagggcagaagtgagtgtactgcatttgaaacattgagaaatctagtrcatagtactgtctcttttatatcttttttttttttttttttgattttggtttgtttgttcactaacttggaaaactgatgtggaaatgtccctttggcttcagttacctgagcagaaggggccgggcattgccaaactctcctcttaggacagaattgctcccagtattgatcattgtgttctgagwtgggggagcaaattgtgcaggaggccaggtcagtgccaaggtgggtgggaggaattggagsaggaagcttgcctaagtgtgcccagcaaagccacggtagaactttctactgtggctctatgctacttcttagcaaccttctccatgtgcttcctggagagtccttggagtcagaacctttttcttgaaacccagacactttacttccaagaaaatgctgtccaagaaaactcatccttcccttcttctcatgaacgttgtgtagaggtgtgtcttctcttcctttgagcttttccactcagggtttaggggaggtgatattctatatttgggtttggctctgggtactgcaacactaggctattaagatttcatccttactgctttgcccctcctatctttccagaaacccacaatggatttgctagaaataatggaacgtcctgtttggacaggatataaccatttctcagctagaggatattgttggaatgaagaaagataaatggggagaagggaactcacattgctttggcacttaaattaagccatgtactgtgttgggaaattatttatattatctcgttgaatccacagtagaacacagttgaacaccatacaaggtaagtattgtcatccttattttaccatgaggaaattgatgcttagagagcataaagccttggccaggggcacatagttgggaagccggggctaattcatgcctgggctctttctgatagttttccttttttaattgtcccctcctcattgttaccttggggatttcaagagattcatgtagcttctaaatcaacgaastgattcctggagagcagcttctgtatgagaaaaatctagctaattatttatttcagtgtctctggaatgcaagctctgtcctgagccacttagaaaacaatttgggatgacaagcatgtgtctcacaatgctgctctggttgccagtgctgtgctgccagttgtcatctttgaacaaactgatgcagtgctggtttaactcttcctctttttggagtaagaaactttggaggcctgtgtccttctagaagtttgctgagcaaatggtaaggaaaagaaataggtcctaaggcttgactatttcagagaatttcttgatttattggactgtcaatgaatgaattggaatacatagtggtaggctgtcttttcttctcagacactgcaatttcctccaatctcttgacttttctagaagttttaatccaagtccttgttgggtggtagataaaagggtattgttctactagagactgaccttggcatggagatctcatttggactcacagatttctagtctagcgcttggttttgtatccatacctcgctactgcattcttagttccttctgctccttgttcctcatgcccagtgtcccaccctacccttgcccctactcctctagaggccacagtgattcactgagccatttcataagcacagctaggagagttcatggctaccaagtgccagcagggccgaattttcacctgtgtgtcctcccttccatttttcatcttctgccccctccccagctttaactttaatataactacttgggactattccagcattaaataagggtaactgctggatgggtggctgggatacacagaatgtagtatcccttgttcacgagaagaccttcttgccctagcatggcaaacagtcctccaaggaggcacctgtgacacccarcggagtaggggggcggtgtgttcaggtgcaggtggaacaaggccagaagtgtgcatatgtgctgaccrtgggagcttgtttgtcggtttcacagttgatgccctgagcctgccatagcagacttgtttctccatgggatgctgttttctttccagagacacagcgctagggttgtcctcattacctgagagccaggtgtcggtagcattttcttggtgtttactcacactcatctaaggcacgttgtggttttccagattaggaaactgctttattgatggtgctttttttttttttttttgagacagagtctcgctctgtcgccatgctggagtgtagtggcacaatcttggctcactgcacctccgcctgccrggttcagcgattctcctgcctcagcctcccaagtagctgggactacaggtgcctgccaccatgcccagctaatttttgtatttttagtagagacggggtttcaccgtattggctaggatggtctcgatttcttgacctcgtgatccgcctgcctcggcctcccaaagtgctgggattataggcttgagccaccacgcctggccgatggtgctttttatcatttgaaggactcagttgtataacccactgaaaattagtmtgtaaggaagttcagggaatagtataagtcactccaggcttgaggcaaaatttacaaatgctgctgactttgtatgtaaggggaggcattttcttagaraagagaggtaggtctctgggattccagtatgccatttccatcctcagtgtttttggccacctgagagaggtctattttcagaaatgcattcttcattcccagatgataacatctatagaactaaaatgattaggaccataacacgtagctcctagcctgctgtcggaacacctcccgagtccctctttgtgggtgaacccagaggctgggagctggtgactcatgatccattgagaagcagtcatgatgcagagctgtgtgttggaggtctcagctgagagggctggattagcagtcctcattggtgtatggctttgcagcaataactgatggctgtttcccctcctgctttatctttcagttaatgaccagccacggcgtccctgctgtgagctctggccgctgccttccagggctcccgagccacacgctgggsgtgctggctgagggaacatggcttgttggcctcagctgaggttgctgctgtggaagaacctcactttcagaagaagacaaacagtaagcttgggtttttcagcagcggggggttctctcattttttctttgtggttttgagttggggattggaggagggagggagggaaggaagctgtgttggttttcacacagggattgatggaatctggctcttatggacacagractgtgtggtcyggatatggcatgtggcttatcatagagggcagatttgcagccaggtagaaatagtagctttggtttgtgctactgcccaggcatgagttctgatccctaggacctggctccgaatcgcccctgagcaccccactttttccttttgctgcagccctgggagccacctggctctccaaaagcccctaatgggcccctgtatttctggaagctgtgggtgaagtgagttartggccccactcttagagatcaatactgggtatcttggtgtcaatctggattctttccttcaggcctggaggaatataataactgagacttgttttatttctgcagagggttctaagccattcacttcccagatgggccaataatgctttgagtaatctggagatcatctttaatgcgcaggtgaatggaactcttccacagagggatgtgagggctgtagagcagagtgaactccctgaaactcagacgtcagctctttgtctctctatctctgaacacccttccttagagatcccatctctaggatgcatttctctgtagttagtttctaagtctcttgttcctgttctgcctttatttttttttcctggattctaagccagtatccccacttggctgtcttaatgtagcttaacatgtctgtaatcaaaatgatcatctttctgagattcaaagggctataagggactttggagagaatttcattcagttttcctcaaactagaataatgcttgcactgtctgtaaaagaacaaaagtgtcaaagcayccttttgttcactaaatttccttttttattatagtgttacttaaatattaggaagtaaaagtaggtataaacttcttataggctgttattatacaactatatgacccatacatatttacaaattaagtgcagccaaaattgcaaartcaataccattcaaattaataccttaaatgtggtgaggcagctgttgttcaactgaaaccaaattataagttgcatggcagtaaatgctatcatgctgatcattttgagtttggccagtctatattatcatgtgctaatgattgaattctccacccatttttctacttgtatgaccttaatttgatggcacctgttccatcctcatgagtttgctacaattatactggtgccaacrcaatcataaacacaaatataaacttgggctttgaaatcttgtgccagaacttggctttaaagtaagcatttaaaaaatccatatgtgtttattagactttgtttagatgactgttgaaatgaaaacaaagtgtttaaaatcctcttagagaacttaaatataatccctcagcaatatgtatacagatcttcctttgagaaaaactgattgtgttcagcctctcatgttacaaatggggaacctgaattctgaggtctctagtgagagaacagggactrgaatctgtggatcctatctgttttaataataattgtaaagtataatagataatattatattaataaaataaaagcaaacacttagaatgagcttccatgtgtgaggcactaactgattaggcattattaactagatttattccttttaaggccccgcgatgtactgttatttccacatgttgtagctggggaacgtgctactcagagaggttaagtaacttgtctgaggtccacaccactaacaaggagcacaggtagggttcaaatccagataatctgactttggagctggcactctaactcaatgtgcctaatcgcttttcagtggtgtcattattttgcctattctccatctgagaatattgaagtttctgactccttccttgcctttctccctgcctcccgtgkttatccccaggtcttggtgttccagtcctctatgtccgtccttactcttattcctttgctacagtgtgatccagggctcctgccccttcttatcctggtagagggggcccacttgctgggaaattgtctccgccatggtttatccatgttgtgtgtccattagtgagtagtgggaagaatcatatcatgttggcaatgaaaggggggctatggctctggggtagtctagtctgaacctcttattttacggatgagaaagctgaggtacaaagcagggaagggatttcttgaggtcacccagccagcaactgagctgcaaccagaagctgagatccccaggactagggccgagcctcattctgtcccatcacagtgacttttcttccctcctccaaactatttttattttttatttttttgcagctgcttagcagcttgaagttagaagaaagggcagggaaaaggttttccgtgcttagccagggaaggaatcctgcaacaggatgtggggttgggtcattcaaattgggccagactccactggtcttgttgcttcttgcttggtattgcagatgggtttaaaagtgttaggattagagagataggcaggtttagccaaaggcagtttgtagccttgtggcagagttctttttaaagaaggaagtgggatgcaacaccctgacacaaaggggcttaagttgttataccactgcctgctaacctgttttccttaactctcttcctgatttctaaaggaagtatattttgctgaatcagaaagaaaagtgatttatttcargttgctgatgcttagattgttagagttgsaaagatctggcttgcatcttgtacarctgacagaactggggctcaggggggcacaggtgcccagagttggtcagtcaggaaagtagcaccagaaccagtctcctggtggccctacagttgcagacccttttttgctttgctctctgtgtatactaaagcttctatgtctctgaatctcaagttctgactggtagctactttccaatccacctggcttagatttctagattatattgtttagacgtcagaacctcttaagggttttggggccacttgttagctcacatagtgagaaccagccctgcccattaggtaggggaagaagttagcagtccatgatagctgttgcctgcagcrtayggaygttcattgcrcagttcctgtctcctgagatcctggagtgtatacgcttggcctcagagcccagcacagagcctggcccttgggacatgcttagtaagtatttactgaatgagtgggaaatgtcttaaggcccattagtttgcaggtcttgaggaggctcccttgcactaggaagaatagaaagcatacataaagcctgtgtgctgcygccaggaagactagaaacgctatgttcagcctggagctgaatggtataccccagagcaaccctgttgaaaggcagtgcttgccttttcattctgtgtcctggtttgctggtaactcctgggtcccctgcctctcctgtacccccattgtgcagactgaggggggaccatcagccagggttagttttccgctgtttctgttaggcaaagaataaattgaattgagttgtgaaagttgggtgcaaagctcagtttgggtccaaagtaacagttaacttgtgtgggtggcaggtattcagtacaaacagggctggggacaggaaggggaagagaacttcagagctttcacgatcctcatctggttttaggctgatccagaggccaaggtccccatggaacaaactggacaaagtgagggtggccacatggcctcttttcttttgcctttattattaattttctcaaatagatctgactagtcatgtggctgggaaaatagttaattgtgatttttttttttttaaactgagtctcactctattgcccaggctggagtgcagtggtatgatctcagctcgccgcaacctctgcctcccgggatcaagcaattgtcatgcctcagcctcccgggtagctgggattatgggcacacagcaccacgcctggctaatttttgtatttttagtagagacatggttttagcatgttggccaggctggtcttgaactcctgacctcaagtgatccacccacctcagcctyccaatctgctgggattacaggcatgagccactgcacccagccagagtaccactatttgggcattctttaatgaaaaagaatgaactatccaaaaattaaaactcctcatttatgagcttttagagaattttacagagtagatggaaactctctgcatcctttccccacttctastttcacctgacacatttcttccctgtccttactcctgggccggcagcagtggtcatgattccaatcccagcttggccaccatctgcctcagtggcctaggaaaactcctttctccagagctttagttttctcttctacggaatgaagaaagttaaaacaaatagacatttattgtttcatttggataaatatctattaagcatctattacttgtggtatggttagctgggtatatagtggtgaagcagctgggcatgagtactgctttcgtagagcttacagttcagtgaggccagcagatgtgaaacatatcatcacacaaataaaaatataactatcaactgtgatgaggattatgaaggaaaaaatccggcaaactatggtactggtgttagatactagcaggtgtgggtagggatttcatttagattkacaggtygtcacattaaagctgagagccctgaagttcaagcaatggttagccaggcaaagatcagaggcytagagatagggaaatccattccaggcagagagactgggggtgcctgtcccctaggtcagggaacagaagaaagccagtggcactggtggagtgaataagactggcgggggatgagttggtagtagacatgaccagatcatttagggccaattctcctggggaaggagaatttaatttaatatttatttatttatttatttatttatttatttatttatttatttatttttcaagacggagtctagttctgtcgcccaggctggagtgcagtggagcaatctcggctcactgcaacttttgcctcctggtttcaagcgattctcctgcctcagcctcctagtagctgggattacagacgcccaccaccatgcccagctaatttttgtatttttatagagatgcggtttcaccatattggccaggctggtctgaaactcctgaccttgtgatcctcctacctcggcttcccaaagtgctgggattacaggcgtgacccacagtgccccctgagaatttaattttattttatgtgcaagaggattccctgaggtagtcaggccacattgtctggtgactcttgggatagagggaacttgaatgacaaaggcccaagaaagcaattgtaatcattacatatacatggaccattttatgctgttttcttctttcatttaacattatttagtgtgcgtgttcacatatttctaaatcatcttctgatttagaataatgatttctgatgtgtaggctgtgttttatagttttgaaagtaatactttgatatccattactttcttgattctcacagcaattctgaggtgtatgcgttgcaatttctgtttcacagatgaagagagtattgttaataagttaatggccgggcatggtggctcacacctataattccagcactttgggagaccaaggtgggcggatcacttgaggccaggaatttgagaccagcctggtcaatgtggtgacacccatctctactaaaaatacaaaaattagccaggcgtggtagcacttgcctgtaatcccagctatttgggagggtgaggcaggagaatttgcttgaacctggcaggtggaagttgcagtgagccaagattgcaccactgtactcctgcctgggtgacagagcgagactctgtctcaaaaaataaaaagttgctaagaggagggctgggatcttttggctccaaatctactgtgggatgatgcctttgacattcctgatagctgtgcagtaatccattaacacagtttttataagttcaaaccctgttgccaacatttagattgttccatgtgtgctgttacaaataaattactataaagattctatacatttaatcttttattatttttgtattatttctgtaggccaaaatctgaggaacaggattactaggttgaagggaaatggcccttgaagtgtctgatcagatgtctttccagaggatccaaccaatttaaatagccaccatcaatgcatgagactttgtagttcagggaaggcaggcctggttttaaaaatcatttcccctctctagcatttttctgatgtgatccttaagatttcactttagttttcccaggtctcattggcatgtatgctgttagggatgggtctaaaattaatttttcttcacattcatatcatgtcatcccagtgattatttaataaataatcacttgattaaatagtgattccttttctagttatttttgggacatttattaaaacctggatatggtggctcatgcctgtattcccagcactttgggaggctgaggtggggggattgcttgagactaggagttcaacaccagcctgggcagcatagcaagactccatctctataaaaataaggaaattagtcaggcatggtggtacttgcctggagtcccagctacttggaaggctgaggtaggagaattgcttgagtccaggtggtcaaggctgcagtgagctatgaccatactactgtactccagcctgggcaacagagtgaaactctgtctgaaaaaaaaaaaaaaaaaaaaaaaaaaaaaaaaaaaaagatgtgtagggagcaattttggagttattcatttggtcatttgatatgtagttttagttttggbgctgatagagcccagaatktaccctgaatttgatgaacattctgatatatgggggagctcattgtcccccacttacctttttgcctctcagaatatcttttgatatttttatctgttttttccccattgaatgttattaccttatcaagctcaaaaaagtaccctatcgctattttaagttcagttgtgttaaatctataaattagcttgggaaatttggatattaaatgaactcatgaagaagcagagtttagctctccttaattctcatcttcctttatttatcctactacagttctgtggttttcttttatgtaagaagcacatgtttggctaagttaatgcctaggtttttttgtttatgtgtccattctcactgtggatagtattctcttttccccacattatattaatttaactggttttcagagactaatagcaatgctattatttaggagaatttaccttggttctgattaacttacccatacttgcaaatcatttgcagctttttagttaactttgtgagttctcttagatttaygaccatgccagaaacagaaaggatattttcatctcttcctttctgatgtttattcttcttgtttcctttttttatcccccattatattctcaagaatctctcaatactaagaaatagcgacttcatttttcagcgcrgagtgcattattttggctaccatgattcagaagcctcttgcctaaggcccaattttattctgctagttttctctgttctttgtacatggcccttgcgctgccctaaccttgaattaacgtggctaaatctcaagaatttaagagcaccgtgactgtgtcctcaggctagggagggaaatgggttcacagagtgactggattgtggtctatgaacttcggcagccagcagcaaaagtcaggcatgaataatcaagtggacagtgaacatctgtagtgtgggagatgttggcataactatgaatgatgattcaagagtggtttgatgcatattgaataacatgatgataagtactagactctgtgctaagccttctatgtgaaatacatttaattctcataataactctagagcagtggttctcraccggggccggttatccccctaccccaccccaccctcacccttccaccagggacataacatctggagatatttttggttgtcacaatcctgggaatgtatgtgctgatatttagaggttgaggtcagggatgctgctgaacttcgtagaattcataggagagtctctcacaacacctatctggccccaaatgtcagtagggtcactatcaagaaaatctgctctagcagtgcctgctcatattatccccatgttgaaatagcaagatgggaagtgcaaagtggtgcttcggtactcttggagcagctttgactttggtgagaaacgccttttawaaacaatgtttcttcccatcttcccaccccatggggaggtgtggggttgggtgggtaggcaccaaagcaagatttagaagagttttctgtaggaatttataatggtaaaggatcaacttcatttccaagctatttatgagggtttatgtttaggaaaagtgctaagcttagagaaggaggagaaatctgattttattaatgagtgtagccataatggcatatcctggcagaagtcaastttggtttctagagggaggctattatgaaaagaaatacctggaacattcccctgggtttggaaggtgagttctaggttcaatgatgggaagaattttagaggtccaagataaaagggcaaagattaaattttgtctctcatgagttctctggctcaggtggtgtgaactttgcagacagtctytttaattcactcatacatgctagtctcccagctcagcaagggctttgagagagcaggtgtctgtatgctctggtaagtgaaggcaaagtgcataaggaggttggggtccataatggcgaagagaaggagcccttcagtcagagtggctttgaatcttggctctgccatttgccaatcttggaccattgggcagtgtattaactctttgaatctcagcttcctcttctgtaaaatgtgtataacaagagtactaattggattgtttgatgattaaatgagttaatgtgtataaagcactcacaaccctggtacatagtaagacctttcattattattatcatcatcaattttttttaacctcttttcctgatctgcttacactcaccagcttcagctgctccaaatggcttgtaagattttttgtttgccctttgctgtcagttgccatggggaagatccattcatttttttcagtcaaccaacatattttgagcatctgctgccctacaggatcctagatatgggggctgcagagatatccaggaacataagccttgattaattgggtcagatcagtgctcagcagggctggcaagtgctaggtttcttttaagtggcatatcttaaaaggtatatgtcctaaacatagctttgtgatggcagcatgatgggtacaaaagcacacacttaagtgtcagtagatctgggttcaaacattggtgcagtttcttatggctcgtaacttgttcaaacctcagtttcttcacttctaaaacggtaatgatacaacctacctcacagggttattatgaattaaatactggagatgagatacacaaaacgtcttgagtacacagtagctgcccaatattggctgtaagtattataaatctacaagctgtgaattaattttacctctstggatcctgttgatatttctagaccatkccacctagtggggccatttcctacctgagtcacccgtggtgtcaaatagaatgtcatgtggcctcctgagttgggtagaattggctgctcatctcaaccccgctactgactatctctgtgatttacccttcctccagccttagccttgctacatataaaatcaagacaataatrtttcctatctcacagggttgtcctgaggattaaattaagtaattaatataaaatgtgccttgtacatattgggccctaaataaacagtagctactatttrtccttaaagtacaaatggtagtttcagagcttcaaggctgatggctatttatcttactcatactctttgtttagcttcatttttttcccctaatttcattagtattttcttttcttttttttgaggtgaagtctcactctgttgcccaggctggagtgcaatggagcgatcttggctcaccccaacctctgtctcctgggttcaaacagttctcctgcctcagcctcccgagtagctgggattacaggctcccgccaccatgcccagctatttttttgtattttcagtagagatggggtttcacccttttgaccaggctggtcttgaactcctgacctcatgatcaacccacctcagcctcccaaagtgctgggattacaggtgtgagccaccacgccmggcctcataagtattttctaaatttatttacagtcatgccatttaaaaggaaagttgtattcctgtctttgttaatatttataagtgattttattcagctacaagcttggaatggcatataattttgtattctgcttttttcacttaatattacatggctaatgatttctgtgtttcataaacattattctgatgatggcatgatatattgttgagtacatgtaccataattgaatcatttccctattgctatgcaattaagttgtttccaatattttgcaattataatgtttcaatgaatgaataactttatgcatatagctttttgatatcttaagttcagtttcctaggatgaatttccaggaatagtaattgggcaaatgggataaacatgactcttgaatacgtattgttaacattgctttcccaaagggctcaactgatttatatttccgtgttcattatcttttaaaccagctcatttactcaccaaacatttttaaagccattatcatgtggtaggcttagtaagaagaaagtgaccctaagggagaagcttatatataaatagggtccctggtgtaccaagtgctgatacagacacaaagtacctggggaaattgagatgagggagtcctggctcagctgggagaaaagttcattttcatagagtcatggttttgttctttggcagaaagaaaattgctttcttccccacccccacccccagctttattgaggtataattgacaaataaaaattgtatatctttaagatatgcaatgtgatatatatgtatatctcaacttaaaaaataagctacagaataaaaaggtgtttgctattaaaaaaaaagaaaaggctgaatgtcattcccaagcttggaaatttgagtatgttgcctctttgggattatttacagaaatattagcaagaccagccccatctttggtcttgagtactccactgtcagcatgctttcttccagagagggatccatttgcctttatttttcattctgttgtgccgtctatgcaaactattcttgatagttttatggtaacagtgtttttttgttccatgagataatttatacatgctcattgtggaaaatttagaaaagacaggaaagtattaaaaacatcacttttttttttttttttttttttttttttttaagagacagagtcttgctctgtcgcccaggccggagtgcagtggcgtgatctcagctcacagcaacctccgcttcccaggtttaagtgattctcctgcctcagcctcccaagtagctgggagtacaggcatgcaccaccacgcccggctaattttgtatttttagtagagatggggtttcaccatgttggccaggctggtctcaaactcctgacctcaggtgatccgcctgccttggcctcgcaaagttctgggattataggcaggagccactgcgccagccacacctacgttcttatcatcctagtacatccactgtcattatcttgctgtatttccttctgcccagtctcactctgatcatgcagtggcgtgatcatgcagtgatctcggctcactgcaacctaggccttctgggttcgagtgattctcctgccttagcctcctgggttcaagtgattctcttgccttggcctcccaagtagctgggattacaggcatacacccccatgcccatctaatttttgtatttttagtagacacagcgtttcactaaaattttgtatttttagtagagatggggtttcaccatgttggccaggctggtctccaactcctgacctcaggtgatccgcctgccttggcctcacaaagtgattacaggcatgagccactgcatccatcgccaaaaagattttttaaaagagtttaatgtagaaccatatcaaaggtctttggaaataaaaaacagttttttaaaaatatcagaaataaaacaacaaataaataaataaataaaaacacccaaaacaatctgaagcaygagcacctagcagaaaggttcaattatgatctattcatagagtggaatatcaagtagacattacaggacatgttttaagattatattttatgtcatgggaaatgctctcccagtatgatgttaaatgaaaaaacagaatacaaaagtatatatgctgcatagtctcaatattgtagagaaaaaatattatttatgtatgcatgaaaaaagacaaaagatgttaacagagatccattgttacttcagtttactagggattgtctctgggaggtaggattaaggtgatttatatttacctttttaaacttttctgtatttttttattttcaaattttccataaaaatataaggacttgaagatcaagaaaaaatttctgctttggctcagtgcagtggctcacgcctgtaatcccarcastttgggagccctaggggagaggatcacttgaacccaagagtttgacgttccagtgagctatgatctccggatcskaccgcctggacgatggagcaagaccctgtctcaaaaaaaaaaatctttgctttttttttttgtttgtttttgagacggagtctctctctgttgccccagctggagtacagtggcacaatctcagctcaccgcaacctctgcctcctgggttcaagcgattctcttgcctcagcctcccaagtacctgggattccatgcacccaccactatgcccagctacttttttgtattttcagtagagacagggtttcaccatgttggccaggctggtctcgaattcctgacctcagctgatccaccggccttggcctcccaaagtgctgggattacaggcatgagccactgtgcccagcccaatcttttgctttttttaaaaaaagaagacaaaaagggattttataccagtattatcttggctgtgtgactctgaagccacagttgtaagttataattactctgaaacacaaggccctrtgactcttttgggctctttggtgtttatcttgattacaacgttggaatatagaaatgaaaggaatgggagaggtgatagacttcaggcagtgtaactagttgtctgaacactactggctcaattatattgtgtctagtgatttccatcttgtccgtckgctaatttatcgcctggtaactcactgaggcagggttttcctttggagaaacctcattgttttaaccagtgtatcatgcttgtttagaagttcaatgatctttttaactcatcggagaagatgatgaccagacctggacagatggggaaggactttgcactctctctttacagtcctgagtgcacacaggtcaatatggaactatgtgtgaattttcattgtctttgagagccctcttctctgccccatagggagcagctttgtgtgcaattagaggagcaagggttgtgtgtatttagcacagcaggttggcctggtcctctcctctcaacatagtcaccacatacctggcactatgctaaggctgggaatgcagacagatgggtgcctgctttcagagtgctcaatgtgctgaggaagccagcaacagaaacagatgatttcaggagctccaggaaaatgctacaggaggagtgtgcctgggttactggagtagcacaggaggagggcttctagctcaggctgagattttagtaaaggaaattatgccacgatgaatcctgaagaatgaatagaagtgaaccagataaagcacgataggaagcatcttcccttacctaagggaagacacagaggtatatggaatggtatgttaaaaggttgggactccaaacagttctgttaaagcttagagagtggtgggagagactggagaagttgattaattagtaaatgaagttgtctgtggatttcccagatcccagtggcattggayatccrtatyatttttaaawttacagtgttctatcttatttcccactcagtgtcagctgctgctggaagtggcctggcctctatttatcttcctgatcctgatctctgttcggctgagctacccaccctatgaacaacatgaatgtaagtaactgtggatgttgcctgagactcaccaatggcagggaaaatccaggcarttaacgtgggctaaattggacttttccaaagatgctgtctttgggaaacatcacacatgctttggatcagaaaacctaggcttctaatttgttgrtaaggcatgaactcaggagrctgttttcagtcctagtgaatggtgataattgtaattrtaacagtagacaacatctcttttacacattttaaatcatgaaaatagaataaccktactgataattttagaaagtggtgattaaaagcacatttaagataatgccttaacacctagtcttttccatatgcatgatgtcttaatcacacattgcaaatcatggaacacagaattttaagcagcatttgtgtagaacttctcagttttactaatattattttattttattctcataacaaccttgaatagaactcagatcatctgtcaatcatgtattttgataacagcctttacagtgagcatagaaaatacagtagtggctaacaacacargctccagatgtcaggttatctgrgtatgaattctggtgtcagcattcactaagcatatgaccttggacaagtgatttaagtttcttttaaacagagaatagtaatacctacctcatattattattgtcagtgtatcatcttacaatcacagtctttctcttagggcygggctcagtgggtggattgacactgcagaaatggccagatctaaaggatcaacatttacgtagctgggaaatgtagctgggacttcagtttcactgcsctrgtgatttttcctaccactaagcagctcagtccatacccctacgagacccacaagcttatgagatactgttcttccaggaaagcagtggggccagggccaccttttaattgtgtttcttggcctggtcccatctttctcacaatayatagcaacagttatttacttgctgattttctaatgcacatcacacatagtcatattaaacacacacacacacacmcacacacacmcmcacccctcaagaaacattttctgagrcgtgatttcctgatttcatcaaaaaagaaaagagcgggccaggcacagtgggaagtcaaggtgggtggatcacttgaggtcaggagtttgaaaccagcctggccaacacggtggaacctcgtctctactaaaaatacaaaaattagccaggcgtggtggcgcacacctgtaatcccagctactggggaggctgaggcaggagaattgcttcaacctgcgaggctgaggttgcagtgagccgagattgcgccattgcactccagcctgggcaacagagtgagactctgtctcaaaaaaaaaaaaaaaaaaaaaagcataaactgaaatttatatgcaatttatatgcctgtgagataattctgttttctcttttggaaccccaaagagatttttttgattgatgagcaaatacattttagattttatttaagcattatgccaagcaccactgaagtataagtttcaagggcaaactcagttttttcatctactagacgaatgattttctggaatgattacaagcaggcaagatggtgtagtggaaatagcaaatgtcttcggcatcagacaagttggggtttgtttgtatcctgcctctgcccttcaccgaggttgtgatcttgggcagattgttgagttttaacctagattcctctgactccagatcataaattttcagaaaagttctgaaattcttgtatatacwgatgrtaaatgagacttttccttacatctatgcacttctttgtttgtttgttttgagatggtcttgctctgttgcccagactggagtgcagtagtgcaatctccgctcactacaatgtctgcctcccaggttccagtgagcctcctgcctcagcctcccaaatagctgagactacaggcatgtgccaccacrtccggctaatttttgtatttttagtagagacagggtttygccatgttgaccacactggtctcgaactcctggcctcaggtgattcgcccgcctcagcctcccaaagtgctgggattacaggcatgagccaccatgcccggccatatccatgcacttcttgcaaccttaccttcttttctcatcaccctccagggacctagttggaagagcagagttaaaagttaaggtgaaacttggagaggtgtcttgtccctaggaacaaaggactggtttgaaattctctgtaaatcttccccagttcaaaccagagttatcaaggtcttaaaaacttccctgggtcctgagagcccattatattatttacttgtcttcctgtacacccactgcctagtcctgatcctacttttgtttgcaaataggatggggcacaacgtacaaggaagggcctttgccrcccctgctaagggataacctgaaataccttcaccatcactgccctgtgctgcttttcacctatgccagtctgtctacagtgccagtgtctyctggcattgaaaggggagaatcttttggtcctttgagtatttggttgggttacataaatctccctgaatgaagagcagctgacttaggcaaggggccttgtttggttttccttgaactattaacaggaagatagggagattaactgtgtaaatgttcaataggccagagtccctgcagagggtggccacagtgatcagatcttatcacatccttgctttggrtgttgcctctctggttggagtatggatagaaaagaaagaaagaccctatattgaaaygcaaagtgcagcaagtcctgactttggattaacttctcagcccatttgcatgaaaataaaaagatgaataaaacarggttcccactttggagggaggtggtagctgtgagatggaaggagtgttcctgctgggcaayagcagagtaagtgctggggtagattcaytcccacagtgcctggaaaatcctcataggctcatttgttgagtctttgtcctacaccaggcactctgcaaaaacgctttgcctgcaaggtctcatgcgatgctcaccacagctctgtgaagttaattgtacttttatcaccattttacagatgagaaaactgagggtatggggtcaatgacttggctaaagtcactgcttagcaagctgcagggactggatgtgaattccaattggtttgactccaaagcctgtgaagctacttgttcttcaccacctagagctgtggttcttgataactgtgaactcttttggggtcacaaatagccctgagaatatgatagaagcaggagctctggcctttctgtccatacctgaacaggtccttgggttaagagcccctcgtccagggcctattaatcttgatcctcataagcagcatccatgtatwamggccgcaaaccaaactgtgccagaccgaatcctaggaccaagcccaaatatgtcccatcatccttttggtaagaagctcattgtaagaaagaaagaggagagcaagaggatgacctagtgcatggggcctcattgttttaattagtgacaaaacaacaataataacaacaaaacccccgaagcttcacagatgacatcagaccccaagcctgtgtgtttttcaggtgcccttgaggagctttgtagctggcagaggaggtgaaactgacaaatgtttggcagatggaggagagtaccagaggggtttgagatgagctaaattycaatctaaccgcaggtgtgaggaagaggcttggattgggaccatggagatgggggttctactcccagtcacgccagctgactttgcgagtgttctttgtcagtcactttatcttattttatttatttttatttttttgaaatggagtttcgctcttgtcgcccaggctggagtgaaatggcgcgatcttggctcactgcaacctccccctcctgagttcaagcgattctcctgcctcagcctccagagtacctgggattacaggcgcctgccaccaagcccatcgaatttttgtatgcttagtagagacagggtttcgccatgttggccagggtggtcttgaactcctgacctcaggtgatccgcccaccttggcctcccaaagtgctgggattacaggcgcgagccactgtgcccagcccacttcatcttaccrtagttacctccttagagtatgaaaaaataggcttagggcatccccaagtcccctctatgtctgagagctgaggctggctgtcaaagaggaactaaggaygccagggactttctgcttaggacccctctcatcacttctccaaygctggtatcatgaaccccattctacagatgatgtccactagattaagaatggcatgtraggccaagtttccacctgagagtcagttttattcagaagagacaggtctctgggatgtggggaatgggacggacagacttggcatgaagcattgtataaatggagcctcaaaatcgcttcagggaattaatgtttctccctgtgtttttctactcctcgatttsaacaggccattttccaaataaagccatgccctctgcaggaacacttccttgggttcaggggattatctgtaatgccaacaacccctgtttccgttacccgactcctggggaggctcccggagttgttggaaactttaacaaatccatgtaagtatcagatcaggttttctttccaaacttgtcagttaatccttttccttcctttcttgtcctctggagaattttgaatggctggatttaagtgaagttgtttttgtaaatgcttgtgtgatagagtctgcagaatgagggaagggagaattttggagaatttggggtatttggggtatccatcacctcgagtatttatcatttctgtatgttgtgaacatttcaagtcctgtctgctagctattttggaatatactatatgttgttaatgatatcatgcagcagacgtgcatctgaatgggctggctctaggagctagagggtaggggctggcacaaagatgcatgctggaagggtccttgcccataagaagctgacagccaaggctaggggagttctgtcttctctgcatcagntcacctctctcacctctgtcactgccccntcagactacaatgtctgcaggtctttctcccctgagtgtgagctccctgagcaaagcaggatgctgccccttccctttgtattcctggctcctggcttcagtgcctggacataagtatgggcataataagtgtcccccaaatgagacattgaggattcttcaaatgcacaggaccgtgatgtgagttaggacggagtaaggacgatgggatgtggctcaggacaatcctgaggaagctgcagctgcggcangcagggccacactgtcatgttcatggaccctagactggctttgtagcctccatgggccccttccatacacaaatattaaaaattatatttcatgactgcattggtataaagatgaatataatccagaccagattcatgattattcatacatttttagtgtattaacttttaattctgcttttaaaataaattaaaacattctaatatgcccttaagagtatcccaggcccaggccactgagcctactgtggttcatggataagttggccctgggggcatgtgtgtgcatgcatgtgtgtgcacatgcatgatgagccgggccttgaagggtggtragatttgggtgtgtagaccaatggagaaaggcatttggggcagtgatgatgggtgggggagggaacatggtgatgaatggagctgggtgtggggagccatgggagtgggttagggccagcctgtggaggacctgggagccaggctgagttctatgcacttggcagtcacttctgtaaagcagcagaggcagttggcmtagctaaagcctttcgccttttcttgcaccctttacagtgtggctcgcctgttctcagatgctcggaggcttcttttatacagccagaaagacaccagcatgaaggacatgcgcaaagttctgagaacattacagcagatcaagaaatccagctcaagtaagtaaaaaccttctctgcatccgtttataattggaaattgacctgcaccagggaaagagagtagcccaggtgkctggggcttgttcccattagatcttccccaaggrgtttttctccttggtggctggcctgtggggcccctctccaggaggcattggtgaagaaactaggggagctggttgccacagacagtgatgtactaatcttctctgggaagacagaagaaaagtccccagrgaagaatactacagacttggccttagggacagctaggggtgcagattgctgccaactgcattttttctgaagttggccatatggttgcagtgaatggatttatagacagagtatttctgtgcatataagagcaattacagttgtaagttgatatggataagtgaaagttaagcacttctttctaaaaagagaatgcaattcattttcccctaatcatttcaattagtctgatgggcatttgaacttgttrtctttaaaaagtgaaatctttacctctgatctggtaagtatccaggcaatttcttgtgtgccacccaggaggtatctggggagtgggcatttkctgactgaggcattggctgccatagcatcagagcagccttccaggcagtggcctggcaaggggacagaggctggtgggagcagctggctgagtgcagccagtaatggcatgtgcatggtctgtagagaatgtagaagcaataatgaagccgataaaagctggtctgcattttattattatcatgcgccggtggttctaaacaatgtcagtgataaattactcctccccatcatggaccaatggctgccactgctccagggaagtgctttttattccgtttggtgtttagggagggatggagttggctggcctttgctgaaaggcctaccagtttgttttctatttggcaaaagaagaaatgataaagttctagagtttaaaccagactcagatttgagttttttttttttttttttttttttttttttttttttttttttttttwaaggctacaraactgtgctttccttgggcagtaaaagaggcaatgggcaatgkgggacctgatgacaaagggaagcaaagctgtcttaggggtggcatggaggaggtgctgcttcacagcagagagaggtatggctgtgcttggagtgtccacttagacaactcctggctgtgcagccaggccatcgagatgctgtttccttgacctgcaggtcctggtcttgcacatggatgtttcttctggtgcaggagacagaaaggtagcaacaacccctgatcaaagcctcagtccttccttatttactggagagcccctgctgattgaccagaggcacagctggggatatttcctttacctctgtagcaagagacagcgtggtgcagaggaaagtgctagcatacattaccctgtggctgcatgactttgtgaataggttagttagcaccctttcagccacttcttcttacctgttaatgagawaaaacatgtaattgcttaaraacagtatttggcacataggaagcacttagtgaatatgaattatgattttttttggagtggtgacatctcaaccaagccatttaacccctcagccttactttcctcaactataaaatagcagctaacttgaaatgtaaactataaaacctaatgtagtatctggcacatagtagattcccaataaatgagagccagtattctttctaagacagtgatgcatttctgagcacctggccttgttcttctgccttgcaatttatgcagcagttgaaatagactggctgatgggggtaagttgtcaagcagactttctgatcttagtggaggagactgccttaaaacaacactaatttcctttttcttttcttttcttttcttttaagacagagcctcgctctgtcaccaggctggagtgcagtggcgcagtcttggctcactgcagcctctgcctcctgggttcaagcgattctcctgcctcagcctcctgagtagctgggactataggcatgstccaccatgcccaactaatttttgtatttttagtagagatgagatttcaccatgttggccaggatggtctcgatctcctaacctcgtgatctgcccgcctaggccttccaaagtgctgggattacaggcatgagccaccatgcctggccttctttgagaagctggagacatgagttaaktggtgaagaagccaaatctgtatctaaaaaccctacagtwgtgtgcagagctctgaggagagaaggtcccttagattttgagtgtattattatgtcagtgcttgttttacatctctctgttcacgcagtatgtccccttttctgccttgcagctgtttcttaaattctttctttctttgcttgtcttgcagcacaaaacaggcttcagtatagggggaaatgcacagaaacactgccttttcctacaggaaatcagtaactttttactgattttgtttttatttacttattttatttgtttaaatttatttttagttttttttttttttagagacagggtctctttctgttacccargctagagtgcagtggtgcccttagagctcactgagctcactgcagcctcgaattcctgggctcaagtgatcctcctgccttagcctcccgaagggctgggatgacaggcatgagccactgcacctggccaactttttgytgattgcgaatagcactcttgtcaatttcggagagaagctgagactggcatatgtcagtatggatccccacttagagacctgtgtttatctgcactgacaccccatcacagcatgatgagcttggccctcctgtgctgtctctcccagggctgggaggatccttgaagctgatctggtttggagctttgtcctcattcacctcctttaccacacacccaccttcccagggcggggatctaccactcactaagtagcccattctgggtgttgacagctctaattgttagaaaatattcaccaccctgttatgctttctagagaacaagtctaattctrttttccttgaaatagtcgaagacagctctcatgtttttctttccctgttttcccaaagtccatgattttttaggcaaaatggcctcctttcctcttatggaatgtttttcctccccatttctgcctctcctctggttgtgtttcagtatgtctgtgtgcttcttgaagtttactggaaattatgaaagtattctggcacagaggaggaagggatttttgcctcccttgttctgagtgctacatttccgttaatgcagtctgagattgtattaggcattttggcattcacgtcaccttgttgactcatattccatgtgcactcaaacaaaattgtgattattttaaataggcagaattgcaagttacgtgttctccatttctttgttgtattgttggctttttgaactaaagggaaaaatgtcttttttctgttttacatgtttagattccctatgctatcctatcctcccaaaaccattttagattctgattttgccatgtattatatctgatactcctttctcgtcatctagagatgtgataaacaactctctttggcctcattccagtcatcgataactgtgggacaaagacttgaagcttggatcagtccagtggagactaaccacccctgtagacccttttttcctcaactataaaatagcagctaacttgaaatgtaaactataaaacctaatgtagtatctggcacatagtagattcccaataaatgagagccagtattcttctaagacagtgatgcatttctgagcacctggccttgttcttctgccttgcaatttatgcagcagttgaaatagactggctgatgggggtaagttgtcaagcagactttctgatcttagtggaggagactgccttaaaacaccactaatttcctttttcttttcttttctttcttttttttttttaagacagagcctcgctctgtcaccaggctggagtgcagtggcgcaatcttggctcactgcagcctctgcctcctgggttcaagtgattcttgattctgtagacactaccactcaggcctatattgtaatcagtgctgggccactgggctcctgcttctgtgatccagttgggaagtttatcttgttcttcccttcagcttgcatctgctaaattcgctggactatacacaggtgatttgtagatatggggatctctactcaaatactctcatgatttccttggctagagcatcattttatttccacttattggaagagaccttagagaccagttagttcatttatagataaattagttgattctgtcattcaacccttatatattgagcgtctcctatatgcgaatcactgttctaagtgccgagacacagaggtgtccaaaacaaatatggcccctctccatatggaatttctattctagagaagaatctgacccagaagggggaagtgactgtcccaagtctacacaaccacagaagggatattctgggaataaatcacggctaaahccccctgctgctccaggcagttctccttctacagtgctctattgtgctgttttaataatctttcaactgggaagaactcccatttcaggaattaagcygtggacaaatcttttaattatccttgaaatcatcctaataagaaatccaaggaggaagtcttacagggtgcctcacccacttttctcatcactggaactttttagacattttattattttcttcctaaaccagagtacaggcacacaagttgagtggtgtggtggctaaattaattaatgtttgcaaggcagtgtgagaagcattcattcatcttaaatacctatggtgactgcaactcagatgtaaaaattggataaatcctcagaaaccctagggaaagtgacatgtctgtattttgtctctgtgagatacagactggcagagataagtgtttctctgggtgagttttgtgtggtatctgggatgattttaggcagtacgtggatgagaacttttaattttaacccacatccaattgcaatttcatggaaattattgcttaggaggatgttcaacaggaaaaatataattaaagttaattcaaaagaaacattttctgtgaatatggtaaaacttgtgagagtagtttgtaaatgattgaagattggaaaacattggtataagagtgagtgtggggttttgtattaagattcattttgggaagaaatccatgctgcatccctcatgaagtgtgaactttgggcatgtgttgattctttctggcccagagtttacctgaagattagctgccctgagggtcactgagcattaaattagatgatgtctgtggatgactgatagtgaagctcatagcccacagttgacacataataaattcgagttgctttgcttccccttctgttcctggctgactgtttggcctttgccacttgttcggcctctctgggccttaagtttctttgccttgaaattggaactttctttggtgaaacaaccagaaaatgcttcagcccagaaacttggtcagtacttggatgggggatcacctgggactacccaaggatgtgggctgtctgctagactatagccccttgagggcaaggtgggcgccttgctcatggttccatcmtaagccccagcacagtagtgggtgcatggtgagccattagtgaatctttgtggaatgaaggtgggagaaaataaaatacctgtacttcacagggtattgtgagggtcaagtaaaagtgctttaaaaaattgtattatatagtttattcccttgtgttagcccaggtcaacagagcctacgaataataatgatgacagaagttcttcaaaaagtcttggccttctttctttcacaaaattgccccccagagctttctggaagggcagccatgaacccagaggcctaaagtagatttactgggaagctaaaaatatttactttatttttcatagctcctttcaaggtcctctctgggggtcttagcaatatgtttacacagtggtatgtttttgtaaggtttgcaaaagtaagattttttaaaaatactatcttgttttaaaaagagagccccctaccaacttgtgtcagcctcaggcccccacctgcatctgctcctgccagggcatggtggggcaagaagcactgctccccttccaaagcttccttccttgccctggagtcatcctcactccccactccaagccacctgccatcgctgtgccccctctctggtgaatctggcattcttaggtgggctgagaagcagactggcccaagctaaggcctttctgatggggttgttgctgctgagaatcatgactgggtgggagaaggaggtgaccctttgctgtcttatttttactgtgtatttccttttcagctacttaaaatgtattgcttagtgatacctaatgggttcattagcctgcttcctactgaacatttccgctcaggcatccacttggtcccaaggcctgctcctctcccatattctgaaatctggactacagactctcattcaactccaggttgcactgtggacacagtcccctcttgagcaggtacctccttgcagtggttgggacgtcctacttggctcatagttgggaagtgcatatgctggagctgaagcctcttgccttcccgggatagggcgtcctcacatcccctctgagaagttccccagcttccctctgttccccgtttccacacttagcgaggctcttgtccactgctacatcccccatagccagtccctcagccttgccaytgcttatgctggtctggaaacaattcctagacttgtggggcatctggggaagttctccatctttttttagctggcatgacccaagtggtgtgggcagggctgtggattctatggtgtggctggaagccaggtagcctctctctactgtacatggaactcagcaacttctgagtcaagcaagatcttagctctgcaggtgtcttgccctgtccaaagttatggccacaccagtaccttttaactctagaagcccagtaagtgttttgtgggaccgcaaagatcattttctagacctgctgaatatgcctagaacgggtagggatggctttcacgctgttcctagggctgacaagtcacacgtttctgggggtacatacacaccgcggtccctgtgaatggcactctccatgagaactgtgatgatttgagttgaatagtgcacagcctacatggttctctgccatggcctggagttccttatcttgccttctccagtgaggactagggctgcaactggcctactttggctcctgacttgggggattctgaaataccttttttttttaaggttgtggagctctctgaagcttataaggattttgccaggaaaagataagaaatatctttgggcattttgtcactgtgctggagatgaaccctttggaggacatatcaccttgttgaggtcaaggggcggaaagggacaggactggcagagagatccggggcagcagcctgccatcccgactgagtatggagtttctctctcccttcagctgcacttttgtgtggagtcagtggctcagctgccacttcccttatgttcatggcatgaatctggcttgttaggcctttcttttttttttttttttttgagatggagtctcactctgttgcccaggatggagtgcatggagtgtagtggtgtgatctcggctcactgcgaccaccgcctcctggattcaagcgattctcctgcctcagcctcctgagaagctgggattacaggcgcatgccacaacaccctgctaattttttaatttttatttatttattttttttcaaggcagaagaatttttcttagtacagaacaaaatggaatctcctatgtctacttctttctacacagacacagcaacaatctgatttctctatcttttccccacatttcccccttttctattcgacaaaactgccattgtcatcatggcccattctcaatgagctgctgggtacacctcccagatggggcggcggccgggtagaggggctcctcacttcccagaaggggcggccgggcagaggcgccccccacctcccggacggggcggctggccgggcgggggctgccccccacctccctcccggacggggtggctggccgggcgggggctggcccccacctccctcccggacggggyggctggccgggcgggggctgscccccacctccctcccggacggggcggctggctgccctgctaatttttgtattttcagtagagatggggttttaccatgttggtcaggctggtctcgaactcctgacctgttgatccacctgcctcagcctcccaaagtgttgagattacaggcatgagccactgcgcccggctctgtttttttgtttgtttgtttgtttttgtttttgttttgagacggagtcttactctgttgcccaggctggagtgagtggagcggcacgatcttggttcactgcaacctctgcctcccgggttcaaacaattcttcctgcctcagcctcccgaatagctgggattacaggcacttaccaccaggcctggctaatttttgtattttttagtagagacggggttttgccatgttggccatttgaactcctgaccatctttgaactcctgaccatgtttgccatgttgaactcttgacttcaggtgcgttggcctcccaaagtgctgggattacaggtgtgagccaccatgcccagcctgtttggcctttctgatatggctctgactaatctttttggaaattagtccccagggttatactggattttacttagggaaaagggtcatgcctctctggctgtcagatttactgatagtactaaggactcagtggggtggacctttgattctggtttgatttttgaaaatcaaaaagacgtgagctccagggagcagggtggctttggtgacatggcaagatagttggctgtggcagggagttgagggaagtgggtagaaaattaacatcttgtaaatattccctgggaaatataccttcgtgttaagagaacagacttggcagccagatggcctaggttcaaatcttggcttgatgcttatcagctgtgtaaccttggataattccatacatctctgtgcctcagtttcctcaaatggaataacaatagtacctccctcaggactattgtggcaaattaatggacgaataaggggaagcacttagtacagtgcctggcccagcataggtaccaggcttgttcttaagctcactgcatttttacaatcatcataaaatgcaggggatacacacatgaaggagccgaagttcagagaggccaagtaacttgcctaagaaagcacagctggcaaggggcagtaataggaccagaattccagtttctcrtgctctgttgttgttatatcctaaagagagcagctctgagtagccagaagcttccctaaagtcacaggacatggggcatgggctggctgggatgagaaaggagacaagagggcttctgaaagaaatgccagattcactccacttcctggcttcaggcaccgatggaatgtttcccaaggcccatctagaaagaacatcctgtgactcacagccacttctcattttctgtctgaaccccctcacccattcaggcagctgctaaagttgaggttacagcctcagactatattttctgtccttgtggaaccccagtgtgtcatcttgttgggagatctggtgatacatgtgtcaacattatgtcatcaaaatggaaattctttgaaatctttaggtgattgcaattcacgttctgtatgtatgcacttgtcaaaagttttgatttgaggccttagaattttatatttggaaacctttccactaccatgagttttcccagacctgtcaaagccaggctgcatctcagaaaccaggtctttgatttccatccagggcaagggcctgggcccagctgggctgtaagcaggtgggggtggggagcaacgctgcactgcaatgttgaaatattacttgaactaaatcaaatcaaagatcagctttactcagacaagaatagaaaacacaattgcattcgattacagaatagtgtgtatccccacaaatatcagactgcctttaaaaagttttgaattgttaacatcaagaacagtgttgcgtgtctcctgcttttccagcataaggtttatttattctgtgggtggcaaagagcaatttgggagtccagtttgtttctcattgaaagctttcccatttctggtcctcttgtcactgttgcattgaggcaccaaaaggcaatctcartgcgacactattcaacagactaagttgcaccggataatgataccattttacatttttcatatattattacattgaaggcttcaaacagcactagcaggggcaaattggtattattatctccatttcattgatgaggaaaccgaggctcgaaagggtaatgtctgttgtccaagattaaagagtaaagttgtacgttgaatcggggtctgactcctaggcttagcattttctccccacactatgctgccatgttgcttattccaacattaggaagcataggtgccatccccagcttttgaggccaatatcaygatgaagcatttttaaaacatctcattaaattgctgatatagtggaaagaaccaaagctttgcagtcaaagctgtttgggttcaaatttaccacttgtttgttctatgaccctgagcaagatattctccagatctgtttcctcatttgaaaaatgggaataataatacgtttctttataggctgttcttaaagattctggaaaataatgctaatagtgtgcctaatgcttggtaaatatgagtcacttttctgtgcccacaaagcactactatgtcccttaataaattttgttaattttaaaagttagaaaaaaattaaactatttatacattgtgtatgttaattcttccctagaccagccttaggaagaatctcatccccaacttgtaaactcatctttttccgttctttttgtgcctggacttctcagggccctgcaggctgattctagtcccatgttgtgtggtgtttgaagtgtctggtcccttttttcagtgagagaccagctcatccttgggaactgaatgcctcaaactctcttttctttttctctcttccccttctgtttgatgtagtctttcctgtttctggactctgtttcttcatacttcctatctcttaccttcttttcactccttttgtcttccagctgtcctctctcatttttctgcctctctggtcttcaggtagagttttcatctcagctatcttcttgctttttctgatgttggttctttgtttcttcttctcattctgttcaggtccaaaattcatttgggtcaatgttatgtcttagtgttatcttccatttccttctgagcttcaaagccaggctgactgtgcccttccacgccctggccaktgtgaccaggacatcctttccctctggggctgcactggctctttgggggaaktgttaccattcagggtcttcaaccctcattctagggacttccagtaacttctcccaccttccctcttctcagtaagacatgggtattgtcttattctgtttstgctgctagaagaaaattctcgagactgagtaatttatacacaatagaaatttacttctcacagttctggaggctgggaaatccaaaatcaaggtgttggcaggtttggtgtctggtgagggctgctctctgcttctaagatggtgccttgttgctgcatccttaggaggggacaaacgccatttcctcaactggcagaagggactgaagcctctccctcaagcccttttataggggtcctcattgtcaggcctctaagcccaagccaagccatcgcatcccctgtgacttgcacatatacgcccagatggcctgaagtaactgaagaatcacaaaagaagtgaaaaggccctgcctcgccttaactgatgacrttccaccattgtgatttgttcctgccccaccttaactgagtgattaaccctgtgaatttccttctcctggctcagaagctcccccactgagcaccttgtgaccccctgcccctgcccaccagagaacaaccccctttgactgtaattttccattaccttcccaaatcctataaaacggccccacccctatctcccttygctgactctcttttcggactcagcccacctgcagccaggtgaaaaaaacagctttattgctcacacaaagcctgtttggtggtctcttcacacagacgcacatgaaactcatggtatctgtgaggggccctaatgctattggtgagggcactgctcacataacttaatcaccccttaaaggccctgcctcttaatactgtcacattggtgatgaagtttcaatgtatgaactttgaggggggacacgttcaaatcatagcaggtgtgctattgccttactagcaaagtaatctgggggaagatgagtaatgtctcgttccacccctgattccagtgctgactgattctggagtggcagagagggttggaggctcaccgctctgctcacccsaccctctggccatctyctcttagaatgcaagggcagggattttgttacacagcgcctcttttgttataggctagctcctgccttcaaggagcactgagaaaaatattatccctttgaaccacaacactagtattttgggtactgtagccattcagaagtttgttgaactaatacaagtttatattatttgtaaaatactagaaggaatgtgtggttcctaaagttatggtattcccattggttgaaagagaagactctggcttcctaatgccttggaaggttcagggagcataagcctaaatatcctggtttctcttgggaattcttcacagcttgtcatctatgactttatccacatttattttgaacatgtttaattttcagcttgtattttctcaaggagtatgtgtgagtcagcattcagagtacttaacacacttagtgtcattagtgataacttaacccacacgtataggaagctagacctccatttacagaaaaatggaggctcagagagcctaactgactttcccaaggccacataactggaaaattctggaactgagttttttcaggtatgtcttggtatccctcggtgagccttctctgtagagaaggaagtgtctcctgggttggaaagcccaggccgggatgaacagcatgggtgtccttaggctgtgtgtaccacacacccctggcctactctcccctgctctaaggagtcacctgaaggagcagctgcatcaccccgcctcaccccttctcctcagcacccaacaaccaggtcttcccagagagtgctcagctattggtgaagcaggcatcgtctattcttcaagaagacagcagagcatcaggaaaacaaaacaccaaaaaaataccataaagacactggagtgtatttgttaccagcccttgtataacagagaagtatttcaaggtcttatttgtaaggctggacaagctcaggctgattaaaaccacgagttagaatttgtctcccgctcccaggccctgctcagttgacagctcctagcaggctgggaggccccaccccacccccaccccaggggtccattgaagaagaccatctgggcctgggatgctgatgtgattttccctacttctccttttttttcatttgcctcctccacccacttctaaagcagctgattgctctggttccttttcatgttgagcaaaagagaagacagatcttgaaacctgagctggggactggagggcactgaccgagagtaaccccgtctggctcagctcagctcagcaaagggctttcctcctccgccttcctgagctgctctccctcctctcctttcctccttctttcccagcctcccccaagctccttcacccctctcttccctctcctccctcctcccaccttccttgtcctctatgctcagagaactgaaggaacactgaatggcctggaaagcaggacctcgcccccaccccgcgtcatacccctccgcctgcacgtgcaaatgtgttcctcagcttggtcccagaggcctggacctgggtcccagaggtcccagctggttccccggcttggtcccagaggcctggatgtgtggcaagaagctgagggttctgcttcgtttcttccagcccacaaacacacatgtcacctgttttttgttctttttcctttcctttgccccactttacagaagctcttggctaattggtaggtcactgtttgctcctccaggcaaaaccaaggaggctgagctcagcaggtcaagtattttggtctgtattgaagagactgtggtgggagagccctcttgaccttctgctggatagtgactttctcttctgctggcagcagtagcccagctccgcatcctgtgacagaggtcataccttccagttacccgagcgaacacttggagcaagtcagctttttcccctgaaacagcacgttcacgttcttgatctttggtttgcacaacaacctgtgaatgttattagccccgttttttttgtttgtttgttttttgagacagagtgtcgctcttgttgcccaggctggattgcaatggcgtgatctcggctcactgcaacctctgcctccaagcaattctcctgcctcagcttcctgagtagctgggattacaggcatgcgccaccacacccggctaattttgtatttttagtagagacggggtttcttcatgttggtcaggctggtctcgaactyccgacctcagttgatccacccgtcttggcctcccaaagtgctgtattagccccattttatatccaaggaaactgaggcttagggagatttaaataggggggaaagtatagcttcatgattacacagtcaggaaatggcagagctgactcttgaattcagaccctgtgatgctgtatccagtgctgattttgttttgccctgtgttcctttcagtgtcaggtaagaagacctcagagatcatcttctccaacccacacattttactgattataaaatccaggtccgcattaactcattggccaaagttaagtggctaaatgactctcctgttcaggaagtattccctgtcttgtgtggaatgattggtctttcgtccaggtcatcttccacctatatccatccttgcagtgactggtggatatgatcattcctggtgattccctgtaaaatactagatttatttattctttcataaagttatgagtagacaaatcagtcagcttcaacctttcctttaccttatagatagtatcagcagaaagaactcaataattctgtcttaggaactcagccaggctaatatgtattataatacacacatacatatgcacacacatacacacatgtgcataccttagatcacaaattcaacatctcaacttagccgccaaagccacttctgtgtcttgtctattctgaatatgctttaaggttaaattagccatgaatctgttcagatcagtcattcctgaaaatgatgatgatattagccatcctttaccgggcaccttactcagtgcccggcattatactaggtctgcaggtacatttgctcatttaacacctagctcagtccaatgaggtggatgccattgtcatctccattttatcatttaatcaactcagccttcctctctcctgttccccactctgcttctagctgccactcacctgactctcctcttgatctgggctgacgtggctgagtgggtttagcagaactcttgtgtcctctttacttggtttgtttcaagttcatgtcctgcttcatcttttccctaactcactgcaaggtgaattttcttctctgcaatcggcaattccccaaatcacatcaggtcattaatttattcactcatttgtattcattcattcattagttcatccatccatctattcattcattcatccaatttactgagtgcctcctctgtgccaggcactgctggctttggaattaaaaaccctggccctcaaggaatttctattcttctgggagcaggatatttacatgggtgactgcagcttgatctgtgtggtactagtggraaacataggatgttgggcacaaaagagtcacaaaacgccgggcgcrgtggctcatgcctctaatcctagcactttgggaggccaaggcgagtggatcacctgaggtcaggagttcaagaccagcctggccaacatgatgaaaccccaactctactaaaaatacaaaaaggaataatagctgggcgtgatggcgggtgcctgtaatcccaacaactcgggaggctgaggcaggagaattgcttgaacctggggctttggaggttgcaatgagccaagagcgggccacttcactccagcctgggtgaaagggtgaaactctgtattaaaaaaaaaaaaagtcacaaaaaagggctggccacctaacccagcttgaggatgggaaggccagggcaggcttcctggaggaggtgactcatgggccatgtcatgaggatggggtaagaggagaaggtatgtttcagacatctggctttcttaatattcttggctttccacccattttcctgccagcaacataggggagaagactgagaccagcagatacaaagccactgtactctgtcctcaccccctccttttttctccccttcctactacccagatctgaggttttgagaaatctcttctctaattatctgcttgttcattcatttgttgagaatctactatgtgcatagcattatgaccacaaaatgtcctggtcgttgtcatcatgagaggtcttaccccttcctctccagccacttctagggatttttgactctgtccttttccagaacttggctccagtctggttgctcgccatgaagcacttacagataaacctcatcttgggccagtgcttccatttactgtctccttttggcttgcttatccttccttctgccttcttgaattgatttgcctctttatctcycctttcagccttgaaagttcctcgaaggcagggactgtgtccccatcttttctataaatggcattgttgtacattggtaaagttgagtgaaaaaatctttttgataatcacaaattattaccatatattgagcacctaccatgatgagtatctctgatcttcatatctttgaaatgtggatactattaccttcacttaattggtaagaaaatttgtgctcagggaggtaaagtcactttctcacagtcacacagctatttcacaggagagtgcagtatcaaatttaggtttttctggtcccaaaccctgatgtttcccccacatcattgtttctcagacttggctgcaatcacctgaaaaattttattaaattctttttttttttttttttgagacagagtctcgctctgtcacccaggctggagtgcaatggtgccatctctgctcagtgcaaccactgcctcccacgttcaagtgatcctcctgcttcagcctcccaagtagctgggattacaggcacccaccaccacactcagctaattttgatatgtttagtagagactgggtttcaccaggctgatctcaaactcctgacctcaagtgatctgcccacctcacccagccaggttttattaaattctgatgcctgggtcttaccctagcagttctcattagttgctccatggtgtggcctgggctttgggatttttgtgaagcccccagctgagtctaacgggcagtcatgtttgagaaccagtatactacaccatgttgccttcctgttttcacacaggttggtgctagtgtgtgagtctaagcctacatgggtggatatccacgtgatcaggctgcaagttctttgtagtggaggatctttggccctccctgctgcttcccaacccagcgaacctaccacaccatgcacgtgcacagccaagggttgttgactgtttaatcagtctctgggttcttatgtctcatccgggggattcactgataggaggctggagcttgatcacatccagatgttctcatcttcagagcctgttaacataacagaagtcttataaacatgctgagcacactcactggtctggagagtgttgcaggatgacctaggcccattgcaggggtggcctgggtcgccctcccacacttctgccaccctgcttgggaaggagggagctgttttgaagttccctggtgcaatatgatgtattgctctggctctgctcaggaggaagctatggcccacctagtcagtgagggttagctaatacgtgtattctgtttctgttgaggtttcacagaggccttttttgacccttcattttatagataaggcagtggaggcacaactacatgaaatgactcgacaaataaatggatttagaacccaggtttctgactcccagggtggtgctttttccatggttgtacagtgattaatgtctaccttttcacaccagtcctcaactgaagacaccagcttacaccttccttcctgtttctcccaagaacagaaagtgaccccggatgtcgctttctgttcctgggaaggcagttccagtggttagaagtcctgttcactcctggggtgtggcctggggatggtcctgacatccctgggctcttcctggacctggccagctaaaaggaaatctcctatgatggtactcagatacttttggaaccttgtcagccctaatcccatctcctagtgtttagtattcagctacccttcactgggcagtaattctgtgccaggcctgatctgggcattggtggtactaagaacrcatattccctatcctataggcatagtctggtagagacaacatgcaagtaaaacaatgttccttaaactgtggttccacacctccctcccccaacattaaaagtgtaagggatgcttattcaaatgtagatttgtaggctctgcactctagacccactatttcagaatctctggggactgggcccaagaaactgcattttcgcatgctccctaaatgaagcttaggtgctctgaggtttgacaactgcagtagagagcctaatgctaacagtgtagagtcacatgtgatgggaagcatcaggtaggtagcagtttgcaggagcactgattctgagggacactaactgggcctaagaacagctactggctgtcatgaggaataactaggagctagccatagaggggtagcagtgaatcatttctctagcgatgtaaatcttgctcaatttattctgtctatataactcaatattactgaagtttgcctaaagcagaatacacctggatcatacagcatttatgagagactggctgggctgtcaggccctcctgttactttatctctgcatgtgaccctcttagctccgcggattaactcctgtcctcattaagcctcacactgtagccccattttcagatcaaacctgtttctcttctggtaaatgatttcagtttgcaaagtttgccctctagaggttgcttagtgcctggccatgtgggctcagttcatgtggtcctgatgagctggttttatctttattacaaagaagttaggctgttaggagagtgggttggaaggagaagaggtagacagccaaatgagatgagtcagggaaaactatactgtttcggagtcatagggctcctaccaagcatctggtcagaaacctctcattttggagatcaagaaattgaggttcagaaagatgacatgaggtacgcagggacgccaccagacacagcctccaactctagaaactaaaattctggattcttagtgctgctttttctgttttgttgcactggattgaagccttttctaactgtactcagagggcctattatttagggagattcygtatgaaatcctttagcaatcaaatcatttaatagggctgatggtttaaatatatgttaatgtgttttcctaaagcctggcagacctgggttttggagctttgtatcacatgttttatgtttggaatgaaaatgagaccatgtctgtgaaggcactttgatatgcrtaatgcactctgccagtgtttgtcaaaacatggtccccaggtcagcagcatcagcatcacctgtaagtgattctccagtcgcatcccagggccgctgtatcagaaactctgggggtgggggtgggggtgggggtgggggtgggggtgggggtgggggtgggggccggcccggcccggcccggcccggcccggcccggcccggcccggcccggcccggcccggcccggcccggcagtctgcattttaacaagctctccaggtgattctgatgcatacttaagtttgagaaccattgcttgttttgcattaaacaggagattagtctctgcagcttgtgggaataaagctttaaatctctccaattttagctctgtgaaaaggcagtggggagacaggaatgaacggactagtgccacaaagctcaggtggggtgggtgagatcatttagaagagaaagaccgggcatggtggctcacgcctgtactgtcagcactttgggaggccaaggcaggttggatcacaaggtcaggagtttgagaccagcctgcctatcatggtgaaaccctgtctgtactaaagataaaaaaaaaaaaatttgccagtcatggtgatgcatacctgtaatcccagctactcgggaggctgaggcaggagaatctcttgaacccgggaggcgggggttgcagtgagctgagattccaccattgcactccaacctaggtgacagggtgagactccgtctcaaaataaaaaaaaaaaaagaaaaggaaaggctgtgtgtgtgtgtatgtgtgtgtgtgtgtgtgtgtgtgtgtgtaacagcaccatcacactgtttgagttgaggagcacatgctgagtgtggctcaacatgttaccagaaagcaatattttcatgcctctccygatatggcgatgctcccctatctcattcctgtgtgtgtttagccaggcaactgttgatcatcaatattatgataacgtttctccactgtcccattgtgcccactttttttttttttttgagttacttactaaataaaaataaaacactatttctcaatagacttgaagcttcaagatttcctggtggacaatgaaaccttctctgggttcctrtatcacaacctctctctcccaaagtctactgtggacaagatgctgagggctgatgtcattctccacaaggtaagctgatgcctccagcttcctcagtagggctgatggcaattacgttgtgcagctactggaaagaaatgaataaacccttgtccttgtaatggtggtgaaggggagggaggtagtttgaatacaacttcacttaattttacttccctattsaggcaggaattgccaaaccatccaggagtggaatatgcaacctggcgtcatgggccmgctggttaaaataaaattgatttctggcttatcacttggcatttgtgatgatttcctcctacaagggatacattttaagttgagttaaacttaaaaaatattcacagttctgaggcaataaccrtggttaagggttattgatctggaggagctctgtctaaaaaattgaggacaggagamtttagacaagggtgtatttggagacttttaagaattttataaaataagggctggacgcagtggcactgagttgagaactgttgcttgctttgcattaaataggagatcagtccctgcagcttgtgggaataaggctttaaatctctccaattttagctctgtgagatggcactggggaaacagaaatgaacggactagtgtcacaaagctcaggtgggatggacgagatcacttcaaaggtctrtaatcccacgtctataatcccagcactttgggaggccaaggcgggaaaatcacttgaggtcaggagttcgagaccatcctggccaacatggcaaagcctgtctctactaaaaatatgaaaattagctcagcgtggtggcatgctcctgtagtcccagctactcgtgaggctgagacaggagaatcgtttgaacctgggaggcggaggttgcagtgagccaatatcacgccattgcactccagcctggctgacagagtgagactccatctcaaaaaaaaaaaaaaaaaaagaattttataaaatcaggaaataatattagtgtttatgttgaattttaactttagaatcatagaaaacttcctctggcatcattattagacagctcttgtgcagtgggtagcaccagacccagcttgcatggttattgatttttcagagacactttttgagcttattctctggcagaaaggggaactgcttcctcccctatctcrtgtctgcatactagcttgtctttacaagaagcagaagtagtggaaatgtttattcttgaaaataagctttttgcttcacatgatctagaatttttaaaattagaaaaatgtgcttactgcgtgcccttctgaaactaggaaaatatgccttgtgtttaccaattgtgtggttaggagatgggccaaaggcatcaggcttttgaaagtagttgcatttagcataatttccattgccccctgccaatttcatatctgtcacatctaatcagtttaaaataaggggcatcctaagcatggagatggtccttggatggtccttggagtttctgtattktcagtattctttttyttgagcatacaagacatttattgaaaaattcttgggatcaatacttgtgtaaggaaaggaaagggaacaaagcatgattgggcagaggcagaagatgacatcaacaaaggccctccgttgtcagtattctttttttttttttttttttgagttggagtctcgctctgtcacccaggctggagtgcagtggcgtgatctcagctcactacaacctctgcctcccaggttcaagtgattctctgcttcagcctcctgagtagctgggattacaggcatgcaccaccacacctggctaattgttgtatttttagtagagacggggtttcaccatgttggttggccagactggtcttgaactcctgacctcaggtgatccgtctgcctyggcctcccaaagtgttggaattacagacatgacccactgcacccggcctgttgtcagtattcttaaacatagacactaactgtaggctgacagcctagcagcaaggaccagttaaagaaaygagtagaactgaagtgtgcttgagtatctctggcagtcagcaaaaacttaatgggratcatggtaggccaaatgttctgcagtatttcaaaagctgcatgggttttgagaggcttttggtccatcactcaccttaggttgttctacaagcacatcagcctgccccaatttaaacagggcagttagtaatggtgtaataaagagtctgcattgttcattccttcaacaaatactggctataatgtttcagcactgtggatgcaaagtgagcaggataaacaggctcttctttcaaagcttgtggtccactggaccacgtatgaagtagaatagtttaggyccagaaaggcaattaagtaaaatatgaccaagaagaggctctctagtgggtttggtataaagaaaagataagaatgatttagaattggcctatcaatgagataagaggcctggctttctggcactctgctctagggcaagtaaaatggagaattccaaattctgaaattgttagaacatagttctgtgtcttagttaaatatctacacttacagataaatagcataaatgctttctccccatatttcagcccagtcctacttaaagacaacataaattgcaaaatagtgaggatgttgttcatctaataaaagtggttccaggaattcagactctggattcctgtttgccaaatcatgtgtcccactcttaagaaaacgagttggactctggatttttctttgcaagagggacaagagtgtgggagatactgagttaatgcaacttgcaggttttaagtgtcctgtcattgtgccttgtgctttgatacattctgagkttcagtaaagagacctgatgcattggactgttgcaatggaacctgttttaagatcttcaaagctgtattgatatgaagttctccaaaagacttcaaggacccagcttccaatcttcataatcctcttgtgcttgtctctctttgcatgaaatgcttccaggtatttttgcaaggctaccagttacatttgacaagtctgtgcaatggatcaaaatcagaagagatgattcaacttggtgaccaagaagtttctgagctttgtggcctaccaanggagaaactggctgcagcagagcgagtacttcgttccaacatggacatcctgaagccaatcctggtgagyagacttgctcactggagaaacttcaagcactaatgctttcggaatgtgaggcttttccttggacagcatgactttgttttgtagaaaagtacggctggctgggagtttgtgatataatttagttcagtggtattctaagtgttcttagtgttctttcagacttttgggccatctcccaaagggtgaatgggaagaataagctgggtgtggctgagtttaagccaaaagttttttgtgcttgtttcaatcagagaagacctgctttttcatgtttttactattataatactaagcaagagctcatttgaaaacagagttcttcatatttaaaaaaaaaaagtcttgaaaccattgatgggaagatggatatctatttatgtttaaaaacccatcataaagatgacattgtrggctgtcacagttggaaggccctggaattagatgagaccacactatttagcttayttagtaataacattgcaaagaaaaattccgacraagttttttcagcctaggaatcaatagttcagagaagcactctatgagaatacccattcattcttaaccaaaaaatactggtgagcctgagcagtttggtcatcagagtgttttatatagttccagaacaaatatgtctctaggtgttctgagagctctggtgaaattcctctcsctaccccaaacatcatcatttaatatccaggattctggttttctactcaccagatagattctcttaaaaccagggaaagattcctggaggaaggatgtatctggaaagagatgttccttattayaataaaaygaaattgtaatactcttggattttgtgcagcacgaattctttatagagagttggtcctcccagagaattaagaatactcagtttctggaccctgttcccagatcataccctagaatgtgaccttagaaacacacttcaggattcatacctttgattgaccatcaaaaagtttttgtatcggccwggtgtggtggctcacgcctgtaatcccaccactttcggatgccacggcgggcagatcacgtgaggtcagcagtttgagaccagcctggccaacatggtgaaaccctgtctctacaaaaatacamaaaatagccgggcgtgatggtgggcacctgtaattccagctactcgggaggctgaggcaggaggatcgcttgagcctaggaggtggaggctgcagtgagctgagatctgtctcactctgttgcccaggctggagtgcagwggcgcgatctcgactcactgsaacctccgcctcycaggcttaagtgattctcatgcctcagcctccgagtacctgggactacaggcacctgccaccacgcccagctattttttgtatttttagtagacatagggtttcactatgttgcccagctggtctcgaactcctgagctcaagtgatctgcccacctcgkcctcccaaagtgttgggattaaaggcatgagtcaccgtgcctggtcccatgttataattttaaagtaaggtatatttctctacrgggatctttgcaaccctaagtaactggcctaaaaagttagagaagctgacttgtgcagacatttgcagcctrttggtcttttttgtgctgtgaatcatagagggtgaaaggttattatgaatggtacaaaactttgttacaaaaccattttcttggactgttttgggctgcttcactgcatgacaaatgctcaccctttcagytggaatgattgaaattttggaaaagatgggtgtttttagaagacattgtaatttgttccggtgctgtgcccattcattccatttcacttctgtttactcattaaacacctattgtgtacacaacccggtaaaatccctccactcacacaatgcctgaattatactcatagtagaatgactgtttagccctcatcatctgataattaacagctcaggtttcaacctgacagtatctctctgggaggattagcagcgtgacagagtgcagggaaatgcaccttcagaaccgtcagctacactgtgtcccatcctgctgtgttgtggttgtgccttgtggatgcgttggtttatgaccaggtattgattaaggtggctactaccrggtgctttctgcatatctcgggtttgtggagcactcaggttctgcttctgcccctctgctgttaccaagagacctctcttcaaaatggggctcttgagttagagtagaatgagtgatcaggattgttttgtgtaaagatgatttctgaggaaggctttaggatgaaatgacttccaaacattttgaaatgtgactcttacttattgaattaagcagggccttaattggaatgctgggactgatacttgatttgcattaagcagcctttttctattgctgcttggttgaaatttcaacatttgtgatggtagatggatgtgacatgtgatgacattgcacatgggcagttaactgtgccaagaagtgcagcagtagcagcaaccggagatgcaaagcccaacatgatggggagagaaactcttctttcaatatgtgcttctgtaccaaaagtggaatttcacgagagacatattttgaaacatttctccttttgtgtgtgcgtgagtgtttccctgtttccagccaagggtattgtgagtttctcctgggcctccttcagaatctgggtgctctggaaagcagtgttttggcaacatggggaaagtatggcagtgtgggagggtcagctgggtctgggtttgaatattgcatttgaatattttaccagcattgatgtcggataaattatttagtccctgtaagcctcagttttctcttcttctacatacacataatatatttgactctttgttgtgattattggttacacatatgaagagcctggtgtggggcctggcacacaataggtgctcaataaatagaagttgataatttaattgacatgagtagtagaaattatgtccttgaaaacaattgcgtcaagatagaagttttcagccaggcacagtggctcacatctgttgtaatcccagcatattgtgggggccgaggcggatgaatcacttgaggccaggagttcaagaccagcctggccaacgtggtgaaatcccctctctactaaaaatacacatatttgccaggcaggcgtggtggcgcacacctgtaatcccagctactgaagaggctgaggcacaagaatcgcttgaacccaggaggtggargttgcagtgagctgagatcactccactgcattccagccagcgtgacagagtgagactctgtctcagaaaaagaaaaaaaagatagaagttttcttctgtagatcagtgttagaactcataccaagcraagtggtcctggtgagtatttcagtgaaaaactgcattcttgctcagatattgtcaagacttttcacccaaagattcttatttatgtctcagtccrtaccttgtgtgaaaattaatactggatgtcagaacgctgttgtgtttttaaagttccctggggttaagagcagtttccattaggtgttctctgctttttacttaaaaatcttactcatgcattgagcaatatttattcagttcttattatgtgtcaggtattttctaggagctggactcaactcaaaagatatccttttgatgagaacaaaggtgggtggatatatgaaatattatctgtgggataaatgcacttagtcatgagggagacttgttatggagtgcgctcattgtatttgtactgttgagttaacaacttctaggaggagctcagggccacctggcaggggcttcttttgtcttgctgctcagcaaggtgtattttgctgtagagtgtgctgggcaggtgaacttttcttaactttctcttgggtccttcctaaagcagcatgtacctttcccagagcgaggagagggccaccttcctgtctcacagaaacctccaatctgttttggactgcaggaaggagccatagtagtggaccagcaaattttggcccgagagattgatttgcttccgattgtactttttttttttattgctactataacaagtcaccaaatacttagcagtttataaccacatacatttattatttcataaggccagaagccaggatacagtagagctcacctaggtctacttcttagaggctcacagggctgatatcaaggtgtttgtggggctgtgtttttttgggggggctctgaagatgaatctgctttggagctcatccaggatatcagatgaattcagtcccgtgcagttgtaggactgaagtccatttccttgctggctgtcagcaggggctggtttttgctcctaaaggttgccatcattccttcttatgcttttcatgtgactcctctcccacaagtgggttgagtatctctcacactttaaacctctgacgcctcctgtcacatctgtctccagtcagagaaagttctttacttttaagggctcaggtgtttagtttgggcccattcacataatccaggataatctccttattttgaggttcataactttaattacatctacacagtgcatttgctatgaaatgtgcatattcacagactccaggaatagggtgtggacatctttgcaggggatattcagtctgctgtagctttcttgattggaaggaatagtttatcatatatttgaagtgttccctcagtgcctttggyttttgttgacccctctgcagctctctgctttttcttgcccatatttggaaagtgactctaaagcataataagcatcacctattagggtttttaatgtacaaaccaaacagaggtgactttgggaggagaacatctctgaactaggtatgagacattcatcgaaaaaaatccatcaagtgtttattgtatgtctgctttataccagcactgttctaggcactgaagttcgacyaccaacaaggcarttgtgatgcacttggagctttcattctgatgggcattgagatccaggctgaaggctgagtctgggaatttgaggaattctttgtaggtcctgggtctacagagtgagagctgtcctcgttccagtttcactgatgacctctcgaccagctccctcacagcagtctttgccaacacagacactgtgggctgtagtgggaggaatgtggggttgaatgagctaggtttgggctctgtccttgactcaccattgcctcagtgatgtgaaaatggtgtctgatccttaaggttggaagtccaggcatgcagatttatctccatctcaataacgtggggaaaaaaaagaagtggtttttgtggaaccagtggttccactgtccacgtgtcttccagtgtgcctagcacattcccaccaagtggatcttggttcatgagggaaagaagggaaagtgagggtgccccgaggctcccagaagacaagtaatgtcacagctgagctgtgtacagatcgaagaagcagatggataaggagtgaacaaagtcatccttgtcttgaggggtctttatttagcttcttcttgactcttagacaaggacccagaatacagatggggcttgttgttaccttcagcctcatggctttttagggctagatacttcagcttgttacatgcagtccttaaagcgtctgtgtgggtttttgcaggagagaacacttgctcgtgttctcctgtctggaacccggacattgttggaaagtatcagattttgtttggctttgtgtgatttgactgcccacctgtttacttgctttctcccagcaagcagccgcaatccccatgggttggtaatgggtggaatgacacactgtgtagatttactcttcagactctatgttcacctcattcttatgggaaaagaagagcactagctggtagatatagcagtgtgttaatatgactgctcaactccatttacacagacattttcaccttagttatactatttcttcattaaatattgttgccagatctaagatacaggtttaattttttcctctgaattatgtggtagtagatgtatttaactatgtttagaaacagcaaaaaatgaagcgtttgaatgcgttaaacacatctaatttgaaagttaatatttaggttgttgatttattttttaaaagattagaatattccttagaaatgtagtcttataatttcgtatttcaataaaaaatattaaaatgtttcccagaggaaatctttactgtcatagaaatcaccagaaagagatagcaattactcctgggtggtgatagtctttgatttgtggtttacttgttttcagtttgaactaaaacatactaatcccagcctgagttggattttgcatatggtcaaagtgaagtagagatttttgtctactttatgaagatatttaaaggacatttgaaatgtttcaatgaacacattgtaacatgcattcccaggaggaaaacaaaattgtgtattgtgttgaaaatactattccaatatatgtatacccacgtctcattttgtcatagaattcctgaaaaatttagatgtagatgagatttttataagttgaaaatattttcagttgcattttaattgcacagatgtgttttctacttctatttggctgtgactcctaatgcattgtaatattatcttccagtgttcatttcgtgtagtgataatggattaacaaatgcattcattcatttagtaaacatttactgagccctaatcagtgccatgctctggcccagggaggtagtcatgtgcaaggtccagccctctctgtttcattcctggttggggaatgggtgggacagaccaggaaaggagcagctgccgtatagagcaggagacgctctgctgggtgtgatacagtccctgatggggcctcctactgcagtctttccagtcaggaargaaacatcctctaagtggggacctaaagaatggatgtcagccaggtaaagaacagggagtagaatgttccaggtagaggacatagtatatgcattggtccagagaggagagggaagagaaggtggcatttaggggaactgtacctgattgagatagttcagcatggagcagatatagctgtggggagtttgatgggagaaggaacgatgagacgtgatgcctgcagaggtgggcaaaggtcggctgaggcaggtctttcttcacgagccatgtgaggatatagggccttatcctcagagtaaagggagccattaaaggctccacaggctgagtgacttgatgaggtgaatacgaaacagagcatttctgtgaatgtgaatggcctttggagcagaactaagttcatgaggatggaaagaatataatgaagccatctcttagacccagaaagaatggggcacaacagcctttatctttctggggccaatgtcacagaatgccatgcttttaggaaacatggtatgttgtgattaacacattttgcagaagtgggtgggagcttttgaataataacagtaagcatttgtgcattcttcctgtaatgacattacagttatgatctgaaaatattgagtcatacatgaattcctgttatcttaactcagaaaatatagtccctcactaaaggttttattttccttctttttcccatttcctttacttcgtataagaaagtcacttgtctcctgggtgcaatggagacctatgtgagttcatagccaagagaatgtttttggttagaaaaataatagtaggaattccaagctgtgaattttttactgaagctctttggaaataggatttggcaagttttgtctgccttcgtcaagtaagcatgagcaggagagcacagttaatagcaggtgcagacacatgattctcagaccgtattttgtgttctagtttcaaggcatgaattctttcctggggttaattttattcaaggaagttatctgtctgttagatctgatatgtgctcaggccaacatagattctttacccttcctttcttcctgctcacctgtccttcctcttttatcttttcattgaattaaaaagaaaattatgaaatagtttcaacatgaaaaaaggtacagagaataacataaagaacactcctggctgggtgtggtggctcacgcctgcaatcccagcactttgggagtctgaggcagccagatcactggaggtcaggagttggagaccagcttggccaacatggtgaaacactgcctctactgaaaatacaagaattagccaggcatggtggcgtgcacttgtaatcccagctacgtgagagactgaggcaggagaattgcttgaacccaggagggggaggttgcagtgagctgagatcacaccactgcactctagcctgggtgacagagtgagactccgtcttcaaacaaacaaacaaacaaaaagaacactcctgtaccatcatccatcattttgccgtgctgactccaggttctatttaagaaataaaacattacaggtacagctgatgccacctctgtttccctagctcattcttcagagataactcttgtcttgcagttggatgttttaatcctctatatcatgtatacttacattctatgtataacaatatttggtactggcctaaatgtgttcacattgtataagtgtgcatattggcctgccacttcatttggaattatgttcttgagatttatcaatgttgatacatgtggaatctggttaatttttgccatagtattctatttttatactaaacttttaaaaatccatgcttctagtctttggcttattttttcaggttatggtatgttttggatgcacagaaaagtaaaattaagtcatgagcaaaatatctggataatccaagctttaaacttgatgtagaatttgaatcatgtgtgttttgttaaccctgtgatgtcaatccatgcctgattgtgtaactccaaccaatattcctttgaaaatggaaatttgtttatattgactacagattgccaatattattagtaaatgctgagcacttaatctcgaataaagaactagtttaaaaatgattctaacaatggcattgactgttctaccttattactcatgggtgggttcagccaatgtttctgttggagaccaaaaccaaaaacagtcaaattaaacaagcagtcaaacccaacatacagactactgataagaaggtcatatcataagatatggcattgaatttgtgtctgctaatgtaaaaatctgatgcccacagcaaacttaataaggacctatgtttacatccatgctcaattacattcctgggttaaacagtcatgctttaggccctgctgtgtgcctggagttttgctgaagtgtggggcttttaagagaaggagaataagcttgctccagagttaagaaatttaaactaaaagtcctaaagatgttggaaaaactattgcccttgaagatgtaaattcattaagttggagaagaccttttatacaaacaacagacccattcactgatttgtacccttcaggagacagatgaccggtaatggtgacaatgggtgaatgttgggtttggggtttttagaaacatctgcacttggtgactactgtatctaattggtgtgacaaacctggcaccccatgtgtttggcaccatcttgggtcctactcagggccaggtgaaccgagtggcctcttcactgcttcagagtctgaagcagattgtagtatgcggaccagacacagaatataccaccaagcacgttggcgcaaagcatactgggaagggaggctttgtgaacatggtgctggttctcaaacctcagtgctcaaaagagtctcctgaggattcctggatcacactcttaaacttctcattcagtaggtgttagctggttgagaatctgcatttttttttttttttctgagaccgagtctcactctgatgcccaggctggagtgtattggcgccatcttggctcactgcaacctctgcctcccaggttcaagcaattttcctgcctcagcctctctagtagctgggattacaagcacatgccaccatgcctggctaatttttgtacttttagtagagagggggtttcgccgtgttggccaggctcgtcttgaactcctgacctcaggtgatccacccactttggcttcccaaagtgttgagattacaggtgtgagccaccatgcccagcctgaatctgcatatttaacaagcaccacaggtgattctgatacagtagctccccaaacctcacagtgttagtgaatcccagtcatttacaattctgccatgattttggtcatattcaagtgcagctggtagcatttttagttaatatattttttaaattaagtcacttcttttggataattaaatttaattacaagggaagctataccactgctgtaaaaacatcacctgctttaaagagaaggtacataatgaatatacattaagataaagatgtatatgtgtgtgtgtgtgcacatataagtatacacatacctaccatagggattgagttttccttcaggtttttcaactgaaatgtcaactttgaggccagttaatatgtgtaagatatatgtgtgtatgtatgtctatacatatagacatatacgtaaaaacatacatggatgcatatagtatatctatacacaacctattatgcatatcatgtatatttcatccacttagtattatcttttattttgccgtttggcaaatgctcagtaaaagaaaagggttagaaggggagaaaggcattttatcccaagccttcaggaatcaggatgaggatgtcttcaccttgtggtggggagtaattatacaattagagacagcacattggagtgtggctgatatgctgtgtgatgatagctctagctctctgcctagcagaggaaggacatttcaatagaagaaaaagtttaagaccttgccgagaaacagagaaaggatgtttgtctttttaagaagttgaaaaccctgtttgcagacaaaagccctccagttttggcagtaaactttcatgcaagggaagaaaaaggcaggggatgacattgttgacaattgtgaggaattaccatgtgccaggcactgtgcgaggggctttgtacatatcctctagttttagtgcttataaaaactctgtgatatgtgcacagcattttaaactttgctgcatagtcgagaaaatggaaggatggggaatttgagtcatttgcccagggttctatagctaccccaggttcccatgactggagaattggggcacagggtggcgggggagagtgagtgacaagaatcctaacaatcttatttccattgagtccttataaaagaagtggattaactaccacgtttttaagtttttcttaaatttaggttatgtggatctggcgtttcttgttttgtcctgggtttgttttgtttttgctatgctgtcttgaacatctgtcatcttgtaggcctaacggtaaacacaaaaacactttacctcctatagctttcaattaagatctctcagtttgtgtttgtaatagttttccaggcaagttctccctaggttcggcttctagtgtgttaacctttagttataaagtgaacccaaagagagaaagtagaaacaaaacacctcacctgtttttgctcatgaattactctctatggaaggaacaatcatgaacacctctgcgtatcacagaggcctatctgagtctgacgtttaagggagaccgcgtaggtccctttgaggactgtgaatgtgggagtcctgggactctggtgaagaacccgttccagaagagatgaatgagctggacaagttctttcatagaacctttaggcaggttttcttagaaatgcacattgaggattatgcttggatattgtgatgatcagaatgatactcaatcccttctgcatttggaattctctttgaaagaaaacatcccaggcagctatttctcagagatagtgagtcccagccacttctagacattttcttgtgtagtctacattataatttcacagcagtctctgatatgacaaatgtcaaaatagcccaaccttctctaaacttcagagatgtctgatatgatattgaataaaacaatgctcatagaaacatcaagaaaggtggattttccctggatacttttttcctgcttgacaaataacagtgaagaaactgatctcacgtctttttctctttggaagcctgaacactcagaacccaacttgaggctcctcagctatagcaattctgacttcacagtctgtaaattattgttcttttttttctttagcttatgctttctgccctaatttatcttttccctgttctaatgaattattgtcctatatctgctgtgcagttaggtgacatataacagcaattaaatatatgaattggtacatataaagatttgactaaaactcgatgtaaaaataagtgttctacattcaatttccagtgttagaaacagtgctgacttgaacagagtgacagaattccatctttccctatttttgacagctttaaactttatattttcttcctttcttgtgagccgtcattaacttgtttctcaaagccattcccgtattacccatcttgcagacgcagacagatttgggaatttgcggtcagagttgtattggacacatccccccagcccacatgagatccttttaatctattgcatattaactagttttaagtacaatattcctacttcatttaaaaccattaatcaaagaatgagtttgaaaatgaacaaaatgcaaacttacagttagaaataattgtagtgtctttagttttggttaggagtcggtttcttgtttgttaaactcaagattgtgaacagttttaattcacttgtttatttccaatagagatttcaggtttacatttgaattcagaaacaaagttttctttctcattacagagaacactaaactctacatctcccttcccgagcaaggagctgrctgaagccacaaaaacattgctgcatagtcttgggactctggcccaggaggtaagttgtgtctttccagtaccaggaagcggatcatccactgtatcagtattttcattcctgagtctggcaagaggtccttttgagttgaatatcacatgggatgtaatatcaattttcaaagtataagtgatgtaaacaataatgttttgatttccttattttagaaatgaagaaacctaaaactcatagatgtctcagagctaattggttagtggctaacagctggatatctagtttagaaccttctccattttttctttttgcccctaggtaatcatacatttgtaaagaggagaattatctctgccactgcccatgcactgcttttgtctgaccagcaatttctccatattgcttcttcagtagcaaggccaatcattttaccaacacacatgcttgctaactaacaggaataacgtggtacccctaattcagccctttcccttgaaagcatctggcttctgaggttcaactatgggaatatggtctcttaatgaacattaagttgagtttgccttttaggtccacatgttgacaaatgtrtcagagtaatctctgtcctaggatcagagggcctgtaggcacttgcaaaagcagttagctctgactcccagccagtgcacactccacctttctgactcccagccttgtctcaaattaggcttggaagcgaggaactgtctggtgtcccccagcataggaagctgagccagggggcagtgctcacaaacaatacagactttaacgtgtaggatattggaaaataataatttgtggggaaattgtctcagacttggtccacccttatttttagctgcttctctaatccgtttttctttttttggtgcttgtatctaacctacccattttttggtgcttgcatcattttttcaaatatcaaaaacgaactttatgttttctaacaatgaaagtattgcatgttcattgtggaaaatgctgaagacttggaaaatacaaaaatgctgagatcaaacactattgatacgttagtgtatttcttcctgtcctgttctacttwctttctttgaattctgctcacgtgtttctgactgatgaggtctgacttttgggttccttttccagaggagaagccttctttcagcttgccatttgttaccctggttatgaaggctggtaaccttttttactaggtagagaagctggaccaactggggttcttccagggggagaatgagaaagagaaactgttttgcaagtccgtagctatttctctagggccctgttagctgacattgacatgccttgcattgctctgcagatcccctcgcagccctctgtcccttgttcatttctggccttagagaaagcaaagcagggtctgtaacaggggaggctgcctctaaactcagggtttggttacagctgttttcacttacatcactggccctggttttttttttttttctggcattaaaaaaaaaaattggaagcaggtgatgttcccattgctgatgtggtggaaactctccaagtgaacaatatacgtttttcttggcagctgtttcttgtgccctgcttgctcctggtccaggacaagcaaggaccatctgcctctttcaatagaacacctccagatccctttgatcaaaagttactcattgtctgacttgctatttctgtgagataaatgggagaagatcaataaatgcacttgtttgtccagtcagcgtgtggaaagttgataattttgaccaaagcacaacccttgaaaggaaaagaaaaagggagtgaatgtcttctgagaagctgcctaggttcagacagtgtcacccatttccctgtatgctccacatgacaaacctgagtgggtctcatcatgtccattttgcagatggcaccaaggctcagaaaggttaggcaacttttccagtcacccaatgagttaattgacaaaactgggattcaaacccagaactgttggattccaaagcctgtgttgttgcctgcttcgtgaaaaactccagtagcgactggaatagaaaggagaaccttccaagaaagaaaatacgcactagcagaacctggaaattgggaggaaatgaggacttgaggaataagatgaatgaaagctgacctgagtttcacatctgggtgatgggaagggaggacagggaggcagcatctcagatgtccacccagcaccgaccagctgcctggcattgctaggtgttgaggactcagcagtgaacacgctaacttctctgctttcttggggcacgtatagggtgagagacagaaacaaacaggtcagtgtacaatgccacaggagggatatatgcagtgaagaaaaagcagggtaaggggcatagagcatgagaaggtgctttttttaaagggggtgattaggaaagctctctctaaggtgacagttggacctgaaggagatgatagcatgtctgtggtgagggaaggaaactccgaacaggaagaatggcagatacaaagacattgatgctagagcatgcctaaggaatgtgtttaaggaccagggaaagtgagcaagtggtggggggaggagaggagctcagagcaggaggaggtgagtgccatacaggcctggcaagactttggattcctgctgggtgagatgagaatccagcggagggcttgagggaggggacatgatgtgatctagagtttagactgtttacactctggttgttgggttgagaagagactgggatgggggaaagggaggacaaaggacattgtgctggattgagaaagcagtaagtcagtttcattcattcactcarccgatgatgttcaaataccaccatcatccgtgggctaaaggatgaagagccatccctccctgagagtcaggaagcacttcccagataaagtttggagtgtgagctgaggtgtaggagaaagagtaagagtttacccctgaaacgggtgctgggaagagtcaatagtttggaataactcaataatttatggtgcttctttagaaagatttgctggctttatgtgggaagaaatttktttttttgattggggagtggtgggttggtggtgaggctgcctgtggaaagagaagtgagtgttttgactcactgttatttaaaaatctctagggctgttccaataagcaacaaaaggcaaaatggcctggttctctgtcmcctttctgtctgtatgcctcgtacaggttatgaaaagaaaaagttgggaaaagctgtccacctcacctaattgtrttcttgtggagtgtgctagatgccccctctctggagaaaaaaaatccttgtggcctctgacccacctctggagagcctagttcccttctggaggcagaaggcaaagcttaggwcctagagartgctggaccacgccactcacaggaaccagcaggctgtgaggttgaaagctaggcatatggagctttccaggctgggtgcagggcctcgtggcccttcccctcccctctgtgctctatagctcagtcttcccaggcggtgtgaacacgcagtgacatttccaggaatacagggatttattaatgatttmttgtgaaatgtttggaaatacaaagtactctataaatatttcataatagcattggggctgagaactccacaaagtgccggaatacatttgcatgtaagacagaacgctgcctgggtcattgatgcctgttgagtggcagtcacagacactgcctrgggtttctgactcacgctgttgggactgttctatgcagggcaccctcttgtgtggcataggatttgtgcctcaccacasactgttgtagctttgctgtcttgatgatgagtagagggcagtgtccaggccatggtataagcatctactgccccccagggttaccaaaaccaagccaagttgtgtctcagcgagctccgtgaagcatggagaagttgagtactcagagacatgacgtgacttttcaaaggctgtaagctgacgagggacatagctagggttcagacttgagtttttctttttctttttctttttcttttttttttaagactgagtcttgcttttgtcgcccaggctggattgcagtggtgcttggctcactgcaacctctgcctcccgggttcaagcaattctcctgcctcagcctccccagtagctgggattacaggcacctgccaccatgcctggccaacatttttgtatttttttagtagagatggggtttcaccatgttggccaggctggtcttgaactcctgacctcaggtgatccacccgcctcgacctcccaaagtactgggattacaggtgtgagccactgcaccsggcccagactcgagtttttcatcttaatgctttttcattgcctgacactttactgagaccaagatagggaacttcacatacagtaccttttctcccaaggcggaagagggctgttcaatttctacactagagttcggggagttttagaaatgagycagttrtcgaggatgagagcagttcctgataggctcaaccacaatgagatgtagctgttcagagaaagcattcttttatctataaactggaagataatcccggtgaaacraagcccagccccaggggcttcactaactccaggctgtgcttctcaaactttagtgagcataggaatcacctgggcatcttgtgaagctgtagatttgaattctgcaggtcggcagaggggtctcagaatccgcatttccaacaatgtctccagtaatgctgatgctgctcgtccctggaccacagattgggtagccaggttctggcaagctcatcccaaggctttgagatgacatcagacaaaatatgttctgggacatggcttttgagaggtcaagaaaataagatgtttctttctcttctcatccccaacccttgcactgcccttttctcccttcccctaccctcctttctgtccccatccctgacgccagctgttcagcatgagaagctggagtgacatgcgacaggaggtgatgtttctgaccaatgtgaacagctccagctcctccacccaaatctaccaggctgtgtctcgtattgtctgcgggcatccygagggagggggrctgaagatcaagtctctcaactggtatgaggacaacaactacaaagccctctttggaggcaatggcactgaggaagatgctgaaaccttctatgacaactctacaagtgagtgtccatgcagaccccagccctgtccccaaccccatccctcccttagttctggccttggcctgtgtcatctcctccctctgtagcagcgttagatgtctacatgcccatttgcccaccagactgagctcttcctagaggagagaggcttctcttgaatagctacctgtccccagttctctgaatgcagcctggcacatctcaggtgcacagtagtgtttatcaatggaatgaatgattgacagccaaccttctggttttctgggggatgtggaagggtggcttccagggtgatcaagaatgagataatggcagaaggacaaatcctgcaagatctcacttatatatggaatatatgtaaggtagaaagtgtcagtttcacatgatgaataagttcctgggatcttgatgtacatcgtgatgactatagttagtaacactgtatagtatacttgaaatttgctaagagagtagatccgaagtgttcacactacacaaaaaaggcaactatgaggtgatggatttattaacagcttgattgtggtgatccttttacaaagtatacatatattaaaacatcacattgtataccttaaatatatacaatttttgtcagttgtaactcaaaaaagctagaaaagcatttttaaaaaggatgatgtactggtcttaatattaccattgagataagctttataataacataaaaagaaataacagtaatgataatagcaacaacaacaacaacaaaraactaacatttaagtagaatttcttgtgcactgtgcattctgtttaagttatctcattttaccctcatgataaccctgcagggaagattctttaaccccacatttcataggctcagagaggttaagtgccttggttagagccacatcagagttaatccacaagagccaggattcaagcccaaatctgcctggatctgtgctctctaagataactgttagtggtggcgtgtgtgttctcacactcagacatttgatctgcyctttgtttcccattcttagctgcaaggcrgtgttaaagaaccctgtgtctccatatccactccccacacttaagcacttttgtgggcccgtgtgccgtatgcctcgtggcagcagggatccaatgtcacagttttaggcagtggcatccttttccttgaaaacttgatgcaggggaacctttctccatttccaaccacaggtgtgtctttcagacactgagtgaggcaggttttgtactttattgtaacacaagaaccttttctyctctggagtaaagcactccagacattcgcaagttgctttacaagccttaaaaggatggtattgtaggcaactttaattaaatcccatctcctcctctcccccagcttgcaagttgacccaaggaagccttcatttccatgacagacttaattgtgagggcatcctcattaaaaaaaaaaaaattctattatctttccagcatatagaagatacttggtatctaaaaatccctgaaaaacttagaatgaatttttaaaaatcagggatcctgctggataaccaaacccatttgtctgttacaacttttgtatttgggtttttgttaagtgtacatatactagtttgtgttaattaaagagaatttttttttttttttttgagagggagtctcgctccgttgcccaggctggagtgcagtggcgccatctcggctcactgcaagctccgcctcccgggttcacgccattctcctgcctcagcctcctgagtagctggaactgcaggtgcccgccaccatgcccagctaatttttttttttttttgtattttgagtagagacggggtttcactgtgttagccaggatggtctcgatctcctgacctcgtgatccgcctgtctcggcctcccaaagtgctgggattacaggcgtgaaccactgcgccctgttgagaatttttttttttttttttgggagacggagtttcgctcttgttgcccgggctagagtgcagtgacacaatctcggctcactgcaacctctgcctcctgggttcaagcgattctcctgcctcagcctcatgcgtcaccacgcccagctaattttgtatttttagtagagacagggtttctccatgttggtcaggctggtctcsaactcccaacctcaggtggttcgcccgccttggcctcccaaagtgctgggattgcaggcatgagccactgcgcccagccccaaattttggtttttgcttgaaaactgaggtctgaattcagccttctggttgcccctcaagagtcagtttaaatgttggtcatgttagttgtcagtgaaaacaatggtgaggctggcatgagagtgtgaayctggatgggagggcttgtgcttcaygaaaacatttttccagatcagctcagtcgtgagttatccgtcattgacgttataataagctctgattatttatcaagcatcattctttatagatatctcagtttaatctgagataatcttctccacatctctccacatagatgttatgaattttacttttacagaggagccaactgaggctcagataagttacttattatatgactagtagtggtagagctggggtttcarctaagaactctctggctccaaagcccttgtaagtttctatcagtatatgaccatgcatatgagcatttgtctctcctcttcttcatagctccttactgcaatgatttgatgaagaatttggagtctagtcctctttcccgcattatctggaaagctctgaagccgctgctcgttgggaagatcctgtatacacctgacactccagccacaaggcaggtcatggctgaggtaagctgcccccagcccaagactccctccccagaatctccccagaactgggggcaaaaaactcaaggtagcttcagaggtgtgcgctaagtatactcacggctcttctggaattcccagagtgaaaacctcaagtctgatgcagaccagagctgggccagctccccagtcgtgggtatagaatcatagttacaagcaggcatttcttggggatggggaggactggcrcagggctgctgtgatggggtatcttttcagggaggagccaaagcgctcattgtctgtgcttctcctcctttttctgcggtccctggctcccyacctgactccaggygaacaagaccttccaggaactggctgtgttccatgatctggaaggcatgtgggaggaactcagccccaagatctggaccttcatggagaacagccaagaaatggaccttgtccgggtgagtgtccctcccattattaccatgtgcctgcttgatactggagaggtgagtttctggtcactttcccaggtgtgagtgaggtgagaattctttcagtttatctagctgggggaatgtagtgagcatagctaaagtcacagggcaccacctctccagaagtacaggccatggtgcagagataacgctgtgcatatcagcatccatgccactcacggtcaaatagcagttttctgcaaaactyagtgagggctggtgtttggaagtggagttgagtaattgcagtaccctattttcctttttggctgcagcctctcagccagccacagcatctccctgtgtcttggtaggttttggaaagaagtgtgggagcaaamgcatgatgttacatgtagactggcctgagatactcattctcagggcactgtgtgaatgatgagctgctgttactgtgtggaggggaaatgcacttagtgcttcagagccacttgaaagggataagtgctctagagacaattggrttcaaatgtggagcaggctgagcaagaacagaatgtctcctttgcctgagcctgagtgctgttaatcacatcttcctgccttgggctgagttagagaatcattagactatttcctgtttccatggtgagggaggcctcttccttttgtctctgctccccttaagaagcaggtgaggattttgccaggtttcttgttttgaaccttattgactttaagggcggctgggttttagagactgtacctacctagggggaacacttccgaagtttaggactattccctgatccgctgggaggcaggttactgaggaagtccctttaaaaacaaaggagtttatactgagaaaagcataaacagtgatttgtatggattcacactgactaatatagctcatgccattaaagtggggtctcttctctaaaggagggttatatgatctagccccgtagacctaagtgtggtttcagacctgttcttcctggtcctctccttggaatccatatttctactagttggactttttctgtttgtctggctctcagaggattataggaggccctgtgaagtgactcagtgaattttgatttgtgggcaagtagatggttccctagtctgaaattgactttgccttaggtgcttcaattcttcataagctcccagttcttaaaggacaagatccttgtaaacatggcaatggcattcattaggaatctagctgggaaaatccagtgtgtatgcttggaaatgagggatctggggctggagagaaaggcatgggcatgccttggagggacttgtgtgtcaagctgaggacctttactttaagctctaggggaccaggcaaggggagatgtagatacgttactctgatggggtggatgaattgaagaaggatgaggcaagaatgaaggcagagaccagggaggaggctctccaagtggccaaggcataaagcaagaaatgaggcctggtgactgcttagtggcagagcagtgaaagagagggaggcatcaaagygagtctcgatttctagctgggtgggtggtagcgatgtccagtaggccagtggctactgaggtctgcagtggaggagggtggttgggctggagacagatgatgagggagtcatcagcctgtgggtggaagaaaagggaacctcttccaactgttttctttgcttcttccctctctttctctttttttttttttttggacagagtcttgctctgtcaccyaggctgaaatgcagtggcatgatcttggctcaccacagcctccgcctcctgggttcaagcaattctcctgtctcagcctccagagtagctgggattacaggcacatatcactgtgcccggctaatttttgtattttcagtggagatgggatttcaccatgttggtcgggctggaatgaactcctgacctcaagtgatccacctgcctcagcctcccaaagtgttgggattacaggcatgagccaccgcgcccggcctttcttccctctcttaaagagtgtttatttaattccacaaacatgagcttgtcaccccctgtagcctggcatctcctacacgaggtgatggctgaggcttctgcttctgctggggtagctctgatctttctgctttctctggcactgtctacccatgttgcctcaccccacaggtcccagggcacctctctcgggcaagtcttggaaccctctgacactgatttgctctcttttctgagctgcttttagccacccatcctcrggacctgttttctctctgcctccacccctgcgggcagtcttaggtctcctgcccctcacgagcaccccagagaggccacgtgctcagtgatctcagtgggcgcatctttctagtcttgctattctttttggycatgttgttcagaaaccatactgggcagggccgacttcaccctaaaggctgcgtctcttcactctgcttttgtttgttccaaataaagtggcttcagaattgctaaccctrgcctctgtgaacttgtgaggtacaattttgtgtctgttatgttaacaaaaatacatacataccttcctggtgatggtataaattgctattctctattggaaagcaatttggaatgaaaatttaaagaaccattttaaaatrtgctatcctgcgtacctccattccacccacccccagggatgtagcctactgaaataattttaaagaagtcaccatatgagagaaaatgttattgctatattgttattgtgagaaattggaaatagactaaatgttcagcactataggaataattaatgaaattacatatactctatacaatcattatgctgccattgaaataataaatacaaaggcgcaaggggggaaaagcttataatgttagtgaaactaagactgatttttttataaagcagcagttttcagacccttggagactccaattcggtagaaccagrgcttcatcttctctgtcgaagctgtgacaggagttgcaaatgcctctcctttttgctgagtttgcagctgctgtttttcyggcagcacatctgtgcaggcctctgcctcggcccctctggatctgctgattgagcagcggattgatctgtccttctctttcgtgttgacccatgtgaggaaccractggcaagggaacaagaaatggaaataggcctcctttgcatcatgacctgtacatcctgcaattggaaaagattgtactttagttggtttaaccagcagcattatttttctaaactaagcaktaagaaggaattaggttttatgtgggatcaacagactgggtctcaaaagaggaaggtgatagaacacagtggggagggggaggtgcactagaaacagagggcctatgctttcattctggctttgctacttaatagctgtgtgacccaatcttagagacttaacctctctgaacttccattttctcatgtataaaatgggaaatattaaaggatactcactgggctggtggcttgtgcctgtaatcccagcacttggggaggttgaggtgggaggatcacttgagcccaggtgttcaagaccagcccaggcaacatggcaagactctgtctctatgaaaaaattaaaaattagccaggtgtggtggtgtgcacctgkagtcttagctacttggtaggctgagatgggaggatcacttgggcttgggaggtcaaggctgcggtgagctgtgattccatcactgcactccagcccgggcggcagagcgagacactgaatccaaacgacaacaacaacaaaaggcaaaaaaataaaagtgccctctttatggagttgtgtaaggtgaagcatatacactattcaacatagtaactatataaaggaagtattgttgttgttactgtagttaataccattaagtgagatgtttcgtatagtggaaagcacatggactctgaattcagactggtctgactttgagtctcagctccacatctagtaatactatgaccaagccctggttaaaatcatgtttttttttcttcagcctyagtcttctcacatataaaatagggacactgtcatttacctcagttttctgtgaggataaaacaacgacagtgtatatgcaagtattttgtaaattttgtagtgctcctcaagatttagttggtgtttactacttgtactttctcactggaatggcagatgctgttggacagcagggacaatgaccacttttgggaacagcagttggatggcttagattggacagcccaagacatcgtggcgtttttggccaagcacccagaggatgtccagtccagtaatggttctgtgtacacctggagagaagctttcaacgagactaaccaggcaatccggaccatatctcgcttcatggaggtgaatctgttgctgggatcatttagaaaagacttaacggcttctttctctgagacgttacaataaggttcaggcaggaggcaagtttagaaataatgtatagtctcatttacaaaactatccctcaagcctaacacaggatttgataacaaaaggcacttaataaatgttagttgagtggttgaatgagtaaataaactctagctttagtaaattaactctagcttattctatataggctcaagagaatatttctacccattttcttctaggttttcctatctcagtgactaatggtagcaaagcattcccttaaaaaggcattatttgtgaaacttayctaaaatcgaattcgggtccaattaaatttttgaaattttatattaaaaattatattagtagggatgggtaagaggtgttttggtctggttggttggttagttgctatgactcagaattgctaagaaaacagaaaagtaagataagatcaytgttttaacctcttttcctccacaaaatcaataaataacatatccctaaattactcttagaatttctcttaaattgcagtgaaaaaccaaaatccttcattcttggttgaaggttggaaaactacgttagagaggattagagagagaggatgagcaatcgtgtagtcagcccttgcctcctagtgtaggatttgtctcagccactgcttgttgtcctggctgccaacgttctcatgaaggctgttcttctatcagtgtgtcaacctgaacaagctrgaacccatagcaacagaagtctggctcatcaacaagtccatggagctgctggatgagaggaagttctgggctggtattgtgttcactggaattactccaggcagyattgagctgccccatcatgtcaagtacaagatccgaatggacattgacaatgtggagaggacaaataaaatcaaggatgggtaagtggaatcccatcacaccagcctggtcttggggaggtccagagcacctattatattaggacaagaggtactttattttaactaaaaatttggtagaaatttcaacaacaacaaaaaaactcaacttggtgtcatgattttggtgaaattggtacatgacttgctggaaggtttttcataggtcataaaataacagtatcttttgatttagcatttctactcaagggaattaattccaggaattttggtggcaggcacctgtaatcccagctactcgggaggctgaggcaggagaattgcttgaacccaggaggcagaggttgcagtgagctaagatcgcatcattgcactcccgcctgggcaataagagtgaaactccatctcaaaaaaaaaaaaagatrcaaaaatagaaaaaggggcttggtaagggtagtagggttttgggcaatttttttttttttttttttttattgtatggttctaaaggaatggttgattacctgtggtttggttttaggtactgggaccctggtcctcgagctgacccctttgaggacatgcggtacgtctsggggggcttcgcctacttgcrggatgtggtggagcaggcaatcatcagggtgctgacgggcaccgagaagaaaactggtgtctatatgcaacagatgccctatccctgttasgttgatgacatgtaagttacctgcaagccactgtwtttaaccagtttatactgtgccagatgggggtgtatatatgtgtgtgcatgtgcatgcatgtgtgaatgatctggaaataagatgccagatgtaagttgtcaacagttgcagccacatgacagacatagatatatgtgcacacactagtaaacctctttccttctcatccatggktgccacttttatctttttatttttatttttttttttgagatggagtctcgctctgacgcccaggctggagtgcagtggctcgatctcggctcactgcaacctttgcctcccgggttcaagctattctcctgcctcagcctccacagtagctgggactacaggctcatgctgccacgcccggctgactttttgtattttagtagagacgaggtttcaccatgttacccaggctagacttcaactcctgagctcaggcaatccaccctccttggcctcccaaagtgctgggattacaggtgtgagccactgcacccagcccaccactttaattttttacactctacccttttggtcaaaatttgctcaatctgcaagcttaaaatgtgtcatgacaaacacatgcaagcacatactcacacatagatgcagaaacagcgtctaaacttataaaagcacagtttatgtaaatgtgtgcacttcttctccctaggtggtaaaccacatttcaaaacaacccaaataaaactgaacaaagcttcttcctcttagactttttagaaaatctttcagtgctgagtcactaagctgccaagttctcattgtgggaactatgcctttggatgtaatgatttcttctaagacaatgggcggaggtgtagttattgcagacatctgaaatatgtaatgtttcttccagattctggaaattctcttattctctgtggttggtggtggtggtggsatgtgtgtgtgtgtgtgtgtgtgtgtgtgtgtgtgtagggatcaggatgcgggaggagctgggttctgcttktattggttctctgttttgcattgaatagtgtgtttccttgtatggctatctatagcttttcaaggtcaccagaaattatcctgtttttcaccttctaaacaattagctggaatttttcaaaggaagacttttacaaagacccctaagctaaggtttactctagaaaggatgtcttaagacagggcacaggagttcagaggcattaagagctggtgcctgttgtcatgtagtgagtatgtgcctacatggtaaagctttgacgtgaacctcaagttcagggtccaaaatctgtgtgcctttttactttgcacatctgcattttctattctagcttggaatctgaaacattgacaagagctgcctgaaatgtatgtctgtggtgtgattagagttacgataagcaagtcaatagtgagatgaccttggagatgttgaacttttgtgagagaatgagttgtttttttgttttggtttttagtactttaacataatctacctttagtttaagtatcgctcacagttacctagttactgaagcaagcccccaaagaaatttggtttggcaacactttgttagcctcgtttttctctctacattgcattgctcgtgaagcattggatcatacgtacatttcagagtctagagggcctgtccttctgtggcccagatgtggtgctccctctagcatgcaggctcagaggccttggccyatcaccctggctcacgtgtgtctttctttctccccttgtccttccttggggcctccagctttctgcgggtgatgagccggtcaatgcccctcttcatgacgctggcctggatttactcagtggctgtgatcatcaagggcatygtgtatgagaaggaggcrcggctgaaagagaccatgcggatcatgggcctggacaacagcatmctctggtttagctggttcattagtagcctcattcctcttcttgtgagcgctggcctgctagtggtcatcctgaaggtaaggcagcctcactcgctcttccctgccaggaaactccgaaatagctcaacrcgggctaagggaggagaagaagaaaaraaatccaagcctctggtagagaaggggtcatacmtgtcatttcctgcaatttcatccatttatagttggggaaagtgaggcccagagagggrcagtgacttgcccaaggtcaacccagccgggtagcagctaagtaggatgagagtgcagggttcatgctttccagataaccacatgctcaactgtgccatgctgtctcattggtagtggttcatggcagcatctgaaagctatttattttcttagatatattgggtggcgattcttcctaagtttctaagaacaataatcagaaggatatatattgttgcaggttagactgtctggaagcagaggctgaaatagagtttgatgtatgggtatttatgagggctcaatacctatggaagagatatggaagatgcaggattgggcagagggaggagttgaactgtgatatagggccaaccccgtggggcactctagagaatatgcagcttgttggagttgttcttcatcgagctgaaacatccagccctttgtgctcccccaaggcctccctcctgacaccacctacctcagccctctcaatcaatcactggatgtgggctgccctgggaaggtcgtgccccagggcctacatggctctctgctgctgtgacaaacccagagttgctgatgcctgaggccgtctactgacagctgggcaacaaggcttccctgaatggggactctgggcagtgcagttttgtgtctgaaccatacattaatatatttatatccgaattttctttctctgcaagcatttcatataaagacacatcaggtaaaaataaatgtttttgaagcaaaaggagtacaaagagataagaactaactaatttaatactagttaccatctgttacaaatagttcctactgattgccaaggactgtttaaacacatcacatgggcttcttcttctatcctcactaacccttttaacagacaaggaaatgaggctcaggaaggtcaaggactttattgaggttccacagtaggatacagttcttgctaaaagcaacccctccctcatgctctgttatctaactgcaaggggaaggtcagtggcagaggtagtggtcccatggttggtgcataagagctgctctgagacaactgcatgctggtgggtcctgcagacatgtasccatcagccggagataggctcaaaatatccacaagagtttggatgattgtgggaatgcagaatccatggtgatcaagagggaaagtcaagttgcctggccattttccttggcttttagacagaaaagttacgtgggatattatctcccacagctcttctgtggtgccaccagtcatagtccttatataaggagaaaccagttraaattacctattgaagaaacaaagagcaaactcgcccactgaaatgcgtagaaagccctggactctgttgtattcataactctgccattatttttctgcgtagttttgggtaartcacttatcttctttaggatggtaatgatcagttgcctcatcagaaagawgaacagcattacgcctctgcattgtctctaacatgagtaggaataaaccctgtcttttttctgtagatcatacaagtgagtgcttgggattgttgaggcagcacatttgatgtgtctcttccttcccagttaggaaacctgctgccctacagtgatcccagcgtggtgtttgtcttcctgtccgtgtttgctgtggtgacaatcctgcagtgcttcctgattagcacactcttctccagagccaacctggcagcagcctgtgggggcatcatctacttcacgctgtacctgccctacgtcctgtgtgtggcatggcaggactacrtgggcttcmcactcaagatcttcgctgtgagtacctctggcctttcttcagtggctgtaggcatttgaccttcctttggagtccctgaataaaagcagcaagttgagaacagaagatgatwgtcttttccaatgggacatgaaccttagctctagattctaagctctttaagggtaagggcaagcattgtgttttattaaattgttwmcctttagtcttctcagtgaatcctggttgaattgaattgaatggaatttttccgagagccagactgcatcttgaactgggctggggataaatggcattgaggaatggcttcaggcaacagatgccatctctgccctttatctcccagctctgttggctatgttaagctcatgacaaagccaaggccacaaatagaactgaaaactcttgatgtcagagatgacctctcttgtcttccttgtgtccagtatggtgttttgcttgagtaatrttttctgaactaagcacaactgaggagcaggtgcctcatcccacaaattcctgacttggacacttccttccctcgtacagagcagggggatatcttggagagtgtgtgagcccctacaagtgcaagttgtcagatgtccccaggtcacttatcaggaaagctaagagtgactcataggatgctcctgttgcctcagtctgggctycataggcatcagcagccccaaacaggcacctctgatcctgagccatccttggctgagcagggagcctcagaagactgtgggtatgcgcatgtgtgtgggggaacaggattgctgagccttggggcatctttggaaacataaagttttaaaagttttatgcttcactgtatatgcatttctgaaatgtttgtatataatgagtggttacaaatggaatcattttatatgttrcttggtagcccaycactcccctaaagggactctataggtaaatactacttctgcaccttatgattgatccattttgcaaattcaaatttctccaggtataatttacactagaagagatagaaaaatgagactgaccaggaaatggataggtgactttgcctgtttctcacagagcctgctgtctcctgtggcttttgggtttggctgtgagtactttgccctttttgaggagcagggcattggagtgcagtgggacaacctgtttgagagtcctgtggaggaagatggcttcaatctcaccacttcgntctccatgatgctgtttracaccttcctctatggggtgatgacctggtacattgaggctgtctttccaggtacactgctttgggcatctgtttggaaaatatgacttctagctgatgtcctttctttgtgctagaatctctgcagtgcatgggcttccctgggaagtggtttgggctatagatctatagtaaacagatagtccaaggacaggcagctgatgctgaaagtacaattgtcactacttgtacagcacttgtttcttgaaaactgtgtgccaggcagcatgcaaaatgttttatacacattgcttcatttaattctcacaaggctactctgaagtagttactataataaccagcaattttcaaatgagagaactgtgactcaaagacgttaagtaaccagctttggtcacacaactgttaaatgttggtacgtggaggtgaatccacttcggttacactgggtcaataagcccaggcgaatcctcccaatgctcacccaattctgtatttctgtgtcctcagagggggtacaactaggagaggttctgtttcctgagtacaggttgttaataattaaatatactagctctaaggcctgcctgtgatttaattagcattcaataaaaattcatgttgaatttttctttagtacttctttcttaatataatacatcttcttgaccaagtccaagaggaacctgygttggacagttttcatatgagatcaaattctgagagagcaagatttaaccctttttggttcaccttctgatcctcccctaaggaggtatacatgaaatatttattactcctgcctgaacttctttcattgaatatgcaattttgcagcatgcagattctggatttaaattctgagtcttaacttactggctgagggaccttggataggctccttatccctcagtttcctcatctctaaaatggggatggcacctgccccgtgggttgttggaaggacttacagaggtgcagaatgtacgttgtacatagcaggtttcagcaaatgttagctccctctttccccacatccattcaaatctgttccttctccaaaggatgtgtcaaggaggaaatggacctggctgggaaaccctcagaatactgggatgwtgctgagcttggctcatacctgtgctttgctttcaggccagtacggaattcccaggccctggtattttccttgcaccaagtcctactggtttggcraggaaagtgatgagaagagccaccctggttccaaccagaagagaatrtcagaaagtaagtgctgttgacctcctgctctttctttaacctagtgctgctgcctctgctaactgytgggggcaagcgatgtctcctgcctttctaaaagactgtgaaaccactccaggggcagagaaatcacatgcagtgtccctttccaaatcctcccatgccatttatgtccaatgctgttgacctattgggagttcacggtctcgatccctgagggacattttctttgttgtcttggcttctagaagagtatcttttacttgccccctcccaaacacacatttcatggtctcctaacaagctagaagaaagaggtaaagacaagcgtgattgtggaaccatagcctcgctgcctgcctgtgacatggtgacctgtgtatcagcctgtgtgggctgagaccaagtggctaccacagagctcagcctatgcttcataatgtaatcattacccagatccctaatcctctcttggctcttaactgcagacagagatgtccacagctcatcaaakgctctgccttctgggttctttgtgcttagagtggcttcctaaatatttaataggtcccttttctgccagtctcttctgtgcccatcccctgattgcccttggtaaaagtatgatgccccttagtgtagcacgcttgcctgctgttcctaatcatcttctcctacctcctctttacacctagctcctgtttcagtcacctagaaatgctcacagtcgctggaatatgtcatgttcttccacacctccatgcctttgtaggtactgtttgctctcacaggagaactttctctctaacttgcctatcttctcaactcctcctttctctccaagatctagttccggatcccctcccctgagcatccctccttggttctcaggtagtcagtcactctctgccctgaacttccatggcacgtgaaagaaaatctttttattttaaaacaattacagactcacaagaagtaatacaaattacatgagggggttcccttaaacctttcatccagtttccccaatggtagcagcatgtgtaactgtagaatagtatcaaaaccatgaaattgacataggtacaattcacaaaccttcttcagatttcactagctttatgtgcgctcatttgtgtgtgtgtgtgcgtatttagttctatgcaattttatcatgtgtgaattcatgtaattactagctcagtcaagctgcagaaatatctcattgtcacaaagctccttcatgctaccccttaatggccacagccacctcccttcttcctcagttcctgacacctgtcaaccactaatgcgttcctcgtttttacagttttattatttctagaatgttacataaatggaaccatacagtaggtatccttttgatactggctttttttttttttcactcagcagtattcccttagatctatccaagttgtgtgtgtcaacagttcattcctcttcactgctgagtagtgttccctgggaggggtgtatcacagttccatggcatttttagatgtattttttaaacagctttcagcatcctctattttaattgttcatcaagtcctttttcccaatagactctgaatgctcctttatcatcgtattcccatcaccaacatcagtacccaaataggccctaaataaacatttatagcctcctgcctgcctgagaaaccagggtggacatggagagaaggcacttctgaaagttcaagcgcagtgcsctgtgtccttacactscactcctcagtgctttctgtgggttcatttctgtcttctctcctgtcacagtctgcatggaggaggaacccacccacttgaagctgggcgtgtccattcagaacctggtaaaagtctacygagatgggatgaaggtggctgtcgatggcctggcactgaatttttatgagggccagatcayctccttcctgggccacaatggagygggraagacgaccaccatgtaagaagagggtgtggttcccgcagaatcagccacaggagggttctgcagtagagttagaaatttataccttaggaaaccatgctgatccctgggccaagggaaggagcacatgaggagttgccgaatgtgaacatgttatctaatcatgagtgtctttccacgtgctagtttgctagatgttatttcttcagcctaaaacaagctggggcctcagatgacctttcccatgtagttcacagaattctgcagtggtcttggaacctgcagccacgaaaagatagattacatatgttggagggagttggtaattcccaggaactctgtctctaagcagatgtgagaagcacctgtgagacgcaatcaagctgggcagctggcttgattgccttccctgcgacctcaaggaccttacagtgggtagtatcaggaggggtcaggggctgtaaagcaccagcgttagcctcagtggcttccagcacgattcctcaaccattctaaccattccaaagggtatatctttggggggtgacattcttttcctgttttctttttaatctttttttaaaacatagaattaatatattatgagcttttcagaagatttttaaaaggcagtcagaaatcctactacctaacacaaaaattgtttttatctttgaataatatgttcttgtttgtccattttccatgcatgcgatgttaggcatacaaaatacattttttaaagaatactttcattgcarattggaaacttcgtttaaaaaatgctcatactaaaattggcatttctaacccataggcccacttgtagttatttacygaagcaaaaggacagctttgctttgtgtgggtctggtagggttcattagaaaggaatgggggcggtgggagggttggtgttctgttctctctgcagactgaatggagcatctagagttaagggtaggtcaaccctgacttctgtacttctaaatttttgtcctcaggtcaatcctgaccgggttgttccccccgacctcgggcacygcctacatcctgggaaaagacattcgctctgagatgagcaccatccggcagaacctgggggtctgtccccagcataacgtgctgtttgacatgtgagtaccagcagcacrttaagaataggccttttctggatgtgtgtgtgtcatgccatcatgggaggagtgggacttaagcattttactttgctgtgtttttgttttttctttttttcttttttatttttttgagatggagtctcgctctgtagccaggctggactgtagtggcgcgatctcggctcactgcaaccttggcctcccaggttcaagcgattctcctgcctcagcctcccgagtagctgggactctaggcacacaccaccatgcccagctaatttttgtgtttttagtagagacggggtttcaccatgttggccaggatggtctcaatgtcttgacctcgtgatccgcccacctcggtctcccaaagtgctgggaacacaggcatgagccactgtgtctggccacattttactttctttgaatatggcaggctcacctccgtgaacaccttgagacctagttgttctttgattttaggagaagtgggaggtgaatggttgagctgtagaggtgacatcagcccagccagtggatgggggcttgggaaacattgcttcccattattgtcatgctggagggccctttagcccatcctctcccccgccaccctccttattgaggcctggagcagacttcccagacctggtagtgcttcagggccctggtatgatggacctatatttgctgcttaagacatttgctcccactcaggttgtcccatcagccataaggcccccagggagcccgtgtgatggagcagagagagacctgagctctgcaatcttgggcaaggcttttcccttatgtttcttcttatctaaagtgaacagctggggctcatgtgctccctcctcatctaaagtgaayacatggggctcatgtgcagggtcctccccgctttcagagcctgaggtcccctgaggctcaggaaggctgctccaggtgagtgccgagctgacttcttggtggacgtgctgtggggacagcccattaaagaccacatcttggggccctgaaattgaaagttgtaactgcctggtgcatggtggccaggcctgctggaaacaggttggaagcgatctgtcacctttcactttgatttcctgagcagctcatgtggttgctcactgttgttctaccttgaatcttgaagattatttttcagaaattgataaagttattttaaaaagcacggggagagaaaaatatgcccattctcatctgttctgggccaggggacwctgtattctggggtatccagtagggcccagagctgacctgcctccctgtccccaggctgactgtcgaagaacacatctggttctatgcccgcttgaaagggctctctragaagcacgtgaaggcggagatggagcagatggccctggatgttggtttgccatcaagcaagctgaaaagcaaaacaagccagctgtcaggtgcrgcccagagctaccttccctatccctctcccctcctcctccggctacacacatgcggaggaaaatcagcactgccccagggtcccaggctgggtgcggttggtaacagaaacttgyccctggctgtgcccctaggtcctctgccttcactcactgtctggggctggtcctggagtttgtcttgctctgtttttttgtaggtggaatgcagagaaagctatctgtggccttggcctttgtcgggggatctaaggtkgtcattctggatgaacccacagctggtgtggacccttactcccgcaggggaatatgggagctgctgctgaaataccgacaaggtgcctgatgtgtatttattctgagtaaatggactgagagagagcggggggcttttgagaagtgtggctgtatctcatggctaggcttctgtgaagccatgggatactcttctgttakcacagaagagataaagggcattgagactgagattcctgagaggagatgctgtgtctttattcatctttttgtccccarcatggtgcactaaatttatggttagttgaaagggtggatgcttaaatgaatggaagcggagaggggcaggaagacgattgggctctctggttagagatctgatgtggtacagtatgaggagcacaggcaggcttggagccaactctggctggccctgagacattgggaaagtcacaacttgcctcaccttctttgccgataataatagtggtgcttacctcatagaggattaaattaaatgagaatgcacacaaaccacctagcacaatgcctggcatatagcaagttcccaaataaaatgctactgttcttacctctgtgaggatgtggtacctatatatacaaagctttgccattctaggggtcatagccatacagggtgaaaggtggcttccaggtctcttccagtgcttacccctgctaatatctctctagtccctgtcactgtgacaaatcagaactgagaggcctcacctgtcccacatccttgtgtttgtgcctggcaggccgcaccattattctctctacacaccacatggatgaagcggacgtcctggggkacaggattgccatcatctcccatgggaagctgtgctgtgtgggctcctccctgtttctgaagaaccagytgggaacaggctactacctgaccttggtcaagaaagatgtggaatcctccctcagttcctgcagaaacagtagtagcactgtgtcatacctgaaaaaggtgagctgcagtcttggtgctgggctggtgttgggtctgggcagccaggacttgctggctgtgaatgatttctccatctccaccccttttgccatgttgaarccaccatctccctgctctgttgcccctttgaaatcatatcatacttaaggcatggaaagctaaggggccctctgctcccattgtgctagttctgttgaatcccgttttccttttcctatgaggcacagagagtgatggagaaggtccttagaggrcattattatgtcaaagaaaagagacttgtyaakaggtaagagccttggctacaaatgacctggtgttcstgctcattacttwtcaatctcattgaccttaacttttaaactataaaacagccaatatttattaggcwctgatttcatgccagagacactctgkkcatgaaagaaagtaatgataatagttaattttatatagcgttgwtaccatttacaaccttttttttttttttaacctctatcatctcaattaaagkgcagagagaccctgggaagaaggtaactatatttattatcccagatgagggaagtgaggcttgtagggaattggtagctgattcaaggtcacccagcaggtaaataacagtggtgggaccagacccaattaccaggtatgttttcctctgtaccgcagtacatgcctgagatttatttgtgtgttgaagccagtggtacctaatgtatttacatcccaacctgaaactcctatccacttatttaccttttaatgagcctcttaactcaagtgcagtctgaggaccagcagcatcaggatcacttgggaacttgttagaaattcagcaacctgggcccagctcagacctaccgaatcagaatctgtgcattttaacaaggttcttgagtggttgaacacacattaaagcatgagaagcattgaactagacatgtagccaggtaaaggccttgcctgagatggttggcaaaggcctcattgcagcattcattggcaggccacagttcttttggcagctctgcttcctgacctttcaccctcaggaagcraggctgttcacacggcacacacatgccagacagggtcctctgaagccacggctgccagtgcrtgtgtcccagggaaagctttttcctttagttctcacacaacagagcttcttggaagccctcccyggyraaggtgctggtggctctgccttgctccgtccctgacccgttctcacctccttctttgccatcaggaggacagtgtttctcagagcagttctgatgctggcctgggcagcgaccatgasagtgacacgctgaccatcggtaaggactctggggtttcttattcaggtggtgcctgagcttcccccagctgggcagagtggaggcagaggaggagaggtgcagaggctggtggcgctgactcaaggtttgctgctgggctggggctgggtggctgcgggkgtgggagcagcttggtggcgggttggcctaatgcttgctggggtgcctggggctcggtttgggagctagcagggcagtgtcccagagagctgagatgattggggtttggggaatcccttaggggagtggacactgaataccagggatgaggagctgagggccaagccaggagggtgggatttgagcttagtacataagaagagtgagagcccaggagatgaggarcagccttccagatttttcttgggtagcgtgtgtaggaggccagtgtcaccagtagcatatgtggaacagaagtcttgrcccttgctatctctgcctagtcctaatggctgrcttttcccaggaaggcttctgcttccatggactgttagattaaccctttatttaggtaaatgagggaacctactttataagcataggaaagggtgaagaatcttttaagattcctttactcaagttttcttttgaagaatcccagagcttaggcaatagacaccagactttgagcctcagttatccattcacccatccacccacccacccacccatccttccatcctcccatcctcccattcacccatccacccatccagctgtccacccattctacactgagtacctataatgtgcctggctttggtgatacaaaggtgaataagacatagtcctttcctttgcccccaaccctcagaccagagatgaacatgtggaatgacctaaacacctggaacaggtgtggtgtatgagcggcaggcctctgatgagagggtgggggatggccagccctcactccgaagcccctctgagttgattgagccatctttgcattctggtccctgcagatgtctctgctatctccaacctcatcaggaagcatgtgtctgaagcccggctggtggaagacatagggcatgagctgacctatgtgctgccatatgargctgctaaggagggagcctttgtggaactctttcatgagattgatgaccgrctctcagacctgggcatttctagttatggcatctcagagacgaccctggaagaagtaagttaagtggctgactgtcrgaatatatagcaaggccaaatgtcctaaggccagaccagtagcctgcattgggagcaggattatcatggagttagtcattgagtttttaggtcatcgacatctgattaatgttggccccagtgagccatttaagatggtagtgggagatagcaggaaagaagtgttttcctctgtaccacagtacatgcctgagatttgtgtgttgaaaccagtggtacctaacacatttacatcccaaccttaaactcctatgcacttatttaccctttaatgagcctctttacttaagtacagtgkgaggaacagcggcatcaggatcacttgggaacttgttagaaatwcagcaacttgsgcccagctcagacctactgaatcagaatcaggagcaattctctggtgtgactgtgtcacagccaggtatcaactggattctcatacataggaaatgacaaacgtttatggatggatagtctacttgtgccaggtgctgagatttgttttttgttttttgatttttttttaatcactgtgacctcatttaattctcaaaaaaagatgaaaaaatgaacactcaggaatgctgacatgagattcagaatcaggggtttggggcttcaaagtccatcctctctttatccatgtaatgcctccccttagagatacaacatcacagaccttgaaggctgaaggggatataaaagctgtctggccaagtggtctccaagcttgacagtgcagcagaatcacctggggatattattaaaaataaacatactaaggtttggcttcagggcctgtgaatcagaatttctggaggtgaggccttgaagtctgtatttctattgcatactttggacacagtggtctatagactagagtttggaaatgattgcgctcattcagattctcttctgatgtttgaattgctgccatcatatttctagtgctctatttcctcctgctcattctgtcttggataacttatcatagtactagcctactcaaagatttagagccacagtcctgaaagaagccacttgactcattccctgtaggttcagaataaatttcttctgcgcagtgtctgtcatagctttttttaaatttttttttatttttgatgagactggagttttgctcttattgcccaagctggagtgcagtggtgcgattttggctcactgcaacctccacctcccaggttcaagcgattctcctgcctcagcctcccaagtagctgagattacaagcatgtgctaccacgcccagctaattttgtatttttagtagagatgggttttatccatgttggtcaggctggtctcgagctccagacctcaggtgatctgcccgcctyggcctcccaaagtgctgggattataggcctgagccacagcgctcagccataactttaatttgaaaatgattgtctagcttgatagctctcaccactgaggaaatgttctctggcaaaaacggcttctctcccaggtaactctgagaaagtgttattaagaaatgtggcttctactttctctgtcttacggggctaacatgccactcagtaatataataatygtggcagtggtgactactctcgtaatgttggtgcttataatgttctcatctctctcattttccagatattcctcaaggtggccgaagagagtggggtggatgctgagacctcaggtaactgccttgagggagaatggcacacttaagatagtgcctyctgctggcyttctcagtgcacgagtattgttcctttccctttgaattgttctattgcattctcatttgtagagtgtaggtttgttgcagatggggaaggtttgttttgttgtaaataaaataaagtatgggattctttccttgtgccttcagatggtaccttgccagcaagacgaaacaggcgggccttcggggacaagcagagctgtcttcgcccgttcactgaagatgatgctgctgatccaaatgattctgacatagacccaggtctgttagggcaagatcaaacagtgtcctactgtttgaatgtgaaattctctctcatgctctcacctgttttctttggatggcctttagccaaggtgatagatccctacagagtccaaagagaagtgaggaaatggtaaaagccacttgttytttgcagcatcgtgcatgtgatcaaacctgaaagagcctatccatatcacttcctttaaagacataaagatggtgcctcaatcctctgaacccatgtatttattatcttttctgcggggtcctagtttcttgtatacattaggtgtttaattgttgaacaaatattcattcgagtagatgagtgattttgaaagagtcagaaaggggaatttgctgttagagttaattgtaccctaagacttagatatttgaggctgggcatggtggctcatgccagtaatcccagcgctttgagaggctgaggtgggtagatcacctgaggtcaggagtttgagaccagtctgaccaacaaggtgaaaccccgtctctactaaatacaaaaaattagccgagtgtggtggcacatgcctgtcatcccagctacttgggaggctgaggcaggagaatcgcttgaacccaggaggcagaggttgcagtcagccacggttgcgccattgcactccagactgggcaacaagagtgaaaactccatctcaaaaaagaaaaaaaaagaattagatattttggatgagtgtgtctttgtgtgtttaactgagatggagaggagagctaagacatcaaacaaatattgttaagatgtaaaagcacatcagttaggtatcattagtttaggacaaggatttctagaaaatttttaggaacagaaaactttccagttctctcacccctgctcaaagagtgtatggctcttacattatatataactgcctgacttcatacagtatcagtacttagatcatttgaaatgtgtccacgttttaccaaaatataatagggtgagaagctgagatgctaattgccattgtgtattctcaaatatgtcaagctacgtacatggcctgtttcatagagtagtctataagaaattgatgacttgattcatccgaatggctggctgtaacacctggttacgcatgaacacctcttttcagttgtctcaagacacctttcttttctgtacttatcagacaaggactgaaaggcagagactgctactgttagacattttgagtcaagcttttccttggacatagctttgtcatgaaagccctttacttctgagaaacttctagcttcagacacatgccttcaagatagttgttgaagacaccagaagaaggagcatggcaatgccgaaaacacctaagataataggtgaccttcagtgttggcttcttgcagaatccagagagacagacttgctcagtgggatggatggcaaaggrtcctaccaggtgaaaggctggaaacttacacagcaacagtttgtggcccttttgtggaagagactgctaattgccagacggagtcggaaaggattttttgctcaggtgagacgtgctgttttcgccagagactctggcttcatgggtgggctgcaggctctgtgaccagtgaaggcaggatagcatcctggtcaagatatggatgccggagccagatttatctgtatttcaatcccagttctattccttgccagttgtgtatccgctggcaagttacttctctatgcctcaatctcctcatctgtaaaatggggataataatattacctgcaatacagggttgttacgaaaataaaaatgaataggtgcttagaatggggcctgacattagtaagtgcttagttttgtgtgtgtatatgttatttttattttggaggagaacataaaaargacaaagtgtagaaaaactggttgggtgtattcagctgtcataacatgagagttgttatgcccagatgcacttgacatgtgaatttattagaaacatgatttttctctgagttgatgtttaactcaaactgatagaaaagataggtcagaatatagttggccaacagagaagacttgttagactattgtctgcatgtcagtgtttgcatgctaacttgcttagttagaaaggttaaattttttcactctataaaatcaagaaatatagagaaaaggtctgcagagagtctttcatttgatgatgtggatattgttaagagcgggagtttggagcatacagagctcaagttgaatcctgactttgctacttattggctatatgaccttgggcaagctgcttagtctctctgatcctcagttacctttgtttgttgatgatgaccattgataacacaaccataaataatgacaacatagagatagttctcattatagtagttgttatacagaattattcactcaatgttaattttctgcattgaaatcccagaacattagaattgggggcattatttgaatctttaaggttataaggaatacatttctcagcaataaatggaaggagttttgggttaacttataaagtatacccaagtcatttttttttcagagaagatatggtagaaagtcttaggaggttgaagaaggaattggatatttattctttctgagactatcatgggagataatgactatggttgtccatgattggagccgttgctgtagagttggttttattatagtgtaggatttgaatgggccatgtgttctcagacctcagattaaaatgagaaaactgaggccagtggggagcgtgacttcacatgggtacacttgtgctagagacagaaccaggattcaggacttctggctcctggtcctgggttcatggcccaatgtagtctttctcagtcttcaggaggaggaagggcaggacccagtgttctgagtcaccctgaatgtgagcactatttacttcgtgaacttcttggcttagtgcctctgccaggtggccataacctctggccttgtgttgccagagaaaaggtttagttttcaggctccattgcttcccagctgccaagaatgccttggtgcagcacagtcataggccctgcattcctcattgccgtgctggttggtcggggaggtgggctggactcgtagggatttgccccttggccttgtttctaacacttgccgtttcctgytgtccccctgccccctccactgcctgggtaaagattgtcttgccagctgtgtttgtctgcattgcccttgtgttcagcctgatcgtgccaccctttggcaagtaccccagcctggaacttcagccctggatgtacaacgaacagtacacatttgtcaggtatgtttgtcttctacatcccaggaggggrtaagattcgagcagaccaaagatgtttacgagggccaagggaatggacttcagaattacacggtggaatgaattttactgctgcggctcaggtccctgtataagctaatactgcatgcatagaacagcagcgaactaaccctgaataataggccagtcttctgttgagcctttcagcctctctcctcttcatcctactgttgtcaggaacagccacatgtgttttaggtgaaataatccacccttgcaaaaatccatgattaagttataaaatatttggatttgtggagctgtgttttaattctgtaactgagtcacagggcacactgtcaaagcatagaacctccagagacttgttttctgcaaagtataattcatgtaattattatctattctgttatatttgggatgttaggtagtgtttgttctttagataaaaatatcccccactctgtaacaatacattaaatcaaagaaaaggacaaaggatttttctgggtcttgttagcaggagctttcttcagtcctgaaagatttgtagacctgtagatgggggaactgtgtcagtgatacaaaagggaagcatttaaaaaaaaaaaagtatatatatatatatatatatatatatgtaatgtgaattggcctctttttctctaagcccacattttcttcttacatagttcaggtttactttattttttcctttccggctgctgaccctgtattgcccgtagttgtggaacatagcatgtgtttgtgacctgtgcctgttatttttgtgctttctagttgtgcatgcaaagagtacaaagttttcttgccctttcttggaaaatcctgcttgtctgtgccaaagggataattgtgaaagcacttttgaaatacttaatgagttgattttcttcaaattaaaaaaaatatataaatgtatmtgtgtatgtacatgtgtgtacacatacacacctttatacatacagcccatttaaaacaagctccactttggagtgctctacgtcaccctgatgccgaatacagggccagagtctgagatccttctgggtggtttctgtgttttgttcatttctgttttaagagcctgtcacagagaaatgcttcctaaaatgtttaatttataaaaacatttttatctctcgattactggttttaatgaattactaagctggctgcctctcatgtacccacagcaatgatgctcctgaggacacgggaaccctggaactcttaaacgccctcaccaaagaccctggcttcgggacccgctgtatggaaggaaacccaatcccgtgagtgccactttagccataagcaggcttcttgtgcttgttgcctggtttgatttctaatatgctgcatttatcaactgcatgccacattgtgaccgccagcatttgccctttgaattattattatgttttatttacaaaaagcgaaggtagtaaccgaactaaattatctaggaacaaacgtttggagagtcttctaacaccgtgcaaagcacgtcattacagacatttgtttactgatttagaaccttaatatttaatttaaatagcactttacacttactgatgaaatgcttttcctttctttctctcccagcccctgtacttaagtgcttcaataggctctcattatatatgatttttaggttttgyttatcagcttcttcgcttttataatctgaaaagatggcatatgaatttttataaaaagggacactttcttcttctcaaattgtatatttttattgtactttccttcaaaacccccttttaaaaagtaagcagtrgataaataaattcagtgaagcatccatatgacycttaagtgagtgtaggggaagggaggtcaccagatcactgtgagtgaagatggtggagaggtgaggatcttatgaggccgtgctcaaggctggtagaggtgggttagtgtttccaggtttaggcagaatctcagctgaggtcatgaaacaacagtgatctctgaaaaattatggcaaggtgggaaggtgctggagaattggagagggggcaaacttgactttcaagtttcaatgggaagataggtgactctgcacaccacagaacagtgagcatgataacctgtttatacaaggttctagagcagatttctaaatggatagctactgtgtgcttgtttgttcttaattagtattggatagttactaaatacttgttagtacttagtacataatgggtggtaaatcctagcagctaatattggttcccaaataaccagatgacaaggatagagaaggacacagacacggcctatctggatttcatggtgcctttsattttccacatgaaggttgtgtagggaagatagaagcatgagatgagatgataatatagttatctggattcatcactggccagctgaaccatatgaactcatggattgatgctagcttaggaaggctctgtaggagccagaactgggctgagagccagcccatagagacaaaagaggcccggccctgacatcagagggttcaaacatgatgtctgagccccacctacagtctgccggaggtggttggaaggaagagcctttatccttacaattcttactgaaattcaaatttttaggttttgcaaaaaaatggtggacctgaaggaaatttgacaggagcatgtctcagctgtatttaaatttgtctcagccaatccccttttgaatgttcagagtgtaagcttcaggagggcagcgcgtcttagtgtgacttttctggtcagttcaggtgctttaaggagacaattagagatcaatctggaaaacttcatttgaatttttaatacataagaaaacaataagaaatagttaaaaatatatatttatawwatatatrtgtgtgtgtgtgtgtgtgtgtgtrtrtatatatatatattttatttatttatttttttttgagatggagtctcgctctgttgcccaggctggagtgcagtggctcaatcttggctcactgccacctctgcctcccaggttcaagtgattctcctacctcagcctcctgagtagctgggattacaagcatgtgccaccacactggctaatttttctaattttagtagagatggagtttcaccatgttggacaggatggtcttgaactcctgacttagtgatccacccgccttcgcctcccaaagttctgggattacaggcatgagccatcgtgcctggcaattatatttaatatttaataataaggaaataattgctgtaactttactttaaattgtggaattctgaaactggaagggaactggaaatgacttgttgaatcaaatcattttaaacttttattttgccagtggaaaaaataagcccccaaaagagcaggggacctgctgatgtcccacagtaattcagagctggagatgaggttgaaggctttgtgtcttatctccagggaaaatttgtagacagcgtagctctttatgtgacgagcattctcaccccagtcatcccccaattctctactcatttgagaacataaattggatcttgccagtctctactcatttttcagcacatcgagcataagatccagactctttcccaggcctctctcatctggctcctctcctcctcctttatcattactcttcttcgtagcttatcctactccagccatgctgtcttcctattattcctaaaaartagaaatgcatttcttcctagggcctttgtacctgcacttgccatcgcttttgctcagaatgttctttttgccaagcttttgcccagcttgttctccatcattgttatgttttggctgaaatgtcttctcttagtaggttcattctccccagtcactgtctttttattttgctttattttgggccatctaaggttatcttattagtgtatttgttgttcgtctcctccatgggcatacacctccatgaaggcaggtattttcaccttaggccctcgaatatactggacagcatctggcacgtagtagatgctcaacgaatgtttgttgtgtgagcaaatggttggttgattggattgaactgagttcagtatgtaaatatttagggcctctttgcattctattttacttatgtataaaatgatacataatgatgatataaatgatgtcacagtgtacaaggctgttgtgggatcaagcaatcaaatgagatcatgcttgtcttttccaaatggtgagggaatagatgcatgtttrtggttgttacggaatgatcctgtgctcctgaggcaacagaaaggccaggccatctctggtaatcctactcttgctgtcttccctttgcagagacacrccctgccaggcaggggaggaagagtggaccactgccccagttccccagaccatcatggacctcttccagaatgggaactggacaatgcagaacccttcacctgcatgccagtgtagcagcgacaaaatcaagaagatgctgcctgtgtgtcccccaggkgcaggggggctgcctcctccacaagtgagtcactttcagggggtgattgggcagaaggggtgcaggatgggctggtagcttccgcttggaagcaggaatgagtgagatatcatgttgggagggtctgtttcagtcttttttgttttttgtttttttttctgaggcggagtcttgctctgtcgcccaggctggagtgctgtggcatgatcttgcctcactgcaacctccacctcccaggttcaagcgattctcctgcctcagcctcctgagtagctgggattacaggcacgcaccaccatgtctggctaatttttgtgtttttagtagagatagggtttcgccgtgttggctaggctggtctggaattcctgacctcaggtgatccacccgcctcggcctcccaaagtgctgggattacaggcgtgagccactacgcccagccctgtttcagtctttaactcgcttcttgtcataagaaaaagcatgtgagttttgaggggagaaggtttggaccacactgtgcccatgcctgtcccacagcagtaaagtcacaggacagactgtggcaggcctggcttccaatcttggctctgcaacaaatgagctggtagcctttgacaggcctgggcctgtttcttcacctctgaattagggaggctggaccagaaaactcctgtggatcttgtcaactctggtattcttagagactctgtttgggaaggagtcctgagccattttttttttcttgagaatttcaggaagaggagtgcttatgatagctctctgctgcttttatcagcaaccaaattgcaggatgaggacaagcaattctaaatgagtacaggaactaaaagaaggcttggttaccactcttgaaaataatagctagtccaggtgcggggtggctcacacctgtaatctcagtattttgggatgccgaggtggactgatcacctaaggtcaggagttcgaaaccagcttggccaatgtggcgaaaccctgtctctactaaaaattcaaaaattagccaggcatggtggcacatgcctgtaatcccagttacttgggaggctgaagcaggagaattgcttgaacctgggaggtggaggtcgcagggagccaaaattgcgccactgtactccagcctgagcaacacagcaaaactccatatcaaaaaataaaatgaataaaataacagctaatctagtcatcagtataactccagtgaacagaagatttattaggcatagtgaatgatggtgcttcctaaaaatctcttgactacaaagaatctcatttcaatgtttattgtttagatgttcagaataaattcttgggaaagaccttggcttggtgtaagtgaattaccagtgccgagggcagggtgaaccaagtctcagtgctggttgactgagggcagtgtctgggacctgtagtcaggtttccggtcacactgtggacatggtcactgttgtccttgatttgttttctgtttcaattcttgtctataaagacccgtatgcttggttttcatgtgatgacagagaaaacaaaacactgcagatatccttcaggacctgacaggaagaaacatttyggattatctggtgaagacgtatgtgcagatcatagccaaaaggtgactttttactaaacttggcccctgccktattattactaattagaggaattaaagacctacaaataacagactgaaacagtgggggaaatgccagattatggcctgattctgtctattggaagtttaggatattatcccaaactagaaaagatgacgagagggactgtgaacattcagttgtcagcttcaaggctgaggcagcctggtctagaatgaaaatagaaatggattcaacgtcaaattttgccacttagtagcaacttgaccaggtaactggttatccttttaaagccttagtttatctaaattgtgatattaatgttgctcttataagtttgtcatgaggactaaattaaatggtgtacatagagtgccttgggtactctctgatgggggactccatgataatttgtggtctcatggagggagctctgggaaggtttaggagcctgccttggctctgcagccttgggagagccttctagcttcccaggacatggcagcctagtgttgaatgcttggctcagcaaatgtttgttctcgtttccttcccatcaacttggtcagttggggtctttcagttaggagtatctcagtgactttaaatggcatgggcatgctggagtgatagtgaccatgagtttctaagaaagaagcataatttctccatatgtcatccacaattgaaatattattgttaattgaaaaagcttctaggccaggcacggtggctcatgcctgtaatcccagcactttaggaggccaaggcgggtggatcacttgaggtcaggagtttgagaccagcctggccaacatggggaaaccctgtctctactaaaaatacaaaataagctgggcgtggtggtgcgtgcctgtaatcccagctacttgggaggctgaggcaggagaaytgcttgaatctgggaggcggaggttgcagtgagctgagttcatgccattgcattccagcctgggcaacaagagcgaaaccatctcccaaaagaaaaaaaaaagaaagaaaaagcttctagtttggttacatcttggtctataaggtggtttgtaaattggtttaacccaaggcctggttctcatataagtaatagggtatttatgatggagagaaggctggaagaggcctgaacacaggcttcttttctctagcacaaccctacaaggccagctgattctagggttatttctgtccgttccttatatcctcaggtggatatttactccttttgcatcattaggaataggctcagtgctttctttgaactgattttttgtttctttgtctctgcagcttaaagaacaagatctgggtgaatgagtttaggtaagttgctgtctttctggcacgtttagctcagggggaggatggtgttgtaggtgtcttggattgaagaaagccttrgggattgtttgtcactcacacacttgtgggtgccatctcactgtgaggaggacagaagccctgtgaacatgtggagcacacaggggcacagacagatttagattaggcctgctttatagagtttctgcctagagcatcatggctcagtgcccagcagcccctccagaggcctctgaaatatttgatatactgatttccttgaggagaatcagaaatctcctgcaggtgtctagggatttcaagtaagtagtgttgtgaggggaatacctacttgtactttccccccaaaccagattcccgaggcttcttaaggactcaaggacaatttctaggcatttagcacgggactaaaaaggtcttagaggaaataagaagcgccaaaaccatctctttgcactgtatttcaacccatttgtccttctgggttttgaaggaacaggtgggactggggacagaagagttcttgaagccagtttgtccatcatggaaaatgagataggtgatgtggctacgtcagggggcccgaaggctccttgttactgatttccgtcttttctctctgccttttccccaagggccaggacccctggatctctgggcagagcagacgcaggcccctataatagccctcatgctagaarggagccrgagcctgtgtataaggccagcgcagcctactctggacagtgcagggttcccactctcccaactccccatctgcttgcctccagacccacattcacachcgagccactgggttggaggagcatctgtgagatgaaacaccattctttcctcaatgtctcagctrtctaactgtgtgtgtaatcaggccaggtcctccctgctgggcagaaaccatgggagttaagagattgccaacatttattagaggaagctgaygtgtaacttctctgaggcaaaatttagccctcctttgaacaggaatttgactcagtgaaccttgtacacactcgcactgagtctgctgctgatgatactgtgcaccccactgtctggsttttaatgtcaggctgttcttttaggtatggcggcttttccctgggtgtcagtaatactcaagcacttcctccgagtcaagaagttaatgatgccaycaaacaaatgaagaaacacctaaagctggccaaggtaaaatatctatcgtaagatgtatcagaaaaatgggcatgtagctgctgggatataggagtagttggcaggttaaacggatcacctggcagctcattgttctgaatatgttggcatacagagccgtctttggcatttagcgatttgagccagacaaaactgaattacttagttgtacgtttaaaagtgtaggtcaaaaacaaatccagaggccaggagctgtggctcatgcctgtaatcctagcactttgggaggccgaagcgggtggatcacttgaggtcaggagttcgagaccagcctggcctacatgacaaaaccccgtatctactaaaaatacaaaaaaattagctgggcttggtggcacacacctgtaatcccagctacttgggaggctgaggcaggagaattgcttgaaccctgtaggaagaggttgtagtgagccaagatcgcaccgttgcactccagcctgggcaacaagagcaaaactccatctcaaaaaacaaattaaatccagagatttaaaagctctcagaggctgggcgcggtggcttacacctgttatcccagcattttgggatgccraggcgggcaaagcacaaggtcaggagtttgagaccagcctggccaacatagtgaaaccctgtctytgctaaaaacatagaaaaattagccgggcatggtggcgtgcgcctgtaatcccagctactcgggaggctgaggtgagagaattrcttgaacccgggaggcggaggttgcagtgagcccagattgcaccactgcactccagcctgggcgacagagcaagactccatctcaaaaaaagctctcagaacaaccaggtttacaaatttggtcagttggtaaataaactgggtttcaaacatactttgctgaaayaatcactgactaaataggaaatgaatctttttttttttttttttaagctggcaagctggtctgtaggacctgataagtactcacttcatttctctgtgtctcaggtttcccatttttaggtgagaattaaggggctctgataaaacagaccctaggattgtggacagcagtgrtagtcctagagtccacaagtctgcttttgagtgatgggcccatgtatctggcacatctgcaggcagagcgtggttctggctcttcagatgatgccggtggagcactttgaggagtcctcaccccaccgtgataaccagacattaaaatcttggggctttgcatcccaggatttctctgtgattccttctagacttgtggcatcatggcagcatcactgctgtagatttctagtcacttggttctcaggagccgtttatttaatggcttcacatttaatttcagtgaacaaggtagtggcattgctcttcacagggccgtcctgttgtccacaggttccagattgactgttgccccttatctatgtgaacagtcacaactgaggcaggtttctgttgtttacaggacagttctgcagatcgatttctcaacagcttgggaagatttatgacaggactggacaccanaaataatgtcaaggtaaaccgctgtctttgttctagtagctttttgatgaacaataatccttatgtttcctggagtactttcaactcatggtaaagttggcaggggcattcacaacagaaaagagcaaactattaactttaccagtgaggcagtacggtgtagtgtagtgattcagagaatttgctttgccaccagacataccaggtaaccttgactaagttacttaacctatctaaacctcagttycctcatctgtgaaatggagacagtaatcatagctatttccaaactgttgtgagaattcaatgagttaaaggtataaggtcctcaccacagcgcctgcccacatagtcagtgatcactatgtcctgaacactgtaattacttcgccatattctctgatcatagtgttttgccttggtatgtgactagaatttctttctgaggtttatgggcatggttggtgggtatgcacctgcctgcaggagcccggtttgggggcattaccttgtacctggtatgttttctttcaggtgtggttcaataacaagggctggcatgcaatcagctctttcctgaatgtcatcaacratgccattctccgggccaacctgcaaaagggagagaaccctagccattatggaattactgctttcaatcatcccctgaatctcaccaagcagcagctctcagaggtggctcygtaagtgtggctgtgtctgtatagatggagtggggcaagggagagggttatggagaaggggagaaaaatgtgaatctcattgtaggggaacagctgcagagaccgttatattatgataaatctggattgatccaggctctgggcagaagtgataagtttacgaattggctggttgggcttcttgaactgcagaagagaaaatgacactgatatgtaaaaatcgtaacatttagtgaattcatataaagtgagttcaaaaattgttaattaaattataatttaattataagtgtttaatcagtttgatttgtttaaaaaccactgttttaaatttggtggaatatgtttttattagcttgtatctttaattcctaaattaagctgtgtgtgtgtgtgtgtgtgtgtgtgtgtgtgtgtgtgtgtgtgaagtttaaagccaggatgagctagtttaaagtatgcagcctttggagtcatacagatctgggtttgaatctggtctctaaactttatagatgtatgatattaaatgaggcagttcatgtaaattgccaagcccagcactcagcacagagttgatatttcacacacattagatacctttcctgtatgtggagcatggcagttcctgtttctgctttactcctacaggatactaatataggacactaggatctttataccaagaccccatgtaatgggcttatgagaccattcttcttataaaaatctgacagaatttttgtatgtgttagatcaataggctgcatactgttattttcaagttgatttacagccagaaatattaatttatttgagtagttacagagtaatatttctgctctcatttagttttcaagccccactagtcctttgtgtgtgaaaatttacaacttactgctcttacaaggtcatgaacagtggaccaaagtgaatgccattaaccactctgacttccttcattagttttattgtgacagtggactcttttgacctcagtaataccagtttggcatttacattgtcatatttttagacttaaaaatgatcatcttaaccctgaataaaatgtgtctggtgaacagatgtttttccttgggctgtgcctcagatatctctgtgtgtgtgtacgtgtgtgtttgtctgtgtgtccatgtcctcactgattgagccctaactgcatcaaagacccctcagattttcacacgctttttctctccaggatgaccacatcagtggatgtccttgtgtccatctgtgtcatctttgcaatgtccttcgtcccagccagctttgtcgtattcctgatccaggagcgggtcagcaaagcaaaacacctgcagttcatcagtggagtgaagcctgtcatctactggctctctaattttgtctgggatatggtaaggacacaggcctgctgtatctttctgatgtctgtcagggccatggattgayatggataagaaagaaagagctctggctatcatcaggaaatgttccagctactctaaagatgtatgaaaaagaaatagccagaggcaggtgatcactttcatgacaccaaacacagcattgggtaccagagttcatgtcacaccagagggaaaattctgtacacaatgatgaaaattaataccactaccacttaagttcctatgtgacaactttcccaagaatcagagagatacaagtcaaaactccaagtcaatgcctctaacttctctgatgggttttaacctccagagtcagaatgttctttgccttactaggaaagccatctgtcatttgaaaactctgtacattttatcagcagcttatccatccattgcaaatatgtttttgtgccagccacaatatattgcttctatttggaccaatatgggggatttgaaggaattctgaagttctaattatatttcaactctactttacaatatctccctgaaatatatctccctgtaacttctattaattataagctacacagagcaaatctaattcttctcccaccgaacaagtccctggatatttaaaaataactctcatactctcatttaacctgagtattacccagataagatgatatatgagaatacaccttgtaacctccgaagcactgtacaaatgtgagcaatgatggtggagatgatgatgagatctttgctgtttataccaagccccttagactgtgtcactcttctgatccggttgtccttgtatggccatgctgtatattgtgaatgtccgttttcaaaagcaaagccaagaattaaccttgtgttcaggctgtggtctgaatggttatgggtccagagggagttgatctttagctcacacttctattactgcagcacaaagattttgcattttggaaggagcaccgtcttactggcaacttagtggtaaaccaaaacctccatttcacacaaatgattgtgaaattcgggtctccttcattctatacaaattcatttgatttttttgaaactaaactttatatttatccatattaaattacatgggttttatttttgttttatcttgattcagtaattactcctttcagtaaacacagactgagtgctgtgtgtctgacttatgccaggcataggtgattcagagatgaaaggtcaagtccctgaacccatctcttgtcttcctgggtattatctgtccctccctgctttagagctcctgaaatttgctagaagcatgtcttcatctaagttgttgataaacacatcaagtaggattggactgaggcagagccctgtagtctgaagctgcagttcttctagcggctgacaagccccactatcacttccctgctggtgctttgctctgccagctgtgaattctcataattgtcctatcgtcaagtctttatttctgcattttactgcttgatacactgtcaggacagactttaaaattattctcagtgcgatgaaacaattctgacattcatgttatgagcagttacctcataaatagattacatgtgagattgaacttgggcagactataatatagcattaatgaygaaacagacacagtcatcttcgggaagaagaatagaggcttatttgctgcctgtgaaattaaaattactctgactgggaatccatcgttcagtaagtttactgagtgtgacaccttggcttgactgttggaaagacagaaagggcatgtagtttataaaatcagccaargggaaaatgcttgtcaaaatgtattgtcgggtattttgattaatagtttatgtggcttcattaattcagagttactctccaatatgtttatctgccctttcttgtctgataatggtgaaaactygtgtgatgcattgtatatttgatttaggggtgaactggatgtctttgttttcacttttagtgcaattacgttgtccctgccacactggtcattatcatcttcatctgcttccagcagaagtcctatgtgtcctccaccaatctgcctgtgctagcccttctacttttgctgtatgggtaagtcacctctgagtgagggagctgcacagtggataaggcatttggtgcccagtgtcagaaggagggcagggactctcagtagacacttatctttttgtgtctcaacaggtggtcaatcacacctctcatgtacccagcctcctttgtgttcaagatccccagcacagcctatgtggtgctcaccagcgtgaacctcttcattggcattaatggcagcgtggccacctttgtgctggagctgttcacygacaatgtgagtcatgcagagagaacactcctgctgggatgagcatctctgggagccagaggacagtgtttaattgtgatcttattccacytgtcagtggtattgacactgctgactgccttgtcctgtcttcagagtctgtcttccctgagaaggcaaagcacctttctttcttgctgtgccttacattttgctggtcaagcctttcagtttcttttgacagttttttttacttctttcttttttcaatgttgctcttaccaagagtagctcctctgccttccactttacacatgagagctgggcgacgccattcagtcctaaggcttttaccatcacctctcttggtgtttttattgtcatctctaagatcaatgcctttagccttgatcataaccttgaactctaatctcaaattctcacttgcctagtggattgctccatttagatagtatatagataccccaacctggayatgtcctagttttctttccccttggaacttaatgcttttcttgccatccctgtcacactcagtggcactaccatccactcggttgcccaagctggctcttagagttatcctagatgcttgctttgctgttgcagatttcccacattcaactggttatgttgtcagttcttccaggtatggacctctaaaataaggcttcctctccattccggttgtcattgcctttgtccaaacacagcacacaaggccttttacagttgcacaactcttcytgtccatacccaccacaccctttcccagctgtaagcttcagatgagttgcctccaaccaccatgctcctgtaggcctggcttgaaatgcccttcttctgtcacagggtctggtagtatatcccttgcccttcaagatttagctaaaatgtgaagctttccttacctgctgggaggtgttctctcttttctctgtgctctcagagtccttagtccatgcctccagtacaacgtacatccacttacatggtaatttcctgtttacatacttttcctactyggagtggagtctgtttcttaataattttgcctctcccatgccctagcacagtgcatccagcgtatagccccttattcagttggtagatatttggccactgttgccttgtgggatcataagttctgatgtatttgagaagaatttctaaaattctgacaaaatcctgaaactcaaatattgacccagacatgagcaatttgcttttcaaatgctaagggatttttaatggatttgctttaattaaatctagcctgtttctaagctttattcattatttctccatactcagagcatttctccagattttctaaagaatagaattttattgctacatatcatcagctatgcctgctgctatttaattggtatctgaattaaaaggtctggtttgtccctagagaatcaaattttttcttcactcccatatttcagaacttgatacatttttaggataaaccatgaatgacacccgtttcttctccctcaccctcccttccctcccattttttttttttttttttagaagctgaataatatcmatgatatcctgaagtccgtgttcttgatcttcccacatttttgcctgggacgagggctcatcgacatggtgaaaaaccaggcaatggctgatgccctggaaaggtttggtgagtgaagcagtggctgtaggatgctttaatggagatggcactctgcataggccttggtaccctgaactttgttttggaaagaagcaggtgactaagcacaggatgttcccccacccccatgcccagtgacagggctcatgccaacacagctggttgtggcatgggttttgtgacacaaccatttgtctgtgtctctgatagcattgagaaaagtgaaagggcagttttgaaggtaaggaaaatagtgkyatttgcttggatccactggctcatgccactgtctgggttggttagaagcactggaaaagtcaaaccataactttgagaattaggtgatcagggaatcagaaggaaagatgcaaactttggctcttttaggcgaatcatgtgcctgcagatgaggtcatttattatcttttacacagtctataaaattataatgtattacatctttttctacctttagaatggttaaaaatatttctccggtagccatatgattattattcatccattagataatatagtcaaatgggccatgttatttactgttcatagaagaggggctttttgcaacttgggctacaaaggagatatgtaaggaatttaaggaatggttacatggaactagatttaattgaatctagtggtttaattgattcactaggatatatgctactgaaaggggaatctgcttaaagtgctttctgatatttattattactaaaacttagaatttattaaaaatactgactgtgaaaattacttgggtcgtttgcctttttaaaaggatttttggcatgtctcattaaaaaaagaaatactagatatcttcagtgaagttacaaatcgaatacacattggctctgaaattctgattgatactgggtcataaaaagttttcccaaatcagacttggaaagtgatcactctcttgttactcttttttccttgtcatgggtgatagccatttgtgtttattggaagatcggtgaattttaaggaacataggcccaaatttgaggaagggccatggtttttgatccctccattctgaccggatctctgcattgtgtctactaggggagaatcgctttgtgtcaccattatcttgggacttggtgggaygaaacctcttcgccatggccgtggaaggggtggtgttcttcctcattactgttctgatccagtacagattcttcatcaggcccaggtgagctttttcttagaacccgtggagcacctggttgagggtcacagaggaggcgcacagggaaacactcaccaatgggggttgcattgaactgaactcaaaatatgtgataaaactgattttcctgatgtgggcatcccgcagcyccctccctgcccatcctggagactgtggcaagtaggttttataatactacgttagagactgaatctttgtcctgaaaaatagtttgaaaggttcatttttcttgttttttcccccaagacctgtaaatgcaaagctatctcctctgaatgatgaagatgaagatgtgaggcgggaaagacagagaattcttgatggtggaggccagaatgacatcttagaaatcaaggagttgacgaaggtgagagagtacaggttacaatagctcatcttcagtttttttcagctttatgtgctgtaacccagcagtttgctgacttgcttaataaaagggcatgtgttcccaaaatgtacatctataccaaggttctgtcaattttattttaaaaacaccatggagacttcttaaagaattcttactgagaattcttttgtgatatgaattcccattctcgaatacattggttttatatgcttacatttatgtgttagttattaaaacatactaatattgtatatctagtcaaaactgaggtagagagaataaatggttgattttgagtttgagtttcatagtccaaaaagctgatatattgcctgtgttcaagagggtctatatcagccctctagatgccagcatctccaaattttacttttttggaatctgtacagtatttgcaatatttttattacaaatttctactctgtggaatttaatttttaaaatacctgcaatacatatatatgttgaatagatgaaaaattatgtagatrataatgaatgatrcggttctaaaaagacaggttaaaaagtaagttcacttttattttgagcttcagaatcattcagaagccagtcgccacaaacgcagaccaaggctcttggcacatyaaatatgcctatggcttagggttattgacaagtcttatgttgcagtgtatgtggtttatagtcctgccttccacagttgcttgggagagctgtgagtcactgaggcttatgaatgtttacattttgtttgttgcagatatayagaaggaagcggaagcctgctgttgacaggatttgcgtgggcattcctcctggtgaggtaaagacactttgtctatattgcrtttgtccctattagttcagactatctctacccaatcaagcaacgatgctcgttaagaggtaaaagtggattttaaaggcttctgtatttatgccaggatggagcaattagtcatcgagaagaragggaccctgtatgtcaagagaatgatttcagagaatccaatacaatttaagaaaaagcatggggctgggcgcagtgattcactcctgtaatcccagcactttgggaggccgaggtgggcggatcacgaggtcaggagattgagaccatcctggccaacatggtgaaaccccatctctactataaatacaaaaattagctgggcatagtagtgcattcctgtagtcccagctactcgggaggctgaggcaggagaattgcttgaacctaggagggggaggttgcccagattgcgctgctgcactccagcctggtgacagagtgagactcatgtcaacaacaaaaacagaaaaagcacgcacatctaaaacatgcttttgtgatccatttgggatggtgatgacattcaaatagttttttaaaaatagattttctcctttctggtttccgtttgtgttcttttatgcccttttgccagagtaggtggtgcaatttggctagctggctttcattactgtttttcacacattaactttggcctcaacytgacaactcaaataatatttataaatacagccacacttaaaatggwcccattrtgaaatacatatttaaatatctatacgatgtgttaaaaccaagaaaatatttgattcttctctgatatttaagaattgaaggtttgaggtagttacgtgttaggggcatttatattcatgtttttagagtttgcttatacaacttaatctttccttttcagtgctttgggctcctgggagttaatggggctggaaaatcatcaactttcaagatgttaacaggagataccactgttaccagaggagatgctttccttaacaaaaataggtgagaaaagaagtggcytgtattttgctgcaaagactttgtttttaatttatttaaagaaataggttgttatttttgattacagtggtatttttagagttcataaaaatgttgaaatatagtaaagggtaaagaagcacataaaatcatccatgatttcaatatctagagataatcacaatttacatttcctttcagtctcattctcttcttttaacagctttattcaggtataatttacatacaatataatttgcttgttttttaagagtataatttagtgatttttggtaaattgagagttttgcaaccatcaccacaatccagttttagaacttttccatcaccccacatctgtcttatatacacatataaatgtgccatacaattgagatcatactgtatgtagaatttaaaattagtttttattgttaatgagtgtattatgaatatttcccagtgggttacatttcctaagatgtggaattttacattgctacataaaatycccctatgtacatgtacctataatttatttaataaattccttataaatgttggacacattagtttccatttttcrctatgtaaatatgtccctgtatacatcttttattatttcctcaggaacaattcctacaaagtaaattgccctctctaaagagcatacaaattgactgagccaccgttaggccattttctgagactgcacaggtcacaaagcaatctgatctttgggaatacagctacattttataggcttcttagataatgttactctaagtactttaaatatgtggggcttctctgggcttttttttttttgagacggagtttcactcttactgcccaggctggagagcaatggcgcgaccttggctcactgcaacctccgcctcccaggttcaagcgattctcctgcctcagcctcctgagtagctgagattacaggtgcccgccacaatgcctgcctaatttttttgtattttcagtagagatggggtttcaccatgttggccagactggtctcgagctcctgacctcaggtgatccacctgcctcagcctcccaaagttctgggattacaggcatgagccactgcgcccggcttctctggacttattatgtggagagatagtacaaggcagtggctttcagagttttttgaccatgaccgttgtgggaaatacattttatatctcaacctagtatgtacacacagacatgtagacacatgtataacctaaagtttcataaagcagtacctactgttactaattgtagtgcactctgctatttcttattctaccttatactgcgtcattaaaaaagtgctggtcatgacccactaaatttatttcccaaaccactaatgaacaatgactcacaatttgaacacactggacagggggatagccaataaaattgaaaagagcaaggaaattaatgtattcatgatctcctctcctgtctcttacatttttgcagtagcaatgtaaaggaatcctaagagaacagacattctgggaatagcaggcctagcgctgcacaactgctttcctaggcttgctcctagtaccaagctcctgacgcatatagcagtggcagtaataaccagcccatagtaaggtttgtcacagggactggttgtaagaactgatttgrttggtatagctgtgagggcctggcacggtgtccacgtgtgcctcaatcctaattctgaaaaaggctgaccctgggggtgctaattagatacacagagaggaatgaatgctgccagaaggccaagttcatggcaatgccgctgtggctgaggtgcagtcatcagtctggaacgtgaacactgaacttctctcacatgtgattcttcacttgactggcttcatagaaccccaaagccaccccaccaccacataaattgtgtctctaggttctgtgttgctcacactcaaaatktctgggccttctcatttggtgcatgtgaatggtgcatatgagtgaagtctaggatggggccttagcrttaaagccctggggtagtgtgactgagattgttggtaaagaatgtgcagtggttggcatgacctcagaaattctgaaatgggactgcacctgcagactgaagtgttcagagagccagggaggtgcaaggactggggagggtagaggcaggaaccctgcctgccaggaagagctagcatcctgggggcagaaaggctgtgctttcaagtagcagcagatgtattggtatctttgtaatggagaagcatactttacaggaacattaggccagattgtctaaccagagtatctctacctgcttaaaatctaagtagttttcttgtcctttgcagtatcttatcaaacatccatgaagtacatcagaacatgggctactgccctcagtttgatgccatcacagagctgttgactgggagagaacacgtggagtyctttgcccttttgagaggagtcccagagaaagaagttggcaaggtactgtgggcacctgaaagccagcctgtctcctttggcatcctgacaatatataccttatggctttyccacacgcattgacttcaggctgtttttcctcatgaatgcagcagcacaaaatgctggttctttgtatctgctttcagggtggaaacctgtaacggtggtggggcagggctgggtgggcagagagggagtgctgctcccaccacacgagtcccttctccctgctttggctcctcaccagttgtcaggttatgattatagaatctagtcctactcagtgaaagaactttcatacaygtatgtgtaggacagcatgataaaattcccaagccagaccaaagycaaggtgctttttatcactgtaggttggtgagtgggcgattcggaaactgggcctcgtgaagtatggagaaaaatatgctggtaactatagtggaggcaacaaacgcaagctctctacagccatggctttgatcggygggcctcctgtggtgtttctggtgagtataactgtggatggaaaactgttgttctggcctgagtggaaaacatgactgttcaaaagtcctatatgtccagggctgttgtatgattggcttgtcttcccccagggacagcagagcaaccttggaaaagcagagggaagcttctcccttggcacacactggggtggctgtaccatgcctgcagatgctcccaaatagaggcactccaagcactttgtttcttagcgtgattgaggctggatatgtgatttgatctttctctggaacattctttctaatcatctttgtgttcattccctgaaaatgaagagtgtggacacagctttaaaatccccaaggtagcaactaggtcatagttccttacacacggatagatgaaaaacagatcagactgggaagtggcccttgaccttttttcttctgtagataagagcattgatgttattacgggaagaagcctttgaggcttttatgtattccacctcggtctggaatttgtttctgtaaggctaacagttgcaatatactagggtaatctgagtgagctggaattaaaaaaaaaaaggaatttcaccccaatcttatactgacttcaatagagstttcagacaaaaagttgttttgtatatacttatcagtcatgaaaagataattacaactaaatggcctttttccttccctatttatytggagaaatttaattacataaaaaagtactcagaatatttgagtttcctgcatcaataagacatttataataatgaccttgtttacaaatgaatttgaaagttactctaattctttgattcatcaagaaataactagaatggcaagttaaaatttaagctgtttcaaagatgcttctgcatttaaaaacaaatttatctttkattttttttccccycagcaaataagacttattttattctaattacaggatgaacccaccacaggcatggatcccaaagcccggcggttcttgtggaattgtgccctaagtgttgtcaaggaggggagatcagtagtgcttacatctcataggtccgtagtaaagtcttgggttcctcactgtgggatgttttaactttccaagtagaatatgcgatcattttgtaaaaattagaaaatacagaaaagcaaagagtaaaacaattattacctgaaattatatatgcatattcttacaaaaatgcaagcccagtataaatactgctctttttcacttaatatattgtaaacattattccaagtcagtgcatttaggtgtcatttcttatagctggatagtattccattaggatatactcttatttaactattcccccttttgtagacatttggattatttccaacttgttcacaattgtaaacaccactacactgaacagcatcatccctatatccacatgtacttgtaacagaatacaattccctaggaagctggaatgctggaagtcatggtgatgttctcatggttacagagaatctctctaaaactaaaacctctttctgttttaccgcagtatggaagaatgtgaagctctttgcactaggatggcaatcatggtcaatggaaggttcaggtgccttggcagtgtccagcatctaaaaaataggtaataaagatartttctttgggatagtgcctagtgagaaggcttgatatttattcttttgtgagtatataaatggtgcctctaamataaagggaaataaaactgagcaaaacagtrtagtggaaagaatgagggctttgaagtccgaactgcattcaaattctgtctttaccatttactggttctgtgactcttgggcaagtkacttaactactgtaagagttagtttccctggaagatctacctcctagctttgtgctatagatgaaatgaaaaaaatttacatgtgccagtactggtgagagcgcaagctttggagtcaaacacaaatgggtttgcatcctggccctaccaattatgagctctgagccatgggcaagtgactaactccctgggcctcagtttctctgtaacatctgtcagacttcatgggtccaggtgaggattaaaggagatcatgtatttacagcacatggcatggtgcttcacataaaataagtatttagtaaatgataactggttccttctctcagaaacttatttctgggcctgccaggggccgccctttttcatggcacaagttgggttcccagggttcagtattcttttaaatagttttctggagatcctccatttgggtattttttcctgctttcaggtttggagatggttatacaatagttgtacgaatagcagggtccaaccyrgacctgaagcctgtccaggatttctttggacttgcatttcctggaagtgttctaaaagagaaacaccggaacatgctacaataccagcttccatcttcattatcttctctggccaggatattcagcatcctctcccagagcaaaaagcgactccacatagaagactactctgtttctcagacaacacttgaccaagtaagctttgagtgtcaaaacagatttacttctcagggtgtggattcctgccccsacactcccgcccataggtccaagagcagtttgtatcttgaattggtgcttgaattcctgatctactattcctagctatgctttttactaaacctctctgaacctgaaaagggagatgatgcctatgtactctataggattattgtgagaatttactgtaataataaccataaaaactaccatttagtgagcacctaccatgggccaggcattttacttggtgcctaatcctatttaaattagataaaaaagtaccaaataggtcctgacacttaagaagtactcagtaaatattttcttccctcttccctttaatcaagaccgtatgtgccaaagtaaatggatgactgagcagttggtgatgtaggggtggggggcgatatagaaagtcartttttggccgggcgtggtggctcatgcctgtaatcccagcactttgggaggctgaggagcaggcagatcatgaggtcaggagatccagataatcctggccaacagggtgaaaccccgtctctactaaaaatacaaaaattagctgggcatggtggtgcgcacttgtagtcccagctacttgcgaggctgaggcaggagaattgctygaacccaggaggtggaggttacagtgagccaaggtctcgccactgcactccagcctggggacagagcaagaccccatttcaaggggggaaaaaaagtctatttttaagttgttattgcttttytcaagtattcttccctccttcacacacagttttctagttaatccatttatgtaattctgtatgctcctacttgacctaatttcaacatctggaaaaatagaactagaataaagaatgagcaagttgagtggtatttataaaggtccatcttaatcttttaacaggtatttgtgaactttgccaaggaccaaagtgatgatgaccacttaaaagacctctcattacacaaaaaccagacagtagtggamgttgcagttctcacatcttttctacaggatgagaaagtgaaagaaagctatgtatgaagaatcctgttcatacggggtggctgaaagtaaagaggaactagactttcctttgcaccatgtgaagtgttgtggagaaaagagccagaagttgatgtgggaagaagtaaactggatactgtactgatactattcaatgcaatgcaattcaatgcaatgaaaacaaaattccattacaggggcagtgcctttgtagcctatgtcttgtatggctctcaagtgaaagacttgaatttagttttttacctatacctatgtgaaactctattatggaacccaatggacatatgggtttgaactcacacttttttttttttttttgttcctgtgtattctcattggggttgcaacaataattcatcaagtaatcatggccagcgattattgatcaaaatcaaaaggtaatgcacatcctcattcactaagccatgccatgcccaggagactggtttcccggtgacacatccattgctggcaatgagtgtgccagagttattagtgccaagtttttcagaaagtttgaagcaccatggtgtgtcatgctcacttttgtgaaagctgctctgctcagagtctatcaacattgaatatcagttgacagaatggtgccatgcgtggctaacatcctgctttgattccctctgataagctgttctggtggcagtaacatgcaacaaaaatgtgggtgtctccaggcacgggaaacttggttccattgttatattgtcctatgcttcgagccatgggtctacagggtcatccttatgagactcttaaatatacttagatcctggtaagaggcaaagaatcaacagccaaactgctggggctgcaagctgctgaagccagggcatgggattaaagagattgtgcgttcaaacctagggaagcctgtgcccatttgtcctgactgtctgctaacatggtacactgcatctcaagatgtttatctgacacaagtgtattatttctggctttttgaattaatctagaaaatgaaaagatggagttgtattttgacaaaaatgtttgtactttttaatgttatttggaattttaagttctatcagtgacttctgaatccttagaatggcctctttgtagaaccctgtggtatagaggagtatggccactgccccactatttttattttcttatgtaagtttgcatatcagtcatgactagtgcctagaaagcaatgtgatggtcaggatctcatgacattatatttgagtttctttcagatcatttaggatactcttaatctcacttcatcaatcaaatattttttgagtgtatgctgtagctgaaagagtatgtacgtacgtataagactagagagatattaagtctcagtacacttcctgtgccatgttattcagctcactggtttacaaatataggttgtcttgtggttgtaggagcccactgtaacaatactgggcagcctttttttttttttttttaattgcaacaatgcaaaagccaagaaagtataagggtcacaagtctaaacaatgaattcttcaacagggaaaacagctagcttgaaaacttgctgaaaaacacaacttgtgtttatggcatttagtaccttcaaataattggctttgcagatattggataccccattaaatctgacagtctcaaatttttcatctcttcaatcactagtcaagaaaaatataaaaacaacaaatacttccatatggagcatttttcagagttttctaacccagtcttatttttctagtcagtaaacatttgtaaaaatactgtttcactaatacttactgttaactgtcttgagagaaaagaaaaatatgagagaactattgtttggggaagttcaagtgatctttcaatatcattactaacttcttccactttttccaraatttgaatattaacgctaaaggtgtaagacttcagatttcaaattaatctttctatattttttaaatttacagaatattatataacccactgctgaaaaagaaaaaaatgattgttttagaagttaaagtcaatattgattttaaatataagtaatgaaggcatatttccaataactagtgatatggcatcgttgcattttacagtatcttcaaaaatacagaatttatagaataatttctcctcatttaatatttttcaaaatcaaagttatggtttcctcattttactaaaatcgtattctaattcttcattatagtaaatctatgagcaactccttacttcggttcctctgatttcaaggccatattttaaaaaatcaaaaggcactgtgaactattttgaagaaaacacaacattttaatacagattgaaaggacctcttctgaagctagaaacaatctatagttatacatcttcattaatactgtgttaccttttaaaatagtaattttttacattttcctgtgtaaacctaattgtggtagaaatttttaccaactctatactcaatcaagcaaaatttctgtatattccctgtggaatgtacctatgtgagtttcagaaattctcaaaatacgtgttcaaaaatttctgcttttgcatctttgggacacctcagaaaacttattaacaactgtgaatatgagaaatacagaagaaaataataagccctctatacataaatgcccagcacaattcattgttaaaaaacaaccaaacctcacactactgtatttcattatctgtactgaaagcaaatgctttgtgactattaaatgttgcacatcattcattcactgtatagtaatcattgactaaagccatttgtctgtgttttcttcttgtggttgtatatatcaggtaaaatattttccaaagagccatgtgtcatgtaatactgaaccactttgatattgagacattaatttgtacccttgttattatctactagtaataatgtaatactgtagaaatattgctctaattcttttcaaaattgttgcatcccccttagaatgtttctatttccataaggatttaggtatgctattatcccttcttataccctaagatgaagctgtttttgtgctctttgttcatcattggccctcattccaagcactttacgctgtctgtaatgggatctatttttgcactggaatatctgagaattgcaaaactagacaaaagtttcacaacagatttytaagttaaatcattttcattaaaaggaaaaaagaaaaaaaattttgtatgtcaataactttatatgaagtattaaaatgcatatttctatgttgtaatataatgagtcacaaaataaagctgtgacagttctgttggtctacagaaatttacttttgtgcatttgtggcaccacctactgttgaagggttataaagccattagaaaagtagaggggaagtgatttggatcaaaaggaaaaactttagaaaagattcaaatgttcccttaatcataaaagagaactgaggggactacttgaaaataaaaggttgttttgtattttcatgttggttaagatactgagtaactggtattaagtgttagaggtttttagataaatattctgcttaatgattatgaagctgcactgagatttctgaaaatgctctgtagctgagcttatttaataaatgttcacttggtataggggaagctacaaaggcagccttcagtgtccttttgtttattcaaccaaaaatataaggacacaatgtagcagttatactgggaaggtgctgggggtggtggcaatggtgagcaggaaggcgaagtagatatggaaacagaaatgatactaatatcggtgattccttccttttttcctgtaataagtgctgtgcagacaacatatgagcagtgctgataaatgtaaatgtatttttcatagctcattaagaatcagtttcagaaagagatgtctgcttattttgctacttgaagaatccctgtcaaacagtccttttgaggaagtacaagaggctgtctctatttgtgacctcaggaatggctgtgacagtgtcgtgagcagtccttttcctgtggcacagatctgaactttgtgtgcagaaaaatcttggcttcaagtgagccaagatgccccctgagcatcagcatcacaacttcatcctcctatcttgaagttcatgttatagtgactttaatgaaatcatagaacactgtttcttcgtgaacaatgacgagggagaggaaaaaactttattgaaaaataaaaaggcaggtaatttagatgaaaatatgttacccatgaggttttgtttttgctttttgtttttgtttttgagaaacagaatctcgctctgtcgtccaggctggagtgcagcggcatgatcttggctcactgcaacctccgcctcccgggttcaagcgattctcctcagcttcccaagtagctggtactacaggcatgcgccaccacaaccagctaatttttgtatttttagtagagatggggtttcactatacgttggccaggctggtctcaaactcctgacctaaggtgatccttctgccttgggctcccaaagtgctgggattacaggcatgagccaccttgcctggccctacccatgagccttgactaaaacattcttctatctgtagaaaagcccaaaagaacttttccagattcaaaaaacttggcactttgtaatggtaatgtttacattaagtaaaaaaaaaaaaaaaacccacttagcttcagttttcaagtgtttactgtgttgtcatgcacttcatttaattctcaacacctgccctatgaggtaaaaagtaccattttacatatgagtaaattacagctcagtggataagaaactcgtccaaaggtacaggttcagtcaagtggcagagggttctttttgttgaagttaggtatcagttaaaattgaccttgtaaaatcacatcagcatcaatatacattaatttaacaaatatttattgaactttactgtatgccagatacttctctaggtactagggggtacaatgtagaagaaaatagaattcctgctctaatgaatttatatttcagtggtgaaagatgatgtgtggacaaacacatctaatgtattttgacagcaatgggtgctaagaagaaaataagacatggtaattggataacaatggagagaagtcagagatggccttttctgaggagtgacatgctcagaatcgaataaaaagagcaggagcagcctttcaaggtgggtgcgaaggatattcccggaagaaagaataagtgttgcaaaagccccagtgggaaaaagcttggcaagctgaggtggtaaaagagctatctgtactaatgtctcttgtactgagttagcaaggacaagagtggcagggggtggaactggagagatagcagggaccacatctcacaggatctcgccagcctttttaaggtatttggattttattgttagtgcaacaaggagccactggagagttttaaacagtagtggtgtgacctactgtttcagaaagaacactggctactatgggaagaaaggacagtaggaagactaatagataatggtggattgaactaagatggtagcaacagatagggagctatggtaatgttcagtatccactttggagatagatccagcaggacttgctgacagactgcatgtaagggctgagggaaagagagctagcaaggtgacttctagtttgtgacctgaactaggtagatggttgtgttaaaaatgcagtgggtatttcagtctgaagctcaggggcaatgatggaaaataagataaatgtgtgcaagytggctgggcgtggtggtgcacgcctataatcacagcactttgggaggccgagacgggtggatcacttgaggtcaggcgtttgcgaccagcctaacatggtgaaaccccatctctaataaatacaaaaaaattagctgggcatggtggtgcatgcctgtaatccaagctacttgggaggctgagacaagagaatcgcttgcacctgggaggcggaggtttcagtgagctgagatcgcaccattgcactccagcctgggcaacaagagcgaaactccatctaaaaaaaaaagtgtgcaagttattggtacgtatatatttaagcctcgggactgaatgagattacctagagagaatgaagatagggaacattcttgagcctgagatcctataacatttagaagagaagctagccagggaaattgagagggactggccagtgagagagagtaaaatctgaagagtataatgccatatgttgaagctcagagaattattgtttcaggaaggcagaagttgtcaattatatccaacattgctgagaagatgagtaaggaatgtaaatgagtaaaggcaggaatggctattgaatttgttaagacagaggtccttggtgaccttcmtaagagtcatttcagcatgacaaggatgcagacctaactggaatagattttcagggaagactgagaggcaaggaaggggagactgcaaatatatgcaaatctatatttttgctttgaagggaaacagaaaacaggacaacagctggtttacagaacttttatttggattctttccttgtctgttaataatataggctgcacctgggcatcatcgtgcccttcctttttgattctgctgttttgcttttaatcctacaggcatttcttctggcaggagccttgtacacactctgggtggttcatgaccaccacggacttgccctttcaaggcagaagcctgtgattcaaaaacttccattccttccaatcgactattataaaactcattttgtctagtgcccatactcctttaccttaggatcctgggccaactgtcactaaagaaaacaaaccatttcctcctcctgggggaatgtgcttctttcaagaaggtgcttagagaatagacattctaggtgacagcagttatgaaagaggtgtctctaatgaacctaacacttcttccaacatactccaggttcaccctcctttgaagacagaaagtactacaacttcagttgccaccctagtcaggttcataggatttactcagtaggttaagagatggtgctgagaatgaagtccagagtttgagtctacaagtggcatttgcttctcctttgggacttctgtggcagggtgtggaaccaaatcagattggttgcatatctgtttctcttcctgaaaatacaattcaaataccttcatagtctgtgacagcaacttataaccaacagacaatggtattatttttatttattgatggcactcccccatagccagaacttctactgagtcattcatcgtgtattccaggaatactttccaaatggagtagtgaggcacttccaataacagttatgtaatctgttaacagtggctcaaaatgacatgtgaaggaatgatgtacttcttttttcagactcacagatctcatatgttaattcagtcaacaagtacttagggcttatcacatgccaggcacaggtaatatgacaataatgaaaacaaaaacccttgctgtcatagaattcggtttctagtgggaagagacatacattaacaaatcatatataagtaaaacattaattatggtgataacagaaaaagaaagcaggggagagggatagtgtcttagttcaggttgctgtaacaagagtaccatagacagggtggcttaaacaacaaacatttctttctcacagatctagtggctgggaagtctaagaccagggtgccagcatgaagaagttctggtgaaggcttacattctggtttcctcacagtgagggctcttcacgcccttataaatgcactaattctattacccacatgacctcatctaaaactaactcacaaaggccaaacctcctatgttgagattaaggcttcaacataggaattttgggggggacaaaaacattcagtctctagcagataggggccactgtgggaggggattacaatcttaaatagggttgtcagggaaggcttcatgagggcaaagacctgaggaggcatggaaatgatccacgcagatgcatgtctggggaagagcattccaggcagaggcagtgggaatggaccctcaggtaagagcatgtttagcaagttcagagaaaagcctcttaggtcaggtctggagcgagagtggaaaatgtaacaggacagatcatgtaaagacttgtagaccacagttagaggcttggacaataactctgaggatgacatgaaggtattgggagggggtgttgagcagaggagtgatatgatctggtttatattttagattattctgactgctatgttgaaaatagggttgagagcagaggggaagggcagcacaccagttaagaccacttcccaaaaatccagatgatgatgggcttgaaccaggagagttgctatagggatgtgaagcaatcaaattctagatatttgggacctgctgacaggtacataatggtgtatgagagaaaaggcagtgtgagaatgactctgaagtctgtggcctgagcaaaacagaaacctggagttgccaatagctgagataaagtttctggttaaagatcaagagctcagttttggacaagaggggtgtgagatttctaatagacattcaggtggaggtgtggggaacacacctggatgtgatgagcctggaattcaaattcacatgtgtgaatttgaaaaaagattcagaaaagaggtgtggactggaggagctatccacacacagatagcatttgaagccacaagactgggggtgatgacgcagggagtaagtataaatagaaaagagaagtggtccaaggactcagtccttacatcagaggtcaaagagacaagatggagactaggagatatgaaggcttgtgcagtgagtgtttcggagaaacgaagaaactttccagaagaaaggagaggtcaactgctaacaagtcaagtgaaatgagaactgggaaatgagttgacaagagcaatttggctggcgtgatcagagaatgtttaagagataatgtgagggaagaaaatggaggcaggaagtatgaactactcttttgagtcatattgtaaaggaaaaaaatggggtgattttactcttttttttttttaaagataggaaaaaaaagtatatttatatgctgaggagaagaatccagttgaaggggaatactgtggcttcaggagacaggaaaactgcctaagccacatccttcagcaagtgagtgttcaagtggagggtttgtctttgcttggggcacgggcggttcatccacagtgaaaggagagaaggca

SEQ ID NO: 6778 - DNA, 85571 bp, Homo sapiens
agtgcagtggcgcgatctcggctcactgcaacctctgcctcctgggttcaagcaattctcctgcctcagcctcccgagtagctgggattacaggcgcccgccaccacgcctggctaagttatgtatttttagtagagatggggtttcatcatgttggccaggatggtctccatctcttgacctcgtgatccatctgcctcggcctcccaaagtgctgggcttacaggtgtgagccactgcactcagccaatgtcttaatgtcttacattaagcatgttttactttttttttttttttaagataggatctcactgtcacccaggctggagtgcagtggcgcaaccacagctcacagcagccttgaactcctgggctcaagtgattctcccacctcagcctcctgagtagctgggactacagttgccaccataccaggctaatttttttttttttttttgtagaggtgggatcttgcccaggcttgtgttaaacactggcctcttcccaaaacattgggattacaaagcatgcacagcatgttttacttgtaaaataaataacagaaagcttaactttttttttttgagacagagtcttgcyctgtcacccaggatggagtgcagtggcgcaatctcggctcactgcaagctctgcctcccgggttcatgccattctcctgcctcagtctctggagtagctaggagtacaggcacccgccaccacgcccggctaattttttgtattttttttttttttttagtggagacggagtttcaccgcattagccaggatggtcttgatctcctgacctcgtgatctgcctgccttggcctcccaaagtgctgggattacaggcgtaagccactgcacctggcccagaaagcttaaatttttttaagtatagtaagtatatgaaacaatggtctacaacattagtcattagtcataagggaaatgtaaaacaaaaccaccatgaaataccgctgcttatcaccagaaaggttaaaattaaaggtctgacaataccaaatgttggcaagaatgtggagcaaaaatgttggcaagaatgtggagcaactggaactctcatacattgtttgtgagggtgtaaaatggtagaaacattttgaaaaagtgtttgacagtttctagtaataagaacacttcctctatgaaccagaaattccactcctagctgtttacccaggagaatgaaaatatgtgtccataaaaagacttgtatacaaatgttcatagcatctttgtttataatagccaaaactggaagtaacccaagtgtccatcagaaggagaatgggtaaacaccttgtggtggatctgtacagtggaaccctaaacagcaataaaagaaacaaactaatacaggcaacaacacgggtcaatcacagacacatagtgtgatgcaaaaaaagctagacacaaaaaaatagattgcattgttctttttttttttgagacagagtttcgctcttgtcacccaggctggagtgcaatggggcaatctcggctcatttcaacctctgcctcccggggtcaagtgattctcctgcctcagcctccggagtaactgggattacaggcatgcgccaccatgcctggctaattctcgtatttttagtagaggcgggttttcaccatgttggtcaggctggtctcgaactcctgacctcaggtgatccacccacctcagcctcccaaagtgctgggattacaggcatgagccaccatgcctggcctgcgttgttctttaattccatttttttttccataagaaatcatatgcaaagagtttaattccatttatagaagttattggctgggcatggtggctggtgcttataatcccagcactttgggaggccgaggcaggaggattgcttaagcccaggagttcaagactggacaacatagtgagaccctgtctgtacaaaaaataaaaaacttagcagggcatgctggtgcatgactatagtcccagctactcgggaggctgagaggatgggaggattgcttgagtctgggaggactgaggtgggaagatcactcaaactggggaggctgagactgcagtgaaccatgattgtgccaccacaatccagcctggttgacagagtgagaccctgtctaaaaaaaaacaaaaattacatatgcatgaaattctataaacttaatataaatggaatgaaactgacttattgtgataagagtcaaaatagttgaagcaatatggcctgaaacaggagagctttctgggtccaggaaatgtttcatgtcttgacccgggtgatggttatacgcctgtatatacagattaaaacctcatcaaggtatgcacaaatgctcacaagtgttttatttgactttttctgttttttgttggtttgttttgttttgtttttgtttttgaaacagcatcttgctctgtcgcccaggctggagtgcagtggcactatctccgctcattgcaacctccgcctcctggattcaagcaattctcctgcctctggagtagctgggactacaggtgcacatcaccacacccagctaatttttgtatttttagtagagatggggtttcgccatgttggccaggctgatcttgagctcctgaactcaagtgatctgccagccttggcctcccaaagtgctgggattacaggcatgagccactgtgccctgccataatgatgagttttttttaaaaagctagataaaaaagagtaatactatattattcaatttctataaaattctagaaaatagcagctaatctatagtgatggaaatcagcatagtggttgcctgagggagggagagagggattacatgggatgagagggagggagggattacatggggagagagggagggagggattacatggggagagagggagggagggattacatgggatgagagggtgggagggattgcatggggagggagggagggattacatagggagagaaggagggaaggattacatggggagagagggagggagggattacatggggagagagggagggagggattacatgggatgagagggagggagggattacatggaacgagaggaagggaaggattacatggggagagagggagggagggattacacagggagagagggagggacggattacatggggagagaggaaactttgggggtgatacatatattcattatcttgactgtggcgatggttctatggatggacacatctgccccaaatcatcaaattttactttttttttgagacggaatttcactcttgtcgcccaggttggagtgcaatggtgcaatctctgctcactgcaacctctgcctcccgggttcaagtgattctcctgcctcagcctcctgagtagctgggattacaggcatgtgccaccacgcctggctaatttttgtatttttagtaaagacggggtttcaccatattggccaggctggtctcaaactcccgacctcaggtgatccacctgtctcggcctcctaaagtattgggattacaggcatgagctgccgtgcctggtcaaattgtacattttgaatgagtgtgggttatctgtcagttatacttacataaagctgccaaaacatttttaaaactcattgcgactggtgcatttgataatatgtaaattaggcttcaacaagtaagagaaaaaggaagaaactgtactcctgagactgtttcccaggctatcacttctagccttgcccaggccccatggatccttcttcctcactcagagaaccccccagagaatttctacaaatcagcacttggcagcccggctggtgcacctggcacacacagctactttcccagtgaatctgttctgtctccgatggcctagttcaaacacctcctcctccaagaagccatcaggcctcgtgccacaccctccctgctggctcaaacctctatcatggccccatccaccttgtaacatcagaatgagaatccagtgcaggctgggcttgggggcacacacctgtaatcccagcattttaggaggctgaggcaggcagatggcttgagtctaggagttcaagaccagcctgggcaattacatctcttaaagaaaaaaaaaaaaaagaattgatgtaggctcttcccatctttcacactagatgctgacaatcatcacgagagagggtagctgccatttgatgagtgggccaggtgccatccgcggatgccctcattgccagcctacaataaccaggagagtggaaattactggctccattttacaaaaaaggatgcccagagtggtgagagccgatccgaggcctcacagctgtaatgaagttgaggaacttycacccgccactgcccactcaccccgagggcggccagaagcttccctgaatgggcagagaggaaggactttgcatcttcaaaactcttcagagttatgcaaagatgcctgacagggaggaaggggagctactttaaggtaaaaggcattcccttgaagatttccagagcagggcatccttggagaaagtaggtagcataggtagaaaaccaggctcggccgagtgcagtggctcacgcctgtaatcccagcactttgggaggccgaggcgggcggatcacttgaggccaggagttcgagaccagcctggccaacatggtgaaaccccatctgtactaaaaatacaaaaattacccgggtgtagtggcatgcacctgtcatcccagttactcgggaggctgaggcacgagaatcacttgaacccgggaagtggaggttgcaatgagctgagatcgcaccactggactccagccgtggctccatctcaaacaaaaacaaaaacaaacaaaaaaaccgacttagcacactgggaagaatttcacaaggtcacagttgttatggtcctctccacgatgtaactggacagcagaggggtctcaggcctggatttgggagtacagagaatatttcatcacccttggcaggaccagccaccttgacaggacacctagcatccctggatttcagacactaaatgccaagaaccctccccttgccccacactcccccactcccacaaacaccagacatagtggcgatgaaaacacctccgtagacacatttccaaatgtcccctaggaggcggcaccatccccgcctcctcactcagggctccctgcacaaatgcgttgggtgatgggggctgaatccagcccacactgcacttgccaagccagctggggccctggcacaagacagtcccagcctgttttcactgactttgctaattctcacggaggcaccatgtggtgtgggaaggcccggtcctcgtaacctctctgctcccaggtccctgaccagtccttaacacacagtggtctttgctcacctgcggcccagctctgggctctccccacagcatcctttgccttgcctccctcccatcttcctctgggccttctctctgctcctgcccaggaaactgtgctctcaggagcgcaggagccagctctcagcccccatctcctgggcactcaccgtactcaggaaatatgttctgaattcaggattatcctcattctactgagaagacctggaggacagaaatcagcaagacctaaaggggagaggaaggagggccaggctggggtggaggtgccccacccgggagcccgggcgcagcctcaccgcargctgattcacagaaggctcagagggttgcgagggcccaatcggcactgtcatcctgcccaggctctgagtcaccagctggtgaggggcagctgcagcccagcaggaaacaaagtctagcatggaagaggtgggagggaggtggtggggcccgaaaccccgcctggctggccttagaggaactgggagtgactgtccggcactggctcagcagcaaacagctctcaaggacgtgctaggagtcaggaactgggccagctccggtcccttccttttggggctctcactctggaggatggggtggatgggaggtaagacttgtgcacaagtccccaggacacaaggcacacggggttcttttttgtttgtttgtttagagaggaggttttgctctgtcactcaggctggagtgcagcagaatgatcatagctcaatgcagcctcaaactcctgggctcaagggatcctcacttcttgacctcccaaagcgtcataggcttaaggcactacagcacccactgacaaggggttctttttctttttcttttcttttcttttttttttttagacggagtttcactcttgtcaccccggctggagtgcaatggcgagatctcgcctcactctcactgcaacctccgcctcccagattcaagcgattctcctgcctcagcctcctgagtagctgggatgacagggccccaccgccatgcccagctaatttttttgtatttttagtagagacggtttcacgatgttggccaggctggtcttgaactcctgagctcagatgatccacctgcctcggtctcctaaagtgctgggattacaggtgtaagccatggcgcctggccacttttttttttttttttttttgagaccaagtctcrctctgttgcccaggctggagtgcagtggctggatcttggctcactgcatcgtctgcctcctgggttcaagggattcctcatgcctcagcctcccggatgggatttcaggcacaggccactacgcccagctaaatttttttttttttttttgagatggagtcttgctctgtctctcaggctggagtgcagtggcgcgatctcagctcactgcaacctccgcctcccagatacaagtgattctcctgcttcagcctcccaagtagatgggatttcaggcacccaccaccacacccagctaatttttttgtgtttttagtagagacagggtttcactgtgttggccaggctggtctcaaattcctgacattgtgagccacctgcctcagcctcccaaagtgctgagattacaagtgtgagccactgtgactggcccaacatttttttttaattaaaaaattaaagccaggtgtagtggtgcatgcctgtagtcccagctactcaggaggctgggtcgggaggattgtttgagcccaggagtttgaggctgcagcaagccatgatcaactcactgcactccagcctgggttacagagcaagaggtcttatccctgaaacaaacaaacaaacaaaaagatatagcagagaagcccattttgtgtttgagaaagagctgaactctaggattggatctggaggatggtgtgggaagcgtggggtattggatctggaggatggtgtgggaagcgtggggtattggatctggaggatggtgtgggaagcgtggggtattggatctggaggatggtgtgggaagcgtggggtattggatctggaggatggtgtgggaagtgtggggtattggatctggaggatggtgtgggaagtgtggggtattggatctggaggatggtgtgggaagtgtggggtattggatctggaggatggtgtgggaagcgtggggtattgcagctctaaagtaggcagagctatgtatgggtctcatcctcatctcttaatttttttggggggagggtggacacagtctcgctctgtcacccaggctgcagtacagtggcgcaatctcggctcactgcaacccctgcctctctggttcaagtgattcttgtgcctcagcctcccgagtagctgggattacagacgtgcaccaccacgcctggctaatttttgtatttttagtagagacgggctttcaccatgttggccaggctggtctcaaactcccgacctcaggtgatccgcccacctcggcctctgaaagtgcgtgagccactgcacctggcctcatctgttactttaaaataaaataacaataaattatttaaaaatagaggctgggcatggtgccttacacctgtaatcccagcactttgggaggccgaggcaggtggatcacaaggttaggagtttgagactagtctggtcaacatggtgaaaccccgtctctactaaaaatacaaaaattagccggacgttgtggcacttggggaggctgaggttgcagtaagctgagatggcgccactacactccagcctggtgacagagcaagactctgtcttgggaaaaaaaaaaatagagacgaggtcttgctatgttgcccaggctggtctcaaactcctgggctcaagcgatcctcctgcctcagcctcccaaagtgttgggattacaggcgtgagccactgtgcctgatctcatcctcatctcttacttatacctcatgaagcctcagttttctctcctgtaaagtgggtgttccccaaaagttgtgaccattcaatgaggcagaagctataaagcactgaactgagcacaggagcctgcaatgaacgggcgcttccattatctttatcatcctgaagttatttctcactccctgcctgtctgctggcacttcagcggccccctgcctgacttcagtgctgttggatccaaccacggaatttgtgcctgggaaggcggtaaggcacccccttcctggaagtttacaagcagaagctctgcacagkagcagaggcccacatgcactatagaasggactttgtaccccatgatgtgtcatggccactgcaggcatgagtgtttcagtataggtctatgaacaaacctgtgaggtcccaaggaccaggtgggtccctcactgtcacgttcccctccagtgcccaggatagtgttctgcacatcatacgtgctccctcaagctcccattgcgactgacgctagtgatgtcatgtcgaaggaggacagtcctggtcctcagagagaaagatytatttaaacagataattgcacacacacaaaatcatgttgaatgtgatgcttgccaygaaggaggagtttaggacactggggagggggtgataataatggcaggcctgacctagtaggggggcagggtgcagaaatgtcctctctgatgaagggtaattagctgaggttgaaggctgaatgctgcttggtggggcaagatgcgggaaaaaaatccatgtttcacacagccaggcacggtggctcacgcctgtaatcccagcactktgggagccaaggcgggcggatcacctgagctcaggagtttgagaccagcctgatcaatatggtgaaaccctgtctctactaaaaataccagaattaaccaggcatagtggcgggtgcctgtaatcccagctactcaggaggctgaggcaggagaatcgcttgagcctgggaggtggaggttgcagtgagcagagatcccgccactgcactccagcctggacgacagagcaagactccatctcaaaagaaaaaaaaaaaaaaaaagggcccagcacagtggctcatgcctgtagtcccagcactttgggaagctggggtgggtggatcacgaggtcaggagttcaagaccatcctggccaagatggtaaaaccccgtctctactaaaaataccaaaattagccaggcgtggtggcaggaacctgtaatcccagctacttgagagtctgaggcagagaattgcttgaacccaggaggctgagtttgcagtgagccgagatcgcaccactgcactccagcctgggtgacagagcgagactccatctcaaaaaaaaaaaaaaaagaatccatatttcataagctgtgaggtgggatggagcagggctagtttgaggatgtgaaatctcagtgtggctagagaatggggaggggaagtggggggagggactggcaggggcccccagtgccatgtctggagtctttctctccaggacagtggaagccacagaaggttagaagtgggggaatggcaaggtcgtatctgtgtttacaacaattcctctggctcccagtgaggaatgcatggggggctggaggcagggaggccagttccctggacttggggtggcagtggagctggggagaggtgacagcttggccactgaaagagtaagagggagtttagcagcctgaggccaggtgacagacggaacaggctgtaagctacggacctttccaccacccaacagttaataaagagaggaggtcygggctgggtgccagggtcccttctgcacaatgggccatgccaactgggtaaacagaggtagatacatgatattccttaaaaacaaaatcctgattcattcacactccttgctgtttactggaggtgtttgttttttttctcctggtctatttcaggtttgacaggtttgtggggagagcagagctgggactccgtgccaactgggagggagarggactcatggggagagaaagggcctctccttcttcctacaggactagcaaggggtcttgggctgggctcctgcggaatgctcttgggcaaattgctttccttctctgagtctcggtccaagctctggctctgaccgtctgaaccctcccttttaaagccaaatattattattcttcgcccttggatccctgcttccaaatatgcttgaggatgtggtgggcaggggaggggcggggcaggtttgcagggaggcagtgggcagaagccacttccagagaaaggcctgatgagtcaggacctgtaggtggcattctctgttcaagaggggcaggcccagcaagtgggcagggagaacctttcctctctgctccagatgtagaccattgccaccctttgtccacagccctggcattttcaaccaggttctggggcctgagccaagaaaagggagtgggagcccctggtgaatagagacagcgtccagagtcttagaaaaagaacagatatccctctgccttgcagatttcagaaatccttgctatagaaagarctcttacaaatcaataagaaaaagatagacattcccacagaaaagcaggcagaggatataaattttaaaaaccacaaatggccaggctgggtacggtggctcatacctgtaatcccagcactttgagaggccaagggaggcagatcacttgtggtcaggagttccagaccagcctggccaacatagcaaaaccccatttccactaaaaatacaaaaattagccaggcgtggtggcaggtgcctgtaatcccagctacttgggaagctgaggcaggagaattgcttgaacccagaaggtaggtagagattgcagtgagcagagatcgtgccactgcactctagcctgggcaacagaacgagaccctgtctcgaaataaacaaaataaaaataaaacccacaaatggccactaaatgtgtgaaaagatgtttccatttactcaaaagtaacaaggggacatcaaaatggcctccagcgtgagggcaggggtttccagcattttagagttgagaaattctctgatgtcaaacttcctggaatccttcatagtgctgatgactatgtttatttttctttccttgaaaaaaaaaaaaaaagggcaaataacttcattccttccccacccaaagactgtaacttttttttattacaataattgatttcttaacatatagtagagagagttgagaaagtttaaagagctttacaatctttccagagtgaaaaaaaaaaacaacaaattctgttctggatgctcaggctgcctccccatctggggtcccaccagtccatgccagggcccacccctccttcactgcaggaagtcctagatcagccatctggcttaggccccacaaggactcaccttgcttccttttgctcacactcacgcctttacctgtcacgccttctctgtgcctacctgttccagtgtttgaacaaggattgctgtatacatacgatggaatatatatacatacgtacatacatatatctataaagagggaaggtctcactctgtcacccaagctggagtgtagcggcgagatcacagcacactgcagcctcaaactcctgggctcaaggtcttcctgctttggcctcctagtagctgggactacaagcatgcaccaccaggcccagctaattttttaaaaaaattatttaacgacggggtctcattctgttgcccatgctcgtctcaaactcctggcytcaagcaatcctcttgcctcagcttcccagagtgctggcattatgagtgtgagccaccgtgctcagcctgaatatcattaaaaaaaaaatcctcgcaacaatttattcaactctaaaatgggctttatcattactaccccagaagctgtgaggacagtaggaggcagaaaagtccttggtgtgacacctggtctgtggtccatctccataaatggcagctcttcctgaaccttcttcaagcaggctccttcttgccaatcaggtcccaaggcatcatctcctcctccttcctagaccactttcctagatggcatcccaccccaaccccacttgtcaccctatcccatcttaatgtttattactctctgaagtcattttatttatttgttgtattttttcataagactataacctctatgaagacgaggaccgtgactttcttgcatactgatttatccccaatacctagaatagcatccaacacatagtaggtgcttgcatgtttattttttcactttaaaataaatggtggctcacacctgtaatcccagcactctgggaggcttaggcgggaggatcccttgagctcaggagttggagaccagcctgggcagcatggtgagatcccatctctatgaaaaacattttttaattagctgggtgtggtaacccaagggtgagattggaggatgccttgagcccaggaggccaaggctgcactgagtccatgtttgcaccactgcactccagcctgggcgacacagagagaccttgtctcaaaaataaaaataaaataaactttgttgaagtataattttgatataataaaatgcatccgtttgatgcatctgtacagtttgataaatttagataaatatgttctcttaccaacacctcagtcaagacataggaccatttttatccccctaaarttccctccagatttttttttgccatcaattctccttcatcccatccctagacaaggcagtttttttttggtgtgaaatgaatgaatcttgaattgtcagggactggccccagatttgcggagagctattcacatgtgtgcatagcaccctactgttcacaatgcctttccactttctgtttttttctttggttttgttttgtttttaatggagtctcactctgtcaccaggctggagtgcagtggcacgatcttggctcactgcaacctctgcctcccgggttcaagcgattcttctgcctcagccttctgagcagctgggactacaggcgcgtgccaccatgcccagctaatttttgcatttttaatagagatggggtttcaccatgttggccagactggtctcagactcctgatctcgtgatctgcctgcctcggcctcccaaaatgctgagattacaggcgtgagccattgcgcccggccgcctttccactttcatctcatgtgcctctcacatatgaggccatggatgctcagatggattaggtgacatgtgacagaaggtctccaaagcaagaggagaccttttggatgctcaagttgcctccccatctggggtcccaccctgggccagggaggaacccgtccctgggccagggaggaacccgtccctgggccaggggcctcacatggtaggcaggctgtgggtgttccaggcttgggtgtgccacgaagcctggggaaaggccactgtggccccatctctaacccccctggcctaggcctccagcccagccaagaagatgcctctggtgtccagatgccagctagctccagctagctcctccctgggcagarcagaccctgcagtttgggctatgagaaaaatgaaaagaggttatcagcatcacttgcttctggttgctcagagagaatcagacactgggtgccaggagacttggcctttggccaggttctccctctgcctcactgtgtgcccttagcaagtcactttccctctctgggcctcagtttccacctctataaaaggaaactagtgatccctaaccagcatgacttcaactccacctgatgatgactctttgacgcatgaatgcatcccggccctcaaaggctgggcccctgcccatgctgtccccactccctggaatgctgtttctcagtatctgctgtcaaaagtcttgtttttcaacttccagttctggtcctaccccctctgtgattttccttaaaacagaatgttctgctccttcctcaagcttctctaagctcttgagggcagggactatgaataatagaatgacacgttctgttcattgagagatgatggaccctggtgccaggcactatgctgggcactttgtgatatcatttaaccctcccgcaaaaagcatcaytctcttttgacagatgaggtagctgaagttcaaaggggtaatgccacttgtccagggtcacagaggggagggcagcttgggcttccttctcttttcacccccagcatctagcagagggcctggcacacaggtgttgaccacccattgctgaatgactggtaagtgactgaatgcatgaatgaatgcctgcatcactttaatccatttcaaacctacctcctgtggtgtgcacaggcctgaagtacaggtgctcagcaaatttaactgttatcatcatcacttcctgccttatgccacagtcacactaagagctgcccaataacaacgtgaaatgcatgagagaagtggtgagtgcttagttaccaggggtcaacaagcagaaagtggatggccttgtcccagtgcagatcaggagatctgagcaccagcagccaaaggattgagatctggggatcccactggttaacctgactgtctcccctgccagcttgggaggtcctgaaactgaaacacattcccctggcactgcgacccacccatgcccagccccataggctggtgcctgtcggtctccgggttttgattctggtagtcttttgcaaactgtaaagtgctactgctttttccttttctgatttgctctgtcccccaagccgcctcccgagtgaaatgcccatatgctgagcctgaggcaagcccgcctggcactggggcgggggtgccttcgggcccgagccttccccacccccttcctatagctgttgtgcaagaccagcgggcacaccttctggggcaggtcgaatcaaggccagggaacttcctgagcgcgggcagtggcgggcgggacttgggggggcagggggcactgttcagggaagaggagggggcgaacgccgaattccggcccgtaggtccaggcgtcccctgccagtgccccacatcctcctcggcgcgattcttttcccgcgcgggcaaggttggggaggggaggggggtgacactcaggctggagtcccccagagcacccccagtttttcagatgyccccaccagccccgtctctttctctgcttaggtacagggcgggtgcgctcttcgcagtctctccgcggtctccctttctgggaccttctctttgtctccttctccagggcggtcccggcgtccaccgcccctgtgccccgcccgccggaggcagcggagggggcggggcatacggggcgggccctggaggggctgggtggggcgcaggggggtgcaggaccgagggcggggcggggcggggcggggtgggacgcggcgggcgcagggcagcgggcggggagggggcggggttggcctgcgggggcgtggtctggtggggcggagcggggcgccggggtgcagggccgagggcagggagggggccaaggcggccggctggagggacggggcccgaccgggagcggagccggagcggaagccgcagccgggcggggggcgggagcggcgggagcgggggaagcagggcgggccgggctccatggcgccagcggcgtccgcctgagcagcgcgggcaacagcggcggcgtcggccggatcgggccgcgacacctcctggccatgggggacgtgctgtccacgcacctggacgacgcccggcgccagcacatcgcaggtgagggtcgcgccgcgccacgcgcgcccaggggcctgccggaacccccggaccacgcccccgccccggccagcagttggcgccggggccgggggctcgggggagtcaggccgggccggtgggagctgccagggagcgtgccccgcgtccgagctcgttccctctgagcctgggcgccccttcccgcgctcttctgagcgccacctttcccggctcaaggggactcggaactccttctctcccggaaccccttcggagcccgggcttggcggacccccagcccacgacccctggccgagctggggcaggggtcgcagcctgctgcccacccttggctgtccccgcccagaagcgttgcaagcccatccgctaccagctttgggatctcccagacccagccagctcgcgctcaccttcctccccagccgtcccgtccccagctccgccgggccccagccctggtacacgtggcggaggcttcctgaaggacgsgcccatgaaggcccgggactgattctggggagtggggccagggatcgatggggcgcccyggaggcggtggggttgcatgtcctttggcgcagacagcaggctgcccctgctagcagcaggggcccagggaccggtcaccagagtggggggccctcagggccagtcgccagccccttcaaccctgttcttcagccaaccctactctcagcctattactgcacagtggccacttctcccagggacagctgtccccaaggctcctggggaagccggagctgcagagggggcctgggttccttttccccacagactctggagaacagtgagataggatgaggatctcggctgcctgagaaactcctctctggccgatctctcmtggctggtggagctgccctgggtggaatcccagcatttgcttcccagacatctgtcctgtacaccttggttttctcctttttgaaatggggtcagtgatttcttccttattaatgagttgttgggaggcttacgtgaagtaactcatgtggcttgcttagcacagagcctggcataggagaggcacttgtaygtggggtgacggttcaggtgggtcgcccctcgctgtctagtgggccctgagcaccgcgtccgcctgcacttatttttgtgtcctgtagaatttcaccaccgtgttctccacgctcccttgagagcaggaagccctgagagcagtggccaggtgtcctttaactccatgtctccagggccgcacccatgctgggcaccagggaggtgctggggagatctgccaagtgactgtggtcccgggccaagtcccraggccagagtccctcccttgtgccaggcctggggctggctgggcacaggggtgactggggtgatgtgaaaatgaatcggaccctctctagcctctgaccagcgtggggttaagtcctggaaagcctccttrtccgaccaggcctggactgtgggaggaggaagggccagggcggagtcttcctgtcccctccctgtcgcagcaagctcctggggctctgtaacagtccctccattcaggacctcctgttgaggcccctcgaggggcctgggtggggtgtgccttgcattcggtggggtttttcctctccccatactcagtgctgggcctccctgtcttcccgtctcctgggctgagaattgccagcccaccctctctcccctggcatgttacaggggaggggactgagaccacagaaggtgaagtgtcctttactggagagggttggatttattttctggataccaggctgggtggaagaaagttgtgcccactcagagcctgctggtctctctcttctccacacttcagtgctatttataatcctctttaaatgcctcgaattcctggtccagactcacctgaggggagttcctgatgtgggggggtggggtgttggaagggggcagcggggaagcctcccagtctccccagaggaagtgagctgcctttgaaatctctgctggaagggaatgagggcgtgtatttgcckcctccagtgatccaggcaccctcctcaccccacccaaggagcagtaggtactctcaaagctggcaattaaaattccagaaccctccctacctgaggccttgttctctgccccagtagaaatgtcagagttagagacatcccttcccacagtgctctgagttcccaggcctgttagggttccaaggtttgacctgcagctttgtgcccgccccaagcaggtgagcaggtgaatgccagcctgcctgcaagtcctggcaaaggtcaagcgtgctcccggccacggtgctgttttgctgccacggcacctttcatcctgggatttcaaagcccctggcaagcagaggcttgtttccacaccaggagccccacggggctggtggcaggatgactcctgcctccttacacgaggcagtgtgccgkgaggaagaatccctggcctgggatctgggaggcctgaggatccttgggyaggccacttcctctccctgggtctcagtttccctagttgtgaaccgaagtgggtgggccactcgatggctgaagtccctttcagctctgagggcctaacaatcccarattttccccacaaatctcccccagactgaagccagctcaaggtcccagtataatgcctgcaaccttggagtaatatctttttttttttgagacaaggtcttgctctgtcacccaggctggagtgcagtggcatcatcatagctaattgcagcctcgacctcctgggctcaagtgatcctcccacctcagcctcccaagtagctgggactacaggcatgcgccaccatgccgtgctaatttgtgtgtgtgtgtgtgtgtgtgtgtgtgtgtgtgtgtgtgagagagagagagagagacagggtctccctatgttgcccaggttggtcttgaactcctgggctcaaccaatcctcctttgggagccttggcctcccaaagtgctaggattacaggtgtgaacttcccgcccatgaactaacatctttttttttttttttttttttgagacagagtctcactctctgtcccaggctggagtccagtggcacaatctcagcccactgcaacctccacctcctgggttcaagtgattctcctgcttcagccctctgttacaggtacacaccaccatgcttggctgattttggtatttctagtagagacgggggtttcaccatattggtcaggctggtctcgaactcctgacctcaggtgatccaccctcctcagcctcccaaagtgccaagattataggcgtgagccaccacgcccagccaaaaataatagctttattgaggcgtaattcacctaccatacaattcagccacctaaagtgtacacttcagcggtttttagtatattcacagaattgcgcaaccattgccaccatcaatgttggagcattttcatcagcccggaaagaaatcctctactccttagtagtcgctcctgtttcctcctagtccctcctaaatctaggcaaccactgaacattttgtctaattgcaaaagtaatgtgtgcacaggccaggcgtggtggctcacgcctgtaatctcagcactttgggaggctgaggagggcggattgcttgagctggggagttcaagaccagcgtgggcaacatggcaaagccccgtctctagtaaaaatacaaaaaattagccrggcattgtcgtatgcgcctgtggttccagctaattgggaggctgagktggaaggattgcctgagcaaaagtaacacatgtacaaacaatttaggagggtaaaataaaacatgaaarcaccctccatctttctccsttaaatcccacttcccagaagaagtcacttaagtgtggtgtgtcaccatttccaaacctacctctctctgtacatgctcataatagcttggtttataaaaacagattttttttttttttttgagatggcgtctcactcaggctggagtgcagtggcaagatctcagctcactacaacctcygcctcccaggttcaagcaattctcctgcctcagcctcctgagtagctgggattacaggcgtgcaccaccatgcccggctaattttggtatttttagtagagacagggtttcaccatgttggccaggstggtcttgaactcctgacctcaggtgatccacccacctcgacctcccaaagttctgggattacaggcatgagccaccacgcccaacctataaaaagagatattactctatgcttctgtggtttgatttttttcacttggtaaattggtggacatctttctgtgtcagaacacacaagactacctcattcttttcttggtgagttcgtttctgtgcatggatggtttgtctacccagccctctgtgaatgggcatttgggttgtttccactattttgctagtattcacagtgctgcttgaacctgctggtacaaaccctctgtaatattccagtatcagagaggccctgaaatggaactcctgggtcaccttttttttttttttttgatacagagtctcattttgttgcccaggctagagttcagtggcatgatctcggctcattgcaacctccgcctcctgggttcaagcaattctcctgtctcagcctcctgagtagctgggactacaggtgcccaccaccacacctggctaatttttgtatctttagtagagatggggttttaccatattggtcaagttggtctcgaactcttgacctcaggtgatacatctgcctcagcctgccaaattgctgagattataggcgtgagccaccatgccctgcctgggtcaccttttgatagatggacacatagcctttaagaaggcagcaggcgtttgacactctcctgctaagatggaccttagcattgagcattttcatccttttgacaaccagatatgagaagaagggtgtcttaattatttattgagcaaaacaaataatgcttctttccaaagtgattttaaaaacttacctctctgctgggcgcggtgactcacgcttgtaattccagcgctttgggagacaggcaggcagatcacctgaggtcaagagtttgagaccagcctggcaaacatgatgaaaccacgtctctactaaaaaattagccgggcctggtggtgcgtgcctgtagtcccagctacttgggaggctgcggcacaagaatcgcttgaamccgggaggtggaggttgcagtgagacgagatcgcaccattgcactccagcctgggtgacagagtgagactctgtctcaaaaaaaaaaaaaatctacctctcaacatttgggaagtggctgtagatgccaagagtgaagggatggaggggttccaccttctgccacccctcaccctgctgtgtggcttcctctttgctcccctggactttgcagagagaccaggctggccggaagcagtgcctgggcctgggccgctgcccttagccaaggtccgggtcagcccctgggggcgaagtgtctggggatgatgctgtctctctgttgggtcttatataacatgcttttgttggctttgaccctgccttcccctccatccagcctcctctagtccccctgactctgttccttttccactgctggggcctgagtgccggcctcgcctactcagagctgctccagcctcctcggagcctctagtccttcmcacacacgctgccaaagggacctttctaaacccacgcggggccatggstgccctccctgctgtccaaggagtgaagcggaaaaacaggamtaggaaccactcacccgccgtcctgcgataaccacttcatcctctgggagtacttcccrtctgtgtcgatcattacactttaccgggaccatgactcaagtttgtgtcttgcttctttcactacatgatctatagtaaacatctctcccaggtcattaaaacctccctggaagcatccccaaaggctgcattttattccatttgaggacagagggtcactttcccagctttttccctaatgctggacatgaggttgtttctcacatgttggtttgtaggggcaaacagagccactgtgtgtgtttcttttctggctccagtcaacttccctgtcgaagaccgattcatctcccagcccaactcttcccgtgctctgcttccgccaacctgggcatttagagggaggctccttcctgccatctctgagcatcgttcggggctagtgggcttgaaggggctgcctgtgtactggggacggggactgatgaccatggcctctgggtgtgtggccatagagtctagcctgcggtgtgtaggaatggatatatattttctgtctgaagacatggttgatagagcagggaggggcagtaatcaggctcggagtgataactgtaaacattagcaacggtttaactgagcacttgctatgtgccaagccttcctttgtctgtatcatcttattgaattcccacctcagtggcaggcctggatcggatagtccaaggccttagctatttaaaccacgttctgctattagtatgtcatccgtggtgcccagactgggcagggkgacactgaaaaaggcctccaagagaggtaagctttcggaggcggggagaggaagtgggaggaggagccgagtgggaatagagcagcttgtgtcagtctccctcccataggttgcacaaatctatcccaccygtcattactcagtctgagactcacagcctctgaccagccccattctccgtccctgcgcccccctcctccttccccgcgggcagagctcatgactcactscaccccgggctcctgcaagcatcatcctgcggttgcagaaattcctgcactgctttttccttcccctgccccaccccatccacttctgtgctggaggaagaagggtattctgtagacgctgctgggcagaggtttaaggaaggagyccgggcagatgcctaggtttaaaacccgtgagggtggagcaaagccattctcttctcctggtagaatcttakggcctgagtcatggaagggtacaatcttttgatctcaaaaattttaaaactggaagaacaggaagtgtccaccccctgggactggtcccatttttttggagctgggctgcttctggcccacgaaggtgaaggggcctgcctggtgacgtggtggatggtaagcctgaagaagcagggagcccagaggttttggggtaaggctttgcagtcagactgggtttgagtcctggctctgccactggatggactggtgttcgggggcaagttagtcamcctgtctgagtcttagagccctccttacatgaggatgagagttctggcatctcaaggtatgaaggtcaagtcccctggtcagcgcagaacagtgttggtgggaggtgacaatatgtgagtggtagctgttatgattgtgactttattgagctaacttgacacccagggagatgtgtctggtctgtctgtggcctcgtgcatcccctgctccctgccatgtgctccaggaagttgacatgacccactcctttcctaagcagccctaaatatgagaatcttcttcccttccaaggtcagaggagcaccagcctatggccctggacmcctggggtattcagcgagttcctggaggacggtgggatggggctgtggttccagcaaggtcagtcactccgcagcagcatccactctgtgcctggcatttggcagtgcacagaggaaaagggttagaagatggatgggaacatgctccctccttgcccacccatgtgtcaagaactagacttgtaagccttaagcctggtcccattgaccacttgctgtgtgactctggacccaatggccatgcctctctgtgccttttctccctgtctgtgacctcaaggccagtatctactcttgggaattctctgcctctgaaaacccttttgtaggggtctcaagatgccttccaaaggcagggctggtggcttctatgtagaaatagaggtgcatgcctgtgagaccatcaaggggtgtgatgagctctggcccccaacacacgtagtccttatttcttgtatgaattcaatcaatagttattgaacaccttctgtgtgcccggcgctgtgctgggcaccagggacacgcagctacacaatcacatggtgtctgcctgtgtgtgcttcctggctggctgtccctcctcagggcaagcaatgttcccaaagggaaaggccttccttgggaaggtgtaagggagactggcctggggtgggccagcctgctgggactcaggatgggggaggtagagggaaacacaaaggctggtcttggcgaggaagggcctttgtccttagggtcccagggaggccttggaggcattttcaggcagaagtggcaccggtgggtcagctgtgagtgagtgtggatgggaggaggtgaaccccatggtgagagggactggacctgcgtgtgtgggggtcgggtgcaatgagggatatgtgtgtacagggtgggtggcgtggccaggcctcagtgatggtgctgtgcagggctggggcgagctgatgtacgtgactgttggctacagggaaacctgtctggattctgtaggttgttttatcaaggcagaccttcaaccactggtcttgcagcctctgctcccactcctctagtgacaggaaactcagtcctttcccaggcaaccctgaaaatgagaaccttcttcccctccaagggcagagtagaaagaggccgggagtcagaggacctggtttgagatgctgtcaggactgccctgtcatttggcagctgccctcccttctctggacctcaaattcctcatctgtaaagtggacacagcagtatcccaggcccctgaggctgttgtgcagggtcggtgagatgatgtggccttagctctttgtgcttarggagcatcggctcctggttcatccactgttaccgttctatgtggttcacayaggacattggccaagggaggccctcctcttgcagatcagaagtgccgggtgtgggtcagggtgctgggtagagggtccacgtgcaggggtgggggcccagggagtaactgggcatccaggaggggaggaagaatgaactgtggtttgcaaagtgcagaccccactttcccacctgcccatctgtggccaagccaactgcagctgctgtccatctttcccatgccccatgctgagcagaactatttgtgtccagccgaatttgtgaagcttagcaccttctagaagaggagtcccttgggaagaagctgcccacccactcgtgctccagtcacctctgatttattccacctgccaggaaccactggtgggtgcgggctaggaggcaggctccccaggatgggtgcctggaggcctctgacaagcccttccttttctctgtgcctcctcctcactttgcctatctgtgcaacgggcatgcacttccagctgtgaccccttaggaacctgtgggccttaggctgcactgaaggcacagagcaggtgcagcacctccacattgcaggaggccatcttgccgttgaaggaagagcttgctctgaaagctgtcctgttcctggcctgagctgggaactggggacaaagcagtgacatgagccctgatctcatggaactcatgccagccaagaaggttccatcaagctggatgtgctgtggctcatgttacaaagcccgtggatctttgtttcccagagtgtatgttggtttcagcactcagtcggcccatctcaagaggcagcgtgtctggctttgacctggtggcagtatgcttctgtcactgaaagctgtgtggccttcggcacacagctctcctccttggaggtccagttgtcgctaagatgggattggtgctccctgcctttgggctgggtgaaggttctgggaggtgcactgcgcagttcctggcctgtgcagggtgctcagtaaatggcaattgcgttttagctgarttcttagggaagctgtgtgtcctttgcccggcctgtcagagatttaaggggtgattcaggcatctagaggaggagggagctgacaattgcacttctgttttgctttttgtttttgctttttttgagagcagtattctctgggaggcgaagggtagaaaagagagctgagtttgagctttggggtgggcaggcctgatgggctggggaaggtgtgtgcctctcaccctaccacacctcccctagccctgccttgatttttgaggtgctgatgagaagtgtctgcttttctttttcaggcccagacccttcctcgtcctagttctggaggaccccatgagctcctctaaccaatcccctcctttttctcatgcccsagtaaactgaggcccaggaagatgatgggacatgcctatgctctcaggggcaccagagcttggctggaacccagggccttgaccccagcatgaagcttttccctctccgacttcgtactcccaccccccgcacccgtgcagggccccagacggcaagggatggtgagggaaggaatgattgggccgggtggggctgcagaacttataattatgaaaactgggtaaacaaacaagctctctgggagagaagcaagccctgtgcgggcctcacagatgggcctgtgtccgaggagacagcccaggcccgtctatgcgcagacagtgaggggctgtgttggacttaaaaagccaaagccacactcccctcccacccccactcctatatttcaggctgccaggaaaagaggagggggaaggggcagccctttcttccaaggaggtaggggctgaccccctaggrctctcctggggtcagccctcctggcccagcttgggacagtcacagctcactgtgtgaccttggtcaaggggcgtctctcctctgggcctcagttccccatctctagagtggaggtcaccccatctctcaaggagggtggcaggatggggaaagatttgagccarctggttgaatacactgagccctttcactcaccctgacccgaggccaactgggatctcagaaactcttcatttctctctggccagaggcaggggcccctcttggagcagaggagtgactttctcagtgacctgagagccggcctggtcctgggaggccaaacctccaatcctggcctgactttagcaggctgcccagctcagctttcctgtcttcctgctgagattgtggcagaatccgagaggagctgtttctggtgcctgccctgcaggctgggggctgggcagcttgccctgcctggaggcccccgggtggagcctggcagacttcctgtgcaattggggctgagcccccgccctccctcccctcttcctgcagtcccctgtgtggcttctgggagtccagctctgtagatgggaggccggtcctgcttcagacctctgtggccttgggtgaactcctgcctctcctccaagcctcagtttcccccatggttcaatggaggggttggataagagcctctggtagtagagtgaccttgctactaaccatgtgtcaccytccttcagactgacccttccaggctgtcctgtgccctcgaggtcaagcccagaccctgaaatgccctcacagaccaagccctgcagccagtagccccactcctggtaggctggatcaggctcttcctctgagctcccacagccccttggccacccgtgtgtacctgtagcccttctcacatggttgtgattcatttttgtttttgagacagggtcttgcactgttgcccaggctggagtgcagtattgcaattatagcttactgcagcctcaacctcccgggctccggcaatccttctgcctcagtctccccagtagctgggaccccaggtgtgcaccaccacatggggctaatttatttttatattttgtataggcagagtctccctgtgttacccaggctggtctcaaactcctgagctaagccatcctcctgcctggcctcccaaagtgctgggattacaggtgtttgagccaccacgcccagcccgtggttgtgattctaattcccatctgtgatatgagtacctgcgggctaactcaccatgggctcccctgaggtggacaggtggcctcacagctcagacttgctccaccagcagctgaacaagtaccctaggtcaggctttatgccttagtttcattggctgtaaaatgggcatgatgatgcttctactccactggattgtaaaggttattaaattatgtgtgtaaagcacaagaaatgctgaggagtcaataactgtaatgaacatttattagtgcaaattgttttagttccctagcaggaatgaatgaatgaatgaatgaatgaatgaatgaatgccattgcaaggtcctacatcctgggagcatggggatcccaaagctctctggatgaaggtcctggtaggtgcagaatgtgtgtgtgtgtggttggtgggggttggttacagaggggcagggcagatgtgggaggggcttggggtggtgacgtwccccctgcccttgtggaaggagtggtttgggcccctccgtgtctcagacccgcaggcacgaagccatgtggccatccacaacttccttcctcctgcctgtattcctcgaagcgtgactcactggctttgagcccttcattcttgtccttgagccccgagggtgaggcgggtagagtctttcttggaagggcggctctctctctgggttcctgtctattcctggcccttctgcagcttctgagcatgacaggcagggatggaggggtgcgggtagggtggggtggacacctgggccctggtcctggtggccccactgaccccatgtgtgtcaggcttggggtgggcacccactgagggcccacccagggcttggatctgagctggtgtggctgaaacagcccagtcaagctcacctgggccctgcccctgtagagctcctgtctggtcaggagacacacagaacaaytaccactcagtcattaattaaaatcattaccggagggcgaattgctataaagaaatggccactcttccctgggagctcacgtgtcctgggatctccccagcagtgcctgtggtttgctctcctgtcacagaggaggaaacacagcccactgagtgggaaagggagcaggctcagctctggggcaagtcctgtgcccacctggggcctcaggatctcgtcacccatcttagaggtgtgctgttcacgtgaccctcctgccttggcctcccaaagtgctgggattacagacgtgagctgccgctccccactagggaatgctgttcaggaggcccagggtccgccgctggccccccatggttctgggtgggcgggctggcttcggggttttagcctggggactgtggaactgcagcgagagctgggtttgttgtctttaaatccctcctttgtgtgtccctagacagaaaccactgtgactaaagtattgggatcttctaaaggctaggcaggaaatgggggctggtaagggtggtcgtcccccttcccactccctccaccaatacacaggacagcagaaaggtggcccaaagccctgggagaaacccaccccaacatttcacatctagaatgtaccgcgttaggtaacaaaatggttacattacagcatgggggatggaatggaaacaatgtattaacaggcattgttcaatggcataatatgaagccattaaaagtgatgattcagttttgtatgtctgaaagtgtgtatgtttgtataggcatagaacaaaataaggaaagaaattcaccaaaatataaatagaggttattttggagtggtgggataatggattattttaatttttttattctctcctgatttttgttttttgttttttgtttttttacagtgagtggattaaatcaaaaagaataacctgggtgggtgcagtggttcaggcctgtaatcccagcattttggtggctcacgcctgtaatcccagcactttgggaggctgaggtgggcagatcacctgaggtcaggagtttgagaccagcctggccaacatggtgaaacccccacccccygtctctactaaaaatacaaaaattagccgggcatggggttgcacacctgtggtcccagctactcgagaggctgaggcaggaggattgctttaacttgggaggctgagattgcagtgagccaagatcgtgccatagcactccagcctgggtgacagagcaagaccctgtctcaaaaagcaaaaaaaaaaaaaaaaaaaaaaagaaaaagaaaaagaaaagaataaccctattgactgtatttagtggaacaatttgattcctgtctgacttcagaatctaagccattctggcccgactggagccccaagggggttgcaagcacagggcaggctccggagcggggaagagggaagagaaaattctggaagaggggtgtttgagctcaatcttggaggacaggagggatttttaaccagcagacttggggtaagggtgagtggagggcatggcctggcatagacccttgcytatccaaggcagggagctgagcacagccttgagtgccaggcaaaggggttggggaatggagagtccttcccatgaacacttgttagctggactttagaatgaggactcagtttctgtgatgagggcaaggagagcaacaaatttgtgttaggtaggctctgtctgtgtgcccagcctctgagcccccagtggctgtgagcagataggactgtggtagtttagcccagagatggcagatggattccacaaataaagagtctctctccgtgatgagtgctgaaggccgggcgtgggtgggggcattggggtggtgaggagtggttgggtaccatccaactgggaaagcctatgacccatcagacctccagtccggaggtgtccctgctaagtaaaaaaaaattagccaggcatggtggcacaagcctatagtcccagctactctggaggctgaggtgggaggattgcttgagcccaggaggttgaggctgcaattagctggatcatgctacggctctccagcctgggcaactgagcaagatagggctccaggccagacagagctccaggtccccagggtaatatgcacaggatgctggtacctggcatagaacttgggtggccagaagcatgcgctgcacgaggctgagcacgaagaccccattctgctgtgtttagggcttcccttccgcctgtctccatgatgacctcagctctctgctttcccttacccatctgtagcacagggatggttgcagctaccttcaagagggttgttgtgagcttcatgccagggccacccctggtacctggcacacagcaaatactcaggaagagtttccgtcctcggggttcagtccccagccagggaactccttccctcctggaggagcctcagcagcctgaacttgatggccaggatggtattatatcaggttgcttggcggtgagctctggcctccccctcagacccactgtggctcccacctggcagcatctgccaaaggtcaggttctcacagctctggaggtttggcctttcaactttgagcttccccagtcttccccctttattgtttttcaccttttattattattgttacataagcaatagctagtggtcaaagaaaattagaaaataacagataagtaataggaagaaaatgaaaatcaccgataatcctaccacccagaaaagactttcaggcaccttcctgatacataatttgttcttctaccttaatagtgagtagtgggcctcctccttgtgaatggatacagaatattccattatggctgagcaaggaggctaatgcctgtaatcccagcattttgggaggctgagacaggcggatcacctgaggtccggagttggagaccagcctggccaacatagtgaaaccctgtctctacttaaaatacaaaaattagccaggcgtggtggtggtggacacctgtaatctcagctacttgggaggctgatgcaggagaattgcttgaacccaggaggcagaggttgcagtgagctgagatcacaccactatactccagcctgggtgacagagcaagactctgtctcaaaaaaaaaaaaaaaaaaaaaacgaatattccattacgcctcaatagtctatattttaacttactcagtcaaagccctattgccaggcagttaggctttttctatttttcttttttgtttgtttgtttttgagatggcatcttgctctgttgcccaggcttgagggcagtgtcaccatcatggccaattgcagcctcaatctcctgggctcaagcaatcctcccacctcaacctcccaagtagctgggactacaggcttgtgccaccatgcctggctaattttttaaaaaaattttcgtagagatggattctcactttgtcatccagactggtctgaaactcctggccttaagtgatcctcctgcctcagcctcccaaagtgctgcgattacaggcatgagccatggtgtccggctctattttttgttgttgtaaacagtgctgtgttggaaagcttaaatcaattaatgggattgagccattgattccgcatggtttgagagccatctctgctcagtgtcaggctgtgtgctgggactgggggtgctgggtggggaggcggccatggtcctcaacctcttggggacccctgtctggggaagacaggcccagcatggcacgccagcagaggtgggggtttagggcatctttgggagccagggagcagccataacccagacctggagagtcatgggaggcccagctgaggacacctgcagctggtgacctgagggtggggcaagccctgcacctgctgctggctgagctcatgggaggggacctctcaggtgagccacaaaggatacaggaggagagagtttcaggcagagggcaggtctgcagaggcccagagtagacagagcatgggcattgagggaaccaaaacttcccagagatcggtgctgtggttcttgccagcctggcagcagctcccatgtgcatgacactgtggtagttcttttctttttctttctttctttcttttttttttaagatggagttttgctcttgttgcccaggctggagtgcagtgacgtgatctcagctcactgcaacctccgcctcctgggttctagcaattctcctgcctcagcctcccaagtagctgagactacaggcaygtgcaccacgcctggctaattttgtatttatttatttatttwtwtttttatttatttatttttgagacagagtctcgctctgttgcccaggctggagtgcagtggcgcaatctctactcactgcaacctctgcctcttgggttcaagcgattctcgtgcctcagcctcccaagtagctgggattacaggtgcccaccactgtacccagctaatttttgtgtttttagtagagacggggtttcaccgtgttgcccaggccggtcttgaactcctgatctcaggtgatctgcccatctcagcctcccaaagtgctgggattacaggtgtgagccacagcaccctgccaattttgtatttttagtagagacggggtttcactatgttggccaggctggtctcgaactcctgacctcaggtgatccacccaccttggcctcctaaagtgttgggattacagacatgagccaccgcacctagccggtagttttttttcaaagtgccgttccatctgtccctttgtgsggtggggatcactggcttcccttttcttaatgggaacacagaagcagagtgacgtgcgtgccccagggaagtggctggcggacccaggcctttcaccggcccagcacacgggacagggggttgaagtgcaggatccgccagctctggtttcccggctctttgcaggtgcyggatcacttgacaggatccaagcaggaagaggacgcggaggatctgagcttaggtgaccgccttagtttccatgaggaggtagtgaccttttctgctgctgatatgtgaccttggcctggcccagccccaaacccagccctatatttgcaggaagggtcctgcctcttgggccatactgggattggagaggccctggtttatatggaccttgggggctgggaagtgtctgtccccaagctggagttaacctttctgggaatatgccatcctcctctggtgtcttaacatgactgggagactgaactgcagagctctggtctaatgtcacatagtcaggggataaatatttctgtgcaaagtgctgtgctagatgctgggcatatgttatgagtgagacagacagggtccctgccctcctagggcaaatggagatggaacaatgaattattaaagcaaagttgtgctaatgactaacaggggtctgacctgtgtgagcgagctggcaacagtcagggacagtgcttttcagcaccctaggctggcagttaggactcaggtcagttctatcaaggcttaatggtgggctcctctgggcttcccaatgtgtcaggaaggagcgttgtctcatgtcccaggtggagggcatcagggcgttgagggtccagcaccatggtgtccagtcccttcacggtacggggaggagacagggagccaggaagggtggggggcttgtccagggtcactcagcagcagtcaggtacatggatttggggcccagtgctcttagccctgtatcaccaccccatttcactggccagtgatggggagacactgaggcggtccccactcaccctcaagggactcccccggggaagcagaccaagaccacagaggctgttggctgcgcagggtctctcagggcgcacaaatggggtcacgcaggcacctgggacagagagtgggaggctggcggggctgggaggggagccgttctcccacctccccttctggccccctctggagcctgaggacacctgcagctggtgacctgagggtggggcaagccctgcacctgctgctcgctgagcttagagtacagaccaagggagtcttgttatttgaataaactttccttctatccatgtaaagggtccctggcattccaatctgggattgggtttcctctggcccagcagcaagcacacgagtggattttcatattggctcatctttcttgttctcttcttccccttctttccctccctggctttgagaaggcagaatcgcccctccccagtcccactcactgagaggaccctgcaagccagaagctgcaggcagcagcatgcatgtgtgtgcacatgtgtaagtgtgcgtatgtgtgtgagtggatgcacggtgtgtgagtgtacatgtgtgtgggcatgcacatgtgtgaatgtgygtgtgtgtgcctgcacatgtgagtgcatgcgtgtgggcgtgcatgtgagtgtgtgtrcgtgcatgtgcatgcacatgtgagtgcatgtgtgtggcatgcatgtgagtgtgagtgtgcatgcgtgtgggcatacacgtgtgtgtgaatggtgggtgagcaggggtcacgaggcaacttgggaagaacctgacttgggcttagggaaaggatattagcagtagagggtgcttggctgatgagatctgtggggtttgtgtatccgagtttagtccttttccattggggttgggccatggtgactggcacttattagctgttagttcktattggaacagaagctggcatttattgggctcttcctgggagtcaggcagggtgacaggtgcatctcacacatcttatttagtcctcacaccaactcttggaggtgggtgctctttgaccctccagcctctgcttacacacctccagtgatgaggccttccctacccgccagggtcccttatcctgggcatctgaggccgttagaaagcccttgctgggatcttgtgtgtcttctgtggatgacttgagaatgggctctgcttggcaatagggcgtggctacggctggacttccccagcgtctgttttccagggaactgtccaactctaaggtttggggagaggaacaagtcctccctcctttccctgagcagcccctatgtggtacttagcccgtcacagcttcattcatcacataccaagcaagtctgaagcttaatgttgaaaccctagaggtattttcattagcatcgatctggatgtcttagtcaatgcaataagagaagagagaaaaaaagagaagtacaaatgcaagacagcgggaaagccctcatggagttcagggactggygacaacaaagcactgttggtctttggacttctccaccccctaaggctgcctacaggaagcagagtcttggagagaccagaacttgcccagggccacacgtgagttggcggcagagctggacgaggactcagggcccttgattttcccaaccagcatctctggtgatggatgcagcagctaagggagaggcggcaaggccagagtgttctccatgccagtgtcacagagcaggggggctgtggtcggtcgaggttctcaggggtgcggtacgtttgggtgttggctttcagaagtcttcrttgatgtttcttgctccacttctccttcctgatgaattaacctgagagatgagggtccagaaagattggaccccaagcatgtcaccttttaatctcatgacccaccagctgagggaccagggaggtgctgttccagtcaccctttgctggttcccattgcgtggcgtgaaacatgggacagagaactgccatgagcactgatgagagatgccactgggcaccctgaccatttatgtcctggccaccaatactgggacagatggagctccttcgagaggttccatcactgccattgataacaccagcccacatttgcccaggctctgtgggtttattcatttcattgaatccttatgacaccytgcaagatgggggatcgtaaagttgctgggttttttttgtttgtttttttgtttttgaggtggagtttcgctcttgttgcccaggctggagtgcaatggtgcgatctctgctcactgcaacctccacctctagggttcaagcgattctcctgcctcagcctcctgagtagctaggattacaggcatgcgccaccacacctggctacttttgtatatttagtagaggyagggtttctccatgttggtcaggttggtctcgaactcccgacctcagatgatctgcccaccttggcctcccaaagtgctgggattacaggcgtgagccaccgygcccggtggtgctgttttttgttgttgttgttgttgttgtgttttttgagatggagtctcgctctgtagcccaggctggagtgcagtggcgcgatctcagctcactgcaacctccacttcctaggttcaagcgattctcctgcctcaaccttccgagcagttgggattataggcatgcgccaccatgcctagctaatttttgtatttttagtagagacggtgtttcaccatgttggccaggctggtctcaaactcctgaccttaggtgacctcccaaagtgctgggattataggcgtgagccaccgcacctggccaggttgctgttactcccatgttacagctgaggaaacagaggttcagagagaattgagccatgtgttgctgaaagtcctatagccagcaaagggtggagttaggatttgaactgagatctggttccaggaccttgacactgcactgttgaagggtccttcttgacctaggacgtgctgataaatctttgtggaatggattaactctttcatgcctgtccgaatcttggcctttctcgggtcttctgcttggcacacactcccttcccggtgtcctccctyccctagcagggactctttgtgtctcagctgctacctccctctgggaggcttcygtgaccctgcaggcttggtcagtcaccttcctgggctcctgtgacctcctgtgcttctcccagttggggctcctagtaattgtagtttttgttgacaatctgcctccctcattagggtactctctcctgagtacccagtggccaggattgctgaatgaatgagtgagrgcarcataaaccctttcttggccatcgtgatgaagcctcagagcctcgcctgaacttggtgactcgcctgacatctgccattttggcttggcccgcgctggctgatggaggacatgggatctgggctgggtcctgtcctcagccctgccccagtggttgtgacctgtctgatggggcggggctgrgtggttgacactgcggacatcttgggggaagggcttgaccacaggctcttcctgcatatctcaaggtccaacaccaggctggacgctgaggggaacattggtggtgggttctcaggcccagggcaggtgtccaggcccgtggggggcacctgccaatgtgcacgagccacagcagagcaccctgggttcccagtccagcctcggccctggacgtgactgagagaaggggtatgaggagcacctgtggacaggcgtggggatgctcctctggggcctgggcagttttgacaggtggctggctaaggctcaggctcctgtgggggtggtgaggatgacaagaaaggaatgaaggccagagacattgtggagaaaaagtcaacaggaawgggtgactccatgtgagaggaaaggagggtcgtgtctacacaatcactgtcatagatcagcctcctccttgggcgtggccttggccagggggccgcaggatggcagccttgggtgcccaccccctggagtgtgggtcctgctctgggtggtgacgctgctgggggcctcggcaccccctgggctgccctcccagcgaggatctgtgttcccagacggcaggcatgcctcatcctgggctcccagaacaagctgccactgtgggctgtgggctggggccgctgccaggcaggcggggtggggggcaggaggggatgagagggcttttgtttccttctgtttgtgtcaagatgggaatggacttcctcccaccaggcggcctcgaggtgtaaaggaaagggcagccccagtgggcgggttttgggtcacccgtttttttgggtgcatttctctgggctcccgcctcagccccgccctctcctcccagccctcctgcctcaaagctcacccttccccaccagacctgttgtggcccagccctggttaaatatttgccaaccgagaagagttttcaaggcagccttgtgaaaaaccccagctgactcctggctctgttgggcctgacctgcctctgtgatgagacccagacggcctgtgccctcagactgagtccctgcccaccatggcctccctggtgacctgtttggcgcctgaggctgggtgacctaacacttgttcggcacttgtttatcaagcacccccctgggcctggcgggagctgggtgctggggagacagcggagagcagtctcagtccggggagcgtctcagatgaggcattaactgtggttgaggggagtgccggggagcaggccaggggctgtgggagtggaggccagggaggctgtggagacctgggaggccgggacttgtctggagggagggttccgaggaggtggcacttgagcctggggaggagaaagaggagttggccaggcacaaggggtggacgctaggagggcactgtagacgtgggaccccaaggccagaggccagatttcctccgctgaggaggaagctgaggggctgaggttgcggttcgcttgggttcgctgggtgtgaaagccccattcacctgtttctccccaagatggtctcagaggagctgggacactaacagggcaatgggaccctgggcagcttttccccatttccccagcctcagtttccccatctgtccaaaagatagtttggacttgatcttggaggtcccttcccaggtccagtggcctcttaggagtatgtggctggcccatgaatgagggaatgtgccatggcagggattctaccagcaccaaaggccaagataacagccatggccgggtgcggtggctcatgcctgtaatcctagcacttcgggaggccgaggcgggtggatcacctgaggtcaggaattcgagaccagcctgaccaacgtggtgaaaccccgtctctactaaaaatacaaaaatcagctgggtgtggtggcacatgcctgtaatcccagctgcttgggaggctgaggcaggagaattgtttgaacctgggaggcggagattgcagcgagctgagatcatgccactgcactccagcctgggcaacagagtggggactccatctcaaaaaaaaaattaattaattaattaaaaaaataaaagaaaaaaagaataacagccatgtgcccttatagggttcatgcagccctatcctggtgttagcaacaaaagccaacatctcctgagtgctccctgcccyagcaaccttgtgaggtggtggtggaggactatgacattatacccattttacagataaggaaactgaggyccagagaggctgttctgagctcagggtttgcttcttgttttaagcatggctccagaaatacccgtctctgtgagaaacccaccctcctctcccaaggccagcgccatgttaggtaccagggatacggaagtgaacaagataccattccaacctgggaagctgccagtcgagcaaggaatgtcccagcagagagtcagcaaatggttctagctcttctctcttccagcacagtttgagcagcgaacagaagcaggcttgccttcacatcccagttttgctcttccctgtgtagtatcgggaaagtcacttaacttctcaggagcctcagatcccttatccataaagtgggtttggcagtacgtcccagtgagggttaaatgaaacaatgttgactataatttttagcatatatgggatctgcctctgtgcctggcacagaactaactgttacatgcattagctcatgttgcaattatgattataattttctgcaagtggggaactgaagaacagtgtgatggaggagaggatgggtgagcagggccttgaaagtctggctaagattgtgaactgtggaattgaagggaagggcggtccagccagaggacacaacatggatgaagatgtggaggtaggaaatgtgtaatggaggcgagagacgcccagggtgtggggatgggaaggagagcggggctgaggttgcggatcttggatgtgattctgtgtaacatgcttgtgggcttcagtgtgccaggcctgtggtgacaagttagtccatagtctcttggggccatcagagcccagagagatcctttacaaagtgcttcatgcaaccatcttccagatgtttccacagcccgtggagtctaggttcagccagcctgggctcacaccccagcttggattttggctccctgcttgacagccggctgacctgggacaaggccctggaccttccagcctctgtcttgatcgggggtgattcctgtaccacttcctgcagctgttgtccgggtctatgtcagatggcgtgaggtgtccccagccagcgtgacacccattagcttcggggtaggagggctccctaactgttctgtgcctttttgttcctggtgtggagacagagcctttctccctgggccattttgagagtcgagaatgatctcgcactggaagtccctagctgagggctggctcacgcagggtcacacggctgtcattgtcgggccttggcgtgctgagggatgctgtctttaagggaagaggtttttccttgttaataactggccttggggccaggcacagtggctcacgcctgtaaccccagcactttgggaggctgaggcgggtggatcacctgaggtcaggagttcgaggccagcctggccaacatggtgaaacccccatctctactaaaaatacaaaaaattagccaggtgtgatggtgggtgcctgtaatcccagctactggggaggctgaggcagaagaattgcttgaatctgggaggcagaggttgcagtgagccaagatcgtgccactgcactccagcctgggcaacagagccagactccgtctcaaaacaaaacaaaacaaaactggcctcagggaagagtgacgcagccaagggccccttcagggcacctgaggccagcagggggggaaatgtcggtggcagccaccttcccaaggaaggacagcacagtgtacatttcctcatccccaggacccagccaagggcctgctccgatgtcagcctccgtttccgtggtgaggaatctccggggtgtgtgggggcttattgctcagtggcttcgtggctctcttttgggggtgggtctggcctgagattggcacttctggcctgttgctgtgggcttcccttccttttccactgcgtgccaggccctgccccaggagcaggggtgctgcctgtgggagccacatgaggaacagacctttacccaccaggaggccagcggtgggctgcgggaataggtggagggctcccacccagcctggggctttccagttgaaagacgcatggtggtgggctgaggagtgagcttggcggaagactgtattccggacatggggagcagcctctgcgagaccccagatgacttgggcctgcgggcatggtaaggagctcagttccatcccagaggcagtaggagctgtaccactggaaggtttctgagccaggaaacgttgggcaactcccctgtggcccctgtgtgtgggaaggatcagaggcagccaggatggagtaggcaggacttcagtggctgcggcgggcacaggacgggagtggcctggctggggggcagtgactagaggcacaggctgggtggccacttgactggcccctgggtgctggggagcctgcctcaccctgttgggcttgtgctagggggcaggtagtggtggggtgggaatcccataggccctgtttctctcaggcccagaaggggggtcccaggggtctgctgttgtaccccttctgccaaggatggctcatggagggaccctgaatccgtcccttgccttctctggtatggtccctcttctggacaggaattgattgggtgggggacactcagctgtcctcctccttcctggcctgccagattctggctgctggctcaggctcttctcgtggatgggctgctggtccccctcctgctacttgatggagcctgtcattacccctcccacccccaacttcccacctgattacaggtcctgagcaggagccctgtgtctgcccttcccgtggaggccacccacaggctggtgctgcggaggccagggtgagatggttttgcccaaacgttggttccctgttsagagttcatgtcatttacaagctgtgtgtccctggagaagtcccttaacctctctgagcctcagtgttctctgggaagtgaggacagtgcgtgaaataatgagtgtgcaygtgcagtgccgtgctgggcacagaggtggtgctgacaagtggctgctgctattgtgtgtcgattgtgacagtaggtggggggcaagtagaaagtagaaaggccctgagcgaggcactggtctatgccaacccagctctgttggatgtgctgtgtggccctaggagagtgtcaccacctttctggaccccaagctctccctgctgtctcaggcacatgatggagatggtggtgcttgggacaactctgagacctgsgagaatggagtccctgccccgactctgcctctgctggtccctggactgtagggtgggtggggtcsgcacccccctctttcccccacctccccatgctggacctgctccctatgccctgggaaccaggcgggcaggttctgagccygccccaccctacagggtgctgctacctgcctggtttcagtcggcaaacctctcagccctgaaaccctgaaaccgggctgggcctcgtgggtgaggtgtgtccctggagcccactggagagaccggatgagccaggaacgggtctggcacagcgccctccactggggccaaaccagggctggcgccggcgtgcagcccccatggtggacatgagctggatgtggtcgcagctggagatgactctcttcctcttgggtcycccgtccgtgtggaacagggtttcaggcttaggcatcaggtcgggaccagggtgcagatcctacctctgcctcttctcagcagagtgatttggcagaggtacccagttctcggtcacctggtctgaaatgttctgccagtaccaataccacctggcccgaggttgagttgaagaatcgggggcaygtgtccaagcaaaatgcttagcacaggagcggcacatggtggctttggggagcgtcatgacaaggcaaagaaggaactccttagcttggcattcgaggccctccgggatacgcctttttaggtccattttctgagaacccctggactccttcctccattctcagctcagcaagcctcctctcctctctgagcctcagttcccctatctgcacagtgggcctggtaccccatcccccagctccccaagcctccaggccaccctggggcctccccagttcttgcccagcctcactatctgcacaggaagtagcgtggcccttaacgttgtcagtttggaaaatcagagattaattaacgttccggccgccttggctgctgttggagctggtcccagggtgggccaggctgcatgctcagcctctgtttcaagggcctcactgtgggttagaggaaccttgacaagaggcacttcttaggagcccccattggtgaagtgcccccttcttgccagggtaaagggcttcatgctcagtagcccgtttgtctcataacccattcaggcagatactgttgtgccattttgcagaggggaaaataaaggctcagagaggagaagtgccttagccaaggccacacagctcataggtggcagagctgggacttggacccagagcctgtgtgtccatgtagaaatggtgccctgtttgcaggtgatggggggtgcctagttctccccccgggtccttttgtctggcccgagggggctgtgatcagctgctggtcagagctgactcaccagcagctcacaggaggggctgaggccagcatcccggtcagttcctggggccagggcagcactgattagattgtcgttgagattttcggtcagctgagctgacagggacccaccctcccattttaaaggtgggaaaattagggcccagtgaggatgaagaagtaaggctccagtgggtcggatgattctccaccagctccgacccgacaggggccagtggagctggaaaccctagacctcagtcccggctctgacacctgccagctgttgcctcgggaaagtcactttgccctctgagcctcggtttcctcgtctgtaagatgaggatagtaaagccttgtgttgcctcattcttgggattgggcaagamcccagcaagagagtggaaaaccaggggtttgaaagcggcattgcgggtcctcgtgaggggtcactgggatgagaggctttgcggggtagggctctgtgcaggctttggtgggagacaaggtccaaaacccacctctttcccctccgttgtgtgtctttgagtgagtcagtgagtctctctgagcctcacttttcttcctttctttttttttgactgacccaaattagatctttattgtatttttccacatatctatcattcccaaaagatcagtcagctcgatccttaatttttcttactatgagatgtccctaatacacagtctttgtataaattatccattttaagtatatagtgaattccagatgtgatcacaactgcatttctttcttttttttttttttgagatggagtctcactgtgtctcccaggctagagtacgatggcgcaatctcagctcactgcagcctccatctcccaggttcaagcaattatcctgcctcagtctcccaagtagctgggattacaggcgcccaccaccatgcctggctaatttttgtatttttggtagagatggggtttcaccaygttggccaggctggtctcaaactcctgacctcaagtgatctgcctgcctyggcctcccaaagtgctgggattacaggcgtgagccactgtgcccggccgcacaactgcatttcttttttttttttttttctttgagatggagtctcactgtgtctcccaggttggaatgcagtggcgcgatcttggctcacagcaacctctgcctctcagattgaagtgattctcctgcctcagcctcctgagtagctgggattgcaggcaygcatcaccatgcctggccacacaactgcgtttctaaatagccatgtgacactcactgagtgcttcctgggtggcagccgctgtgtttagcctgagtctcacttttcttatctgtcagatgggatactaatacctgttaggattaaacaggctgtggagcatgcagtaagttgtcggtggataggcacctatccctggcaaactctggggatccaggggcagagttaggaggactggcttgtgagggggtccttctcagtcaccctcaataacccrataggatgcagcccttggagacagggttccagtcatatggggagcagagcccccctgagatccacagagcacccccttattcaaccaacttgctgaaagggttggctctcagctccacaacaaacccacaagtgtgtgttgtgagttttgccctggacctgcatccccaaaagtggcctcttcagaggtggatgcagcccagtacccatagagacaccaggtggagacagaggcctgggatgggagtggcttcctgaggtccctgggcacagatcaggactcaactccactcccagaattcacacactgccctcttgggctaagaagggaaccgggaccccaacaggcaggcgccttttgtgacaacctctgtgaggggcctcggcaggttttgtggactgagagtggcctttcctgagctgtttaattgttctgagcctcggttcatacagctgtaaagtgagggttgtatttccctctgggccatttgaagaatggtgtgtgttggggcaaagaacaggtgggccctgtgtctgatgggcgtgggcttacctcctgctggcagaaagcgaaaagggggcaaccaacggctctgggcgccagcagaggctaagggttatgccaggggatcccagccacggttaggcaggaccccccatcaaacgcagggacctgctgtcccccttggcttccccgcatctgtgatctttgtttgtggaaggcctcccatcattatcattattattttgtgattcttgtcccggttcttcagaaaacaaatctttattggattatttcaaactataaaagttatactgctaataaacatttcaaacagtctcttatgactgctgttctcagctgaggacactgatgattaacagtgacgtttatggaggcctggagctgagcacctcaaacgctatccggtcctgcagagctcagagctcgggaacagcttcggagaggcccatttacaaatgaagaatgtgagtctctgagagctaggcgcttgcagggctggcatatggcagggcggggactctggtcctgacttcaagctcctcaccaggaggctgggcacctggggccgcagggcaggctctgtgagtcctgccccactccattccctgccttctcacctagcagcacctggggcagagtcaatgcagggaggcagaatggatgagataatgtggaaagtgacgaagctggcacacaccttcacaccaccccaccccagcctctctgtagytcacagaagcgagtgatttctaccaccagctggagccccccagttcctgggcccaggacctgcgggccagccctgcctctgtagatgggggcacagccagtttcctctctgccctctaaggggaggtagggggyctgtggggccctgtagacaatggccagagctaggaccaggagggtggcatgcagccgactatggctcgaacctaattgcctccatctggctgtgtgacctcagctgagctgctcaccctctctggctcacattcccctaacagggtggtaagcctgagtgttggaggccctgtccaacatctgccccaaatccgtggcgtgtggtgtctccagaggctgcggcaggaaatggaaagagctgctgtgggcaagtatggaggaaagaggggtgcccgggctcaggacccccacagacacccaggccgggacgccatgtgggaatttgagttgtaaaatcctgaagcaacaatgccgggggagagccactgcagggagcaagaaggaaaagtggggtactgggtggggcctgcctggactgcagccccagagctcagcaggtaaggcggtggccaggctgggtcctctggctgagcccccaccagggctgcagtgctcgcctgggtcctcttccagcagggtccagccaggaaggccctgcaagccctttgtccaggctggccccctcccaatgctgctggccttttgggtccctctggcctccacacctggggtccccagcacccgagtcctcatcttctgcgtctctgggttacttcctctgtacaaagcacgtggcggttccttccatgctggctgaggacatctctcaagaatgtgctcggggctacccctgccaaggagccatccgtggccctgtttcccatggtcctccctttctagctctcccgtggtcgccacccttcttctgagcggagctggcttccyggtgctgcctgggctccgtccttaaggtccttaaccccttgctaatgctgtccccctacctgcagcatggcgctccctcagtaccccctccgatgcctgccccacggccttcccttgtttggacttagtaactatttggctgctggaccaaacccccactattcctccccttgccgacatctgcttgtgccaggcctggtgcccaggatccagtggtgagcaaaaggagaccagacccctccagcagagttcctggccctccctacctgacccatttggctcctgaattctgagagcaagcctggatagtgagcgactccrgccccacctggggccaacgtgacaaacctagagggaactgcatcctggacccctggcccttgcctgggtcccctcagcccgaggccctaggcctgtgggcagcactgcgctggtccagggacctgaccttcagccttgaccttcagctcccaccctgacaggcagcggggtccctgcactcccatgtctcccttcctcagagcttcctgcagcttcctctccagtccacagcctgcccaacttgggccttaactgtccctcggtgggacatgcctgggccttctcctggctcagtcttgccctcttttgtcctccccagcccagcccaggggcctttctgaacccagctcctccctgcctggacaccatatctggactgtgctgtccgggcagttgagcacgggctgcggtcaggcagacctgtgttcgagtcctcacagcaatggcagctccctccagggcctgctccgtgagggccagggtggcagactccagccctttgggatctgtctgtgggctgggtgcactggggctggctgggggccctggagccacrgccaaaggaaccctgagacctgcaggcccaagcctgcccatcctgccraccacgttgatagaatgcctgtggggtgcgtggcttgactcctcatccctgaaataggaaaacaacagcactggcttcctggggttctcatggagattctctgggttcacatacrtaaaacctgccgtagcacgggtttaatgctctgcaagtggtggccatgacgatgacaaccatggtaccgatgttattgtcagcttccatcctcttttctctattatccccgatgtatgactctcttccatttgccccctctctgcctcatgatttttcaaaacaattcccatggtctcagagagagttctggttgtttatggtttttaaaaaataggcattcaaagcaaattcctcatttgttctccccttcctccccccaaactggaatctggacagacatgacctcactccaggaaaggggagtacagggagggacagggtctgtggagaggggttggggggcatccctccacccccatcacygaggcagggcccggggtgtgggcagacacccaggaaggtcacatgcctgggaccctggttatgagctgtgaggcatggtgtgtgacatgccctttcagccctcctcccaggccaccacctcctggtggggacccaggactgcatcccagctctaccacccactggctgtgtgaccttatgccagtgacttaacctccctgggcctcagttacctcctctgtaaagtggggataacacaggttctccctcacagaactatagagaggatggaatgaaatgtcatcctagccaggtgccctcggtacctggagactggccatgggaggggcaggttcctgccagctcctgttttgagaaaggaccaggtctttgaaacctggaatccaagactgtcagmgatggcagggcctgtccgtcatcgaatgcagcctctcagtgcatgggggaaaccsaggctcagagaggggagcygcacagcgggccagcacaaatcccagttgggacrcgagctgcagcttcttaggaccaggaagcctctcccctcatgggtccgagaccctctctgggcctcctccttcatctgaacatgggggcacccaggagcacacgtgctgagcctgatgtggcctgggcctgccttcaaggccatagcactcacctctattcagaaaccgcgcagaagacagaagcaaatggccagtgaaagcagaaaggttgttcacttggtagaggcattaattttagaatgtttattttttattatgaaaggaatcatgattataaaataattcaaatgctataaaaggaaataaaccaaaaatgaagttcactctgtactccccactcccacaccagaggtcctgccttcctagcctggcatgctgccttccagacctcctccacgcacccaagcctaagtaagctatatgcacaaataggaggagttttggttttgttatgtgtgtgttgagacagggtctcgctctgtcgcccaggctggagtgcagttgcacgatcatagctcgctgcagcctcgacctccctgggcttaagtgaccctcccacctcagcctcctgaatagctgggaatacaggcacacgccaccacacctggctaatttttgttttgttttgttttgttttttgagatggagtctcgctctgtcgcccaggctggagtgcagtggcacgatctcggctcactgcaagctccgcctcccgggttcatgccattctcctgcctcagcctcccgagtagctgggactacaggcgcccgccaccatgcctggctaattttttctattttttagtagatacagggtttcaccgtgttagccaggatggtctctatctcctgaccttgtgatctgcccacctcggcctcccaaagtgctgggattacaggcctaagccaccgtgcccagccttttgttttgtttttttaagatagagtcttgctctgtcacccaggatggggtgtagtggtacgatcttggttcattgcaacctctgcctcctgggttcaagtgattctcctgtctcagcctcctgagtagccgggattacaggtacccgccaccatgcctggctaatttttctatttttagtagagatggggttttgccatgttggccaggctggtctcgaactcctgacctcaggtgatctgtctaccttgtcctcccaaagtgctgtgaaccaccgcacctggccaracttttgtatttttttgtagggatgaggtcttgctgtgttgctcaggctggtctcaaactcctgggctcaagcgatccacctgccttagtctcccaaagtgctgggattataggtgtgagccactgcacctggccagaaagcgatttttttttttttaaatgagctgatagtcaacaggtgactctgtcacttgctttctttccttaatggagcatgagccctttccgtttgttggcacctatccggataggtccctccatttttttaaatttttttattatatggagtctcgctctgtcgcccaggctggagtgcagtggtgcaatctcgactcactgaaacctccgccttccaccaaacttccaggttcaagtgattctcctgcctcagtctcctgagtagctggccttacaggcgcctgccaccatgccctgctgatttttgtatttttagtagagacaggatttcgccatgttggccacattgggcttgaactcctgacctcaggtgatccacctaccttggccttgaaaagttctgggagccaccatgcctggcccccctccatctttttactttttactgacctgggtgaatgaaccaatgtataccgatcatccctagagatcacattcagctgctccccgctatggcctcagtgcacattcgcctttgtgtcctgcgaatcgttctatgggggtagattcctagaggtgggagcatccaaggacaggacacccaccctccgaaatggctgtccccattcctggcgcccccagctctgagtgacatggcctgtttttgcatgtccccaccagtgtgacgacaggaaatggagtcttggttctgtttgcatttgtttgattctctgtctatggccattacccgctttcccatctggaggttcaccttttccaaggcagttggttttcacaggaaacgcggggctctggccagaaatgcagcgcagatgagcgcgaggagcctgtgcaaacaattccacatgcaggaatttggggctttgcagccactcctgcctaggggaaggatcgtgatgcatcagcatccctgaggacctcaagctcctgcttgtccttctcttccagaaaaaaccgggaagatcctgacggagttcctccagttctatgaagaccagtatggcgtggctctcttcaacagcatgcgccatgagattgagggcacggggctgccgcaggcccagctgctctggcgcaaggtgagaggtgctgggagggctcgggtatgttctgctacttctcgccatgtggcctcgggggagtgaccttacttttctgggcctcagtttcccattgttactgtgatggcctctaagggtctccccagcttctttttttaaaattaattattttttcttttttgagacagagtctcgctctgtcactcaggctggagtgcagtggcacaatctcagctcactgcaacctccgcctcccaggttcaaggcactctcctgactcagcctcccgagtagctgggaccacaggcgtgcaccaccatgccyggctaagtttttgtatttttagtagagayggggttttaccatgttggccaggctggtctcaaactcctgacctcaagccatctgactgccttagcctcccaaaatgctgggattacaggcaggtgtgagccactatgtgyggcttattcawtttttttttttttcagactgggtcttgctgttgcccaggctggagtrcagtggcgcaatcatgcctcactgcagcctcaaccttcctggctcaagtgatccttccacctcagtctccccagttactgggactacaggtgcacaccatcactctaggctaatttttgcattttttgtagagatggggttttgctgtgttgcccaggctggtctcaaactcctgggctcaagtgatcctccagcctcagctccccaaaagtgctgggattacaggcgtgagccaccatgcctagcctccttcccacttctgaataggtgggtaacccaggtcgtgttgttgagaccccttcagtcaccgtgggtgactcctcctagctcacctcctccaccatcagagctggggctctagagtctggatagtctccaattcaaggcaagctcctccagtaagagcctcagtttactcatctgtcaaatgggatgagaacacctccttcacagggtggttgtgcctgaagcagggaaggcactgtcactggctccatcatgatctgctatgatataaatagtaggatgctgtttgctaaggacatatttgttgagtgagagattagaagctgcctggctccagcctgagggtcagcgtgggccagagsgggctggcaaagccttctgggaagaggaacctgtgattgactcggacacggggccgggggcgggactcaagagatcctcccaccttggcctcccaaagtgctgggattacaggcctcagctgccgcacctggccaaggctgagcctttaagtggctcattcaggatggcggaggctggaccagcccagggccctttctgctgtgactgcaacccgcccggtggagggaggtcaggaccgtgtgtcggagctgctcagagcatcacctttgctttttgacccagaaaaggttgcctcttccccagtgtcatggtaacctcttgaccctgtggcagcagagcgtcagaggggcctgctgtggcccggcctgggtgtctggcaggtgcgtatctgtgtggtaggaaaggaaagaaaaggaggccttggacgcagcccaggtgagcggggccagaatggctcccctgtctggaaagaaatgtcatgggcagcccaagtccctataatccaagacaagtgggcactggctgagggcgtgaagcatttcctctgcgtgaggcctcatttaagtctggggaggcaggagtgcatatttatttgtagaaaaatagcaacatgtaagcaaggagagtgaaatgagatcactcacccacagtccctgaaaagcagtatttttggtctcattttggccactcaggaaaccgatcatcacaatgcaaagttatgataacatcataatactggaaataatattaatcaccagtggtgatcaaaacaatagtggtttttattagaaacaataatagaatacaaataaaaatagtgataatgataacgtaataatacaacagaaataagaataataaaacagcagttgtctttttgtttgtttttgctttttcagagtctcactctgttgcccaggctggagtgcagtggcacagtctcggctcactgcaacctccacctccctggttcaagcgattctcatacctcagcttccccagtagctgggatcacaggcatccaccaccacaccccgctaattttttatatttttagtagagacagggtttcaccatgttggccaggctggtctcgaactcctgaccttaggtgatccacctgcctcggcctcccaaagtgctgggattacgggcgtgagccacagcgcccggctaaaacagcagttatcttatgccggtactgtttgctcagccccgtggccccactctgagggaggggctatgatgatgcctgcatcacagatgtagacattgaggctcagagatgtggagctacttgtccaggatctggcagtcggtggtgccgacacaggagttccagttatctgaccttggggcctgtgctgtctctgaccgaggcattggagagcttcgcagagtctaaaatattttgccygggctgtcgagttctgtttcatttcctgcaggccttccaattgaacacgactctgccatttgaaagtcttaaaaataaaacccaaacccacagccagccacccattcgagctccccaggatctgggggcggactgggtggtgggggttgttgagcctgcctgggccacaagcctgcttctgcacagcctcctgctgggctgggactggccctgtcccggagtgcccgtccttgtgtcccggggctcctgccctaagcagggatgaagatgaaaactaggggccttttgctagggtgttatgagagctctgtctgctctttctagaaaagacagggatttgagctgggtgtgggcagtttatacatagacggctgagggcagctctgtgacttgggcaaagcccactgtgtgtgggggtggtaggggaaccattttcttttcctgtaaatatttttatacccggtaggaagaagcctgcaggtcctattgtgtgagcacaatgggctctccttctccaggagtgttttgtgtttccccttgaagagcagcagggagggagctggggagagggggacatggtgaagggggtggagagacgggactgcagggatgggccagcgcagagccaggaagccaggaaggtgcaggcatgatggcaatcaccctttctccatgagtgcatctgagaaatgtttctttttgcaaaaggcaccttatttattgtagaacaaatagaatttgcagaggaacactgtactctcctgggttccctcccatccaagacgaagcctcttccactgtggtctatctccttccagaagctttctggtgcttgtctgctcaggacgccttgcacctggccatagcttcgcttgggcccccaaccctagtttaaagatctcccttctccttccccatccccagataagtcagtccctgaggattggaggtcgtcacagacgctgagtcctaccgtagtggtcatggcggtcctgtgcattatgcacctgcctgtcaggtgccaactcttactgttcccattttacagatgaggaaactgatgctcaaagtgactagacacactgtgagtcaggcagagctagggctttgtaggaaggtccgggcgtttctgcagcccatgtaggtcactagcctgccaggacgcgggtcagacatcaaacacccccagacagaggccccctccattccccctactcctttttaggaaggcgtctcatcagccatcagagctgacaggctctctggagccaccttgttcaagttatcattgccctgaggggaaacagaagcctagagctggggagaggcttgcccaggcactggggccctcgcagttctggcctgtgggtgtgtcccccstgcccggagcgacctcggggcaccagtgctgtagctgtaggtgggtggggagcaaccatctcyccagacccttccaaggtagcggtgacagcccaaggctgggatggagagggagagcctggctgtggccaggccctacatcagtgcctgtcctgggttcaagtcctggcatcaccaccctgcctggatgctgggtgagcccctccacggctccgagtctcgctcctcctctgcagaatggatgagatgcagcccggcctcagaggccttgggaggacttggggagacccaaaatggaggacatgctaggcagggggtgcgcacacaggctctgctggctgggccatcagcttcatggggagcaccacccccccagacctgggcctcactccccacccsctcctgcccacaggtgccactggacgagcgcatcgtcttctcggggaacctcttccagcaccaggaggacagcaagaagtggagaaaccgcttcagcctcgtgccccacaactacgggctggtgctctacgaaaacaaagcggtgaggcctggccccgggcrccacactgagcctccccgctttctccatgtgtgccccctcccccaactcggaaacttaggccccagacgccaccgtcacagcctgcacgcggtcaccagggccagagcaccacctcagcccctcccctcccccaaactgggctgccctgggtgccctctctggacggcagctcattcttcatctctggggaatatcgctgactccttctgtccctcataaccaactgtcactcactcctccccatccctcctaatctctcttcagtccctccagctggctccagggcrttcctcctgccacctccttcctcactgggcttcctgcctctcctccgacccctcccaccctcgacagccacagagagctgttggaggcacaatctggccattccttgcggtggcttgcccctgccctacaggtgggtaggtgtccgagaaggacatcctatgggagcattgtgccttatcttttccctgagccctcagggaagccccacctggttgagccacagacctgatttcttcaattgctcatttctccagagcagccagaaggacaggcctgggccctgtatttcacggaagatcaatgttagagcaacataaagtcaagagcaacctcgtgccccagagtagtggttctcaactggtagcacgtccaaatcacctgaagggcttgctgaaagacacggtgctgggctttcccccagagtttgattcaggttgggagccaakatttgcatctcttttttttttctttttttttttttttttgagatgaagtctagctctgtcgccaggctggagtgcagtggcgccatctcagctcactgcaacctccacctccctggctcaagtgattctcctgcctcagcctcaggagtagctgggactacaggcgtgcaccaccattcccagctaatttttgtatttttagtagagactggttttcaccatgttggcccggatggtcttgatctcctgacctcatgatctgcccacctcggcctcccaaagtgctgcgattacaggcgtgagccactgcacccggactgtaaagatttgcatttctagtaagttctcgggtggtgttgaagatcagagaccatgttttgcaaatcagtgccctacaggttctgagctactttcaggaactgtgttgtatagtgacacctagtggcagggagtagcatggtagccctgctgtatgagctattccatcagaactgctttgccccctgctactggtgtaagtttctagacctaattctccagaggacgcttgtgtgatgctcagaacctaggaaattggtgggggcagttcagggtaatggtcaaataccccaggctctggagatagatagccctggttcatgtcctacatctgctacttcccaactgtgtgaagttgggggtgatccaccttttgaattgggaaaattctgtgaaattaagcatgcaatgcccttagcacagggcctggtatgtaagaaatgcttaactagtggagctgctgggaacagaggcaatagcagcagtagaaacagaacaacaacctcggccaagctcgctgagtccttgtggtgtgccaggcactgcagattatctcactcagtcctcacatggctctgtgaggcaggaatggttattaccctggttttgtttttattttaaaatgttttccccatcctgaatattcttgattccctggttttatagatgaagaagctgaagtttaggcatttaaggaattttatcctcagcatcacacagacactacccagtgaagccaggaattgagcccagagctggggtctaggttgctgtggatgccacactgccccaatcaccatgatagtgacattctcccctctgttcctctcttgcctyttctycctttcccttctcctccccactttgggccacactgagtagggccttgaagccaggtgggatttgggcttggccgcaccttaaccmtcagggaccctctctcttgcctccctcaggcctatgagcggcaggtcccaccacgagccgtcatcaacagtgcaggctacaaaatcctcacgtccgtggaccaatacctggagctcattggcaactccttaccaggtaaaggagcacccatcccaggccacaatgccctgcacaggcatctggakctggccaggggaggggtggccctgagcccattgctttcagccccatgtttgcggagagaccaactaggcttagagctgtggatggagacctcattgtttgcctttcgcatctccctaagtccttgagagcctcctggaagatgttcagtgaccttccctcgtaaacctgtgggtcagcactgtgttcgtcaggagttactcttcttggcatcctgcttttgcttcaccttggctgaaattccctagaagccttacgggaacaacaytggcctctctgatgatccctgggaactagagggcaggggacatgcctgcctggggggcaggtcatgccccagggacttgagagtagagtcatgccttcattctgtggtgatggagggcctgggcattcctggattcgagcggcattcctggattccagcagcattcctggattccagcgtgactctggctttgtttcactgtgtctgcttgggcgagtcaccccccctcccctgaatctcagcctcttcagtgtctacaaagcacaggcactaagaggactgccctcggggtgttgtgtggaccctggaggggcacaggccaacccagagccagggcagaaagaagaactgttattgtcatatcattaacaacagtggcagggtcacagcccaggaccagttatctcgctggatcttacatatccttgagaatgaaattgaaggagggaaaaattccttttgctgtattttgtccctccccacatgcctccctccccctgtggacacttaagccacactttggcctccacagcygaaatctgaagggaaacccaagaaggtagtgcttgacccttgaacctgggggctctgaycttgtgttgtttgtgctttacagagtttaaaacctaacccaagagtggggtggatgtgacttattacccactctaagaaatgggtctgcacggatgctggactcaggttttgggctgaggagaacacagccagaaagaaggctgctcccaccccygccggcttgctggtcaccttgggacaggctggccttctctgggcctgagcctgacctcagagctgatgccaagggatcagttctctgacatcctctggtggagggcaaccacagagggcagcygctcatcaggcactgtctccacagggaccacggcaaagtcgggcagtgcccccatcctcaagtgccccacacagttcccgctcatcctctggcatccttatgcgcgtcactactacttctgcatgatgacagaagccgagcaggacaagtggcaggctgtgctgcaggactgcatccggcactgcaacaatggtgagtggcctgtgggtgcagggtcggtgggagggaggggcaggacctgggttattgctgaatggtgacacctagtggctgactatggtgtggcaaccctgctctacaggctgttctaatttcccttctggggttataagaaaccatgtaataccacccttagtcttctttcttgatgaaaacagttttgtgctgctcaggaaaaaagtaggaaattattcacagaggggtgtggttgttgagcccttggaccctgagtcacaaagtcacaatcctgattctgccattttccagctacgtgaccttagggaactgacttacctcttggaggctctgtaaagtggggataatgccttgtgtgtcttaggggggttatgaggatttagagtctacctcatgcttggtaaagattttttttttaattttatatatatatatatatatatatatatatatatatatatatatatattttttttttttttttttttttttwaaaccaccaacctgcagggkgatttggaaacttcactgcctccctcagggcctcattgctctcatctgtaaacttatggggtgactcttccagctcactcatttattcaacaaacatttttagtgtctactctgaggaggcccagatttaggcactgggtgtgcaacaagggagcaagaaacattccctgccctcctacaattggcagtctggtaggggagacagatgatagacagatgaggatgccagcacgatggctcacagctgtgctgggtgctgggtggagccaacctgggagcctgagggtgtgtgtgtgttgggggaggggtcgatcagggcaggctcccttgaggaggttatggttcagcttcagcagagacctgaaggagaagtcccagacctgaaggaggagatgccagaagtcccagggcccctcatatcctgcatagaggagaggggaggagtgttccaggcagaggtaggcagtcagcatgaagggagacccacaggtggtaggggtaggcccggaggaggaactgcacgaggccctgaagcagggagggggtgacctgaaatggggctggaggggggcctctggggtcaggtctggaaaagccttgaaggcctctaaggaatttgaacagaaaggctgaggatggtcttccaaggtgagggtgggtccctgggggtctttctgcccctagggaaggaacaacccagtcctggacactgaactgcttccaggtgatctggcctgagggaagctcctgcccccgccccacccttgggcgcagtsccacatggtgcagaggtggaaggttgcaggggacggagtgggcgccaatggcctctgggctgctgccgtgggactcagctcaccccacccctcctgctcgcctctccagagccacctctgccctgtctggaatctgccaagcaggaggaaccaggtcttcaatcaggccagcccctgccacctgggcccagctgcccacaaagggcctcctgttcccaggtcccrgggactgtgggctgggactgggtggaggcactcaaggctctggctgcctggcccagggccctcccgcctccccagcccctggcctggtgccatctctccaggtttccaaggctaacggctgacctggcctggcagggtgggtgacctgcgccagatagggaaggggtgggcacagaacaaggtggggaagggccacctcagtcccccatgtgtgcagtggggatgatgataaacttgagcttgagagatgattgggaagagctggtctgggtggggcacttggccgtgggcctggcacgcacagtgagcactcagtggggaggccatgggggagttcttggttctaaggtgcagtggaccagagggaggcccaggagagctgctgggccagggaatgaaggggtgtcctgtgccaggaaggtgtcctgccgggtggccccttctccccagggcgggagctgacgaggctggtttcaggccttccttccaccctgcggactgtgagaaagttctctgcttcctccgtcttggaggctgggcttggaatttgtgaagcctggaattgctcactccgggggctgccaggaagtggggggtggggggaaggaggccaactgggcggacaccagcggtcccagggaccccttcacatcctgcattcctggagcagctgggggtggcaggaggcagctggggcactggctgtgccgggtcctcagtgttggcctggggtgcagaggtcaaggcttcttcctgtctgaccgtggtccccctctgtctgctgcctgggagtgaggaatgcagtttcctttcttggaaggtctccaggtctggctagagtcagctggtcctgggttcaagccccgctctgccatccactagctgagtagcctcgagcagtaactgcctctctgagcctcagttctttccctgggaaaagtagggcacagtgagctgaggattcaacgagctgatgtgtgtgcagcctcagccagggctggggcctcagtttcccaagactgccataacaaataccacagaccgggcagctacacagcagaaatatgttctctcccagctggaggtctgagtcgaggkcaaggtgtcagcagggctggtttctccgagacctctctccttggctggtggccggccgccttctccctgagtcctcacagggtcatgcctctgtgtgcctgtgttttctcttctttcaagaagaaatgtacttttctttttttctttttcttttttcttcttttttgagacagaggcttgctctgtcagccaggctggagtgcagtggcgcaatctcggctcactgcaacctccgcctcccaggttcaagtgattctcctgcctcagcctcccgagtagctgggactacaggcgtgtgccaccacacctggctaattttttgtagccagaatggtcttgatctcctgatctcgtgattctgccgcctcggcctcccaaagtgctgggattacaggcgtgagtcactgtgcccggccaaaatgtactattcttttaagggcactagttgtattggatttggtcccatcctcatcccctctgtttaacttamttctttaagactctaggaccaagggcgggtgcggtggctcaggcctgtaatcccagtgctttgggaggctgaggtgggtggatctcttgaggtcaagagtttgagaccaacctggccaacatggtgaaaacccatctctactaaaaatacaaaaattagctggacatggtggcgggtgcctatagtcccagctacttgggagctgaagcgggagaatggcttgaacctgggaggcggaggctgcagtgagccaagattgcaccactgaactccagcctgggcgacagagtaagactcttctcagaaaaaaaaaaaaaaaaaaaaaaaaaagaccctgggtccaaatataatcacgttctggggtactgggggttaggactccagcatatgaatttggggggtgtggagacacacttcagcccctaacagctaggctcacgggaagagctcaggaggggtgaccctgaaacttgtcacactcagcggctgggtgtgcagaaagagagaatcccaagggtcaaggctggcyggcctccctcccgctgtcccggccctctgcctcaccttctcgccacctggaaagcaggcctgccctgcacacctgacttggtgcatgcaggatgaaaattccctctccccgtgggagtgcctgcaggtaacgcactgtccagattttccagtcaaaacttggtttctaggaaaccatgcccttctgagaggcgggtggggtggcggggggacytccttccctggcccaggtgggcagcccccacccagggctctgcatgctgctccagctggaacatccctgccctgctcctgtcactcctgcctgacttcaggtctctgaaatgcaggagtgagactcccacaggcccccgtccccatccaggcagctgcgctgtagggatgagggctgggcctccccctgctcagctccctcccggctccgacaggcagtgatttctgtggtcagctgggtgtggggagaggagggacccagagaggggctttttctctgccggtggtgactcagcccatagtcatggcagtgggagccttaggtttctgatgcacaggcttccgtttccccttcctgggctttggggatgcggtggtcagaggcacgcggccaggggagtctgcctgctgcctggctcggtggcgtttgaccaccttcttaccccaagtcagattttgtaacttcctgccaattgcctcccgggcactgaatctggaggtccacgcctcactcaggggtttaccttgctggcgtttgggccactgacagcaccaacagtgacaaaaattcagaaatggtgttcttctagctgttattaatagcaaactcttccattcttttttttttttttttttttttttttgagacagagtcttactctgttgcccaggctagagtgcagtggcgcaatctcggctcactgcaacctctgcctcctgggttcaagcgattctcctgcctcagtctccctagtagctgggattacaggtgcctgccaccatgcccagctaatttttgtatttttagtagagatggggttttgccatgttagccagactggtctcgaactcctgacctcaagtgatttcccccacctcagcctcccaaagtactgggattgcaggcrtgagccaccacacccagcttcattctttaacaaagttattcaagcatctgtgccaggtactgacctggacttagcagtaacaggacagaccccgggcccagtggggcaggcagctggctcctcagttattgataaaaagtgtggcgcagagcagtgctggaccctgatctcctgtccctacactgtggcccagggagccccgcagtggacctgtgaggccattgttccattgttcagaagaggaaacaggccatttcgggttcagtgatctagaaccaggctctgaaacctatggcctatgggcccagatcagccaattgcctgtttctgtcaacaaagtttattggagcagaggcacgctcatttgtttctggatggtccgtggctgtttttgtgctgtgactgtagaggcgagcattgcgggaggggttttatggcctgccgggctgagaatatctgctgcctagcctgttccaggcaaagtttgaagggccctgatctagcagtaagggaggaactggggctcgaacaagggtctctgggtgcctctagggccattctgggtggctgcttatgggacgggagcttttagtcctggctytgccactccctgctctgtgaccctgggcccgtggcctgtcccctaacggttgtctcttcatctgtaatcatctgtaaagcaataaggtgaatgatagtgcccaggtcttggggtggttgggaggatttcaggagctaaggaggaggcaagggggctgccttgtcactgttggtggtggggtcattactgcttttgcctatcagatacaaccatgactgctctgatgacgaggaaagtgagggtcccagctgcccctcctgaggtgcatgccatgtgtgtggggggggttttggtcagttctcagttggtcttggtagaggccactgggccatctgctgacctcctctctccctccgtctcctgggcaggaatccctgaggactccaaggtagagggccctgcgttcacagatgccatccgcatgtaccgacagtccaaggagctgtacggcacctgggagatgctgtgtgggaacgaggtgcaggtgaggccagacgggctggtgaggaaacctcagaagtcacccaaggacccagcaggggagggcagggggtggggtacagagatggggctctggggcgctgccggtttggaaggagatgacatgcttagatttggacaagtgsagggccagtgcacgtggagatactcgctgtcttattcatcacttactgggcatctgagcacctaccctggacgaggcactggggtgcagctgggaatgatgtggacaaattcctggccctcagggagctctccgtatagcaggagaaacagacatttggcaaataaatgtacacttccatgtgcaggcaaagcagggagggagtatggtattctaggtagggaaggcagcctgtgcaaaggccctggggctggcccttgagtctgaggatcctacaggacacccaggcagatgagttgggacctgtgggaatggagctcaggagagagggcagcagggagggtgaagcaatgggccagtcgcggaggaggtgggggctgcagcggcctggcttgtgggaatgcagagagaaacaggccagctgagcgctctccagcccctggcctggcttgtgcctcctcaacctagatcctgagcaacctggtgatggaggagctgggccctgagctgaaggcagagctcggcccgcggctgaaggggaaaccgcaggagcggcagcggcagtggatccaggtgggtgggcctggggccctggagcggggacgggacctgcagcyggtgcggtgccctcagccctggtgccaattcagctgctctgcccacagatctcggacgccgtgtaccrcatggtgtacgagcaggccaaggcgcgcttcgaggaggtgctgtccaaggtgcagcaggtgcagccggccatgcaggccgtcatccgaactgacatggaccaaattatcacctccaaggagcaccttgccagcaagatccgaggtaggcagccacccccgtgctcgacgggccctscaggggccaaggtggactttctttttatttcatgattcatgtaaatttcacagcaatgacttgctcattgatcatttgtaagaattagagccaaatctgcactgtggtactccaacccctgtgagttgttttgtggctattatttctataagcccagaacttgaagagaaaaatttttgttctggaggttcaagccttcttttcatctctgactcgtcacagatttttaccatgtgtcattttaaagtacatttacgttcagcaagtatagctttcccaggtcagtttattctgtcacccaggctggaatgtagtggtgcgatctcagctcaccacaacctccgcctcccggattcaaacaattctcctgcctcagcctcctgagtagctgggactacaggcacacgcgcgccaccatgcccggctaacttttgtrtatttagtagtgatggggtttcaccatgttggycaggctgatcttgaactcctgacctcgtgatccgctcaccttggcctcccaaagtcctgggattacaggcatgagccactgtgcccagactgtaygcctttctcttcccagccagatgggatcctttcaccagcttggtccccataacacatctgcagagctcagttttagcaattgtcagttgcccatgggacgttctttttattttattttatttcattttattttatttgagacagggtttcactctgtcgcccaggctgcagtgcaatggcacgaccttggctcactgcagtctctaccatcctcccacttcaaccccccaagtagctgggactacaggcatgtgccaccacgcccagcacatttttgtattttttgtagagacagggttttgccatgttgcccaggctggtctcaaatgcctgagctcaagcaatccacccaccttggcttcccaaagtgctaggattacagatgtgagcgactgtgcccagccattattattattattattttgagatggagtcttgatctgttgcccaggctggagtgcagtggcacaatctgggctcactgcaaccttgcctctcgggttcaagcaattctcctgcctcagcccctcaagtagctgggattacaggcacctgctaccatgcccagctaatttttgtatttttagtagagacagggttttgccatgttggccaggctggtcttgaattcttaacctcaagtgatccacctgcctcggcctcccaaagtgctgggattacaggtgtgagccactgtgcctggcctgtktttttttttgtttttttttttttttttgagacggagtctcgctctgtcgcccaggctggagtryagtggcgtgatctcggctcactgcaagctccacctcccgggttcacaccattctcctgcctcagcctcctgagtagctgggactacaggcgcccgccaccatgcctacctaattttttgtattttttagtacagacaaggtttcaccgtgttagccaggatggtctcgatctcctgacctcatgatccgcccacctcrgcatcccaaaatgctgggattataggcgtgagccaccgcgcctggccgcccggcctgttttttaagagacagagtctcgctctgtcttccaggtagagagcagtggtacaatcatggttcactgcgtgacctcctgagctcaagtagtcctcccacctcagcctcctgcgtaactgggactacaggtgcaggccaccacgcctggctaatttttaaattgtttgtagagaaaggggtcttggctgggcaaaactctatctcttttaaaaatttttgaaagagagagagagaagggggtcttactgtgttgcccaggctggtctcgaactcctggcctcagacaatcctcctgcctcagcctcccaaagcactgggattacaggcatgagtggccgtgcctggtctcctgtaggttattctttactagccagatcctgagtattggttgacagctggataggacactgagcattgacatttcttgtgtggaacaaagaacgttagctgggctgggatgggggtggacatctaaatattcttgagtgaaaatgctttggtcagaatgttctggagatggtccccacccaaaggaagaaggcttttacataattatgcagagccagccacactattccagagaggatcagcccagtttttgtaaaaccaagaggctcattgaatctactaaggtatttttcattgctgttgttctttttgttcaaacgaagaagcaagacccatcctaaaggagtttttgtctacttctagctaagcagaacactgctgacacctctgggctggcagttttcttattttattttattttcattttcatttttaatttttgtgggtacatagtaggtgtgcatatttatggggtacatgagatgttttgatcaggcatgcaatgtgtaatagtcacatcatgggaaatggggtatctatcccctcaagcatttatcctttgtgttacaaacaatccaagtatattcttttagtttttttttttttttttggacacagagtctcactcttcttgcccaggctggagtgcagtggtgccatctcagctcaccgcaacccctgcctcccaggctcaagtgattcttctgtctcagcctcccaagtagctgggattacaggcacataccaccacgcccggctaatttttgtatttttagtagaaatgggatttcaccatgttggccaggctggtctcaaactcctgacgtcaagtgatcttcctgcctcggcctcccaaagtgctgggattacaggcctgagccactgcacctgtgcagcctcttttagttacttttaagtgtacaattaaattattattgattatagtcaccctgttgcgctatcaaatactagggcttattcattctgtaaccagaaaggggtcccgatccagaccccgagagagggttcttggatcttgggcaagaaagaattcaaggtgagtccatagagttaaagcaagtttattaagaaagcgaaggaataaaagaatggctactgcgtagacagagcacgagggctgctggttgcccatttttatggttatttctgatgacatgctaaacaaggggtggattattcatgcctccctttttagatagagcatatagggagacttcctgacgttgccatggcatctgtaacctgtcatggtgctggcgggagtgtagcagtgaggacgaccgaggtcactctcatcaccatcttggttttggtgggttttgggccaccttctttactgcaacctgttttatcagcatggtctttatgacctgtatcttgtgccgacctatctcatcccatgacttagaatgccttcaccgcctggcagtgcagcccagtaggtctcagcctcattttacccagctcctatttaagatacagttgctctgattcaaatgcctctgacatttctactttttgtgcccattaaccattcccatctccccctcgccctcgactaccctctccagcctctagtaaccatctttctactctatctccatgggctcaattgctttgttttctgcttgtttatttgtctgtttttaccttttttattgctcccacaggggaggccccctccaaaatgtcaatttgctttaatttttagatcccacaaataagtgaggacatgtgatatttgtctttctgtgcctggctgaatataatgacctccagctccaaccatgttgttgcagatgactgaaactcgttcttttttacggctgaatagtaccccatcgtgtatatgtaccgcattttctttatccattcgtctgttatggacacttaggttgcttccaaatcttggttgttgtgaacagagccgcaacaaacacgggagtgcagatatcgctgcgatgggctgatttcctttatttgggtatatacccagcagtgggattgctggattgtrtggtagctctattagttttttgaggaacctccaaactgttctccatagtggttgtactcatttacattcccactgtgaaccctgaaaatttgaggcaggtctcagttaaattagaaagttgattttgccaagttggggacacgcactcgtgacacagcctcaggaggaactgatgacatgtgcccaggtggtcagagcacagcttggttttatacattttagggaaacctgagccatcaatcaacatacgtaaaatgggccgggcacagcagctcaagctgtaatcccagcactctgggaggccgaggcgggtggatcacttgaggtcaggagttcgagaccagcctggccaacatggtgaaaccccgtctctattaaaaatacaaagcttagctggatgtggtggcgcatgcctgtagtcccagctgctctaggaggctgaggcatgagaattgcttgaacctgggaggcagaggctgcagtgagccgagatcgagccactatactccagcctggtcaacagagtgagaccctgtctcaaaaaaaaaaaaaaaaatgtaaaatgaacatggttcagtccggaaaggcgggagaacttgaaggaaaagcaggacaactcaatgcaggcatgaggcttccaggtcataggaagaaaagagacaaatagttgcattcttttgagttgatgattagcctctccaaaggagggaagcagatatgcattaatctcagtgagcggaggggtgactttgaatagaacgggaggtgggtttgctttaagcaattcccagcttgacttttccctttagcttcgtaattctgggggcctaagmtattttcctttcacaccaccagcagtgtacggaggttcccttttctccacatcctcgctagcatttgttattktctktyttttggataaagccattttaactggggtgacgtggcatctcattgtagttttgatttgcagttctctgatcagtgatgtcaagtaccttttcatatgcctgttttgggttgagtacctttcatatgcctgtttgccatttatatgtcttctttggggaaatatgtattcaaatcttttgcccatttttaattggattactaggatttttttcctatagacttgtttgagatccttatattttctgattattaatctcttgtcagatggcagttttcttagttttttgccatcatggtttcagaaagatcagagtccaatctcagaacrccttgtcatttttcctgcatggatttctcatctttatccactatttctctgaaatcattcagcttgctaatgttgcccccagtggttttttttttttaaataatattggccaggtacggtggctcatgcctgtaatcccagcacttgggaggccaaggcaggaggatcacttgagcccagggagtttgagaccagcctggataacacagtgagactctgcctcttaaaataataataataataaaagtattgatgggggctgagcgcggtggctcacgcctataatcccagcactttgggaggccgaggtgggcgggtcacctgagatcaggagtttgagaccagcctggccaatatggtgaaaccctgtctctactaaaaatacaaaaaaaaatcaccgggcatggtggtgcacacctgtaatcccagctacttgggaggctgaggcatgagaatcacttgaacctgggaggcagtggttgcagtgagctgagatcgtgccattacattccagactgggcgacagcacgagactctgtctcaaaaattaataacaataataatatgatgggaagagagagttgggagagggctgaaaaattactttttgggcactgtgctcattacttgggtgatgagatcaatcctacccaaaacctcagggtcacacaatgtacccatggaacaagcctgcagtgtaccccctgcatctaaaataaaagttgaaataaaaatgataataatattaggaggctgaagtgggaggattgcttgagcccaggagtttgaggctacagtgagctttgattattccactgcactccggcctggacaacagagtaagaccctgtctcaaataaaataataataggccgggcatggtggctcatgcctgtaatcccagcactttgggaggccgaggcgggtggatcacgaggtgaggagtttgagaccagcctgaccaacatggtgaaaccccgtctctactaaaaatataaaaattagctgggcacagtggcacgcgcctgtagtcccagctactcaggaggctgaggcaggagaattgcttgaacctgggaggtggaggttgcagtgagctgagatcgcgccactgcactccagcctgggcgacagagcgagactccgtctcaaaaaaaatataataataatgataataatagtaatacagtagcctccagcacctgggctctgggatggctgggaggtgctccttggggagcccctgctgacccggctccctcggggcacagccttcatcctccccaaggcagaggtgtgcgtgcggaaccatgtccagccctacatcccatccatcctggaggccctgatggtccccaccagccagggcttcactgaggtgcgagatgtcttcttcaaggaggtcacggacatgaacctgaacgtcatcaacgagggcggcattgacaagctgggcgaggtgaggcyggcaccgcccctaggagggggtctcctgagagtaggtctggtctgtcccagagggccccggctgcgtgactccgggcagccgttcccctccaaggccrtccctrtagacggggaggggctgctggggactaggggcagaggctgtgaggccagggctgttggagtcctcgtggggcctgcagtttgaggaaagagggaacattagctcccggccaccagcctttagaaaccaagagtggtgctaaaatagaaaagaatttaacagaagagagggaaggagggaaggagaggaggggagagggaaggagggaaggagaggagggaaggagggaaggagaggagggaaggagggaaggagaggaggggagagggaagggcgggcttcaggtggagtaatgagattgataaggmagaattcacaagtcacgcgccctccaaatggagacagccgttgcccttacttgacctcagttatctggctctcggggtgaacgtccttccacagtctccatcttgggctggctgcccggagcccgcatagttgtcagattgaatttatcctgtatcttagtttcctcctttatactctgaaatggggagtccacagaccataataatcccagaatctgagacctggagaggaccttggagagcaggaaagctctctcccaattttgaagctgaggaaactgaggctcagagagggtgaatgacttgcccaaggtcacccagcacctcagaagggatgagygccttctgccggcaccgaggctgcctctccacagcgctgtgccactggactgcgccctccatgccttcagagcctcatgcttctgtcctgggccctcctgggtttacctttgtggccatgagcaccaggtggccatccctggtagcaggcgccagccccagggcctggacttcgaggacccaggcaaagtgtgtggrgggtgctgcctggccacagggcggccctgctcagcccccrcggccccggcccctgcagtacatggagaagctgtcccggctggcgtaccaccccctgaagatgcagagctgctatgagaagatggagtcgctgcgactggacgggctgcagcagcgatttgatgtgtccagcacgtccgtgttcaagcagcgagcccagatccacatgcgggaggtagacccgaggctacgacccccaccccacaccctgtccactgccttccacaggccccctcgcccagggggtcccttctgctccgtcccgtcatgccatagccacgcttgcctggcacgctctctcctcctctgcttggaacatctgtgcctctgcccacctggctaattctgactcacttcccaggtctcagcttagagaccycttcctccaggaagctctccttgcgcccccaggccccttcccatatttcctgttgccttgaggcagggacttgctccagcgtgcagagctgtgagtgggcatagaccgcttgccattcctccctggcaggcctcggggtggggggctggttgaggatgaggacccctcagcggcacccaggaaggggctgtggtcaccctggggrcttcacatgtcygcggtatgccctgcagcaaatggacaatgccgtgtatacgttcgagaccctyctgcaccaggagctggggaaggggcccaccaaggaggagctgtgcaagtccatccagcgggtcctggagcgggtgctgaaggtgagcgkccccacrccstgccccggaccgtcctaggsgaggccgagccccgagcctcatccccggccaccaccaggattgctgtccctgcaaggaggcgccatggtcctcttgtgcggatgaggactcggaggcttgggtcagaccactggcctcgtcctaccctcagggccaatggagcccactgacctgcagacccccgacccccttgttccctgcagaaatacgactacgacagcagctctgtgcggaagaggttcttccgggaggcgctgctgcagatcagcatcccgttcctgctcaagaagctggcccctacctgcaagtcggtgagcagcccccacctgctccagccgtttgggccctaagttgggggatggagcccacaggcctccctctacccttggccctgacctctcatctctgccgccccacccgggcaggagctgccccggttccaggagctgatcttcgaggactttgccaggttcatcctggtggaaaacacgtaygaggaggtggtgctgcagaccgtcatgaaggacatcctgcagggtgggtgccgtcccggggtggggactgttgccaggaggatgctgggggcgcagctgagaagtggtggcagctgagggggtcagctaaggctcaaagaaaagcccagacttgcacctggggtctgggtgaagcccactcttcgctgtgtggcctccggagcagccttagccttgcgtctctgtgctttagtttcttctcgcgtccttggctttgctgggagggtcagaggagtgattagatgacatgtggtcagcagcctgggcctggagatagcatcacggccttgctgctttcagcaacgaggcctggaatgagtcacatcccaaccacagacccccaaggcgggatgagacgggtctyctttgagcagagtccagcacaggggcggctgtgggatcagtrctgtgtcctgacccttcccctgtggccctgtagctgtgaaggaggccgcggtgcagaggaagcacaacctctaccgggacagcatggtcatgcacaacagcgaccccaacctgcacctgctggccgagggcgcccccatcgactggggcgaggagtacagcaacagcggcgggggcggcagccccagccccagcaccccggagtcagccaccctctcggaaaagcgacggcgcgccaagcaggtggtctctgtggtccaggatgaggaggtggggctgccctttgaggctagccctgagtcaccaccacctgcgtccccggacggtgtcactgagatccgaggcctgctggcccaaggtctgcggcctgagagccccccaccagccrgccccctgctcaacggggcccccgctggggagagtccccagcytaaggccgcccccgaggcctcctcgccgcctgcctcacccctccagcatctcctgcctggaaaggctgtggaccttgggccccccaagcccagcgaccaggagactggagagcaggtgtccagccccagcagccaccccgccctccacaccaccaccgaggacagtgcaggggtgcagactgagttctaggccagtgggtccctgactgctgcacatggcacaggccgttcccttccggacccaggcaggctcagctctggggagggcaccctggtctgtgccttgtgggtggaggcggggcagggctgtgtggcaccgccagggagcgggcccacctgagtcactttattgggttcagtcaacactttcttgctccctgttttctcttctgtgggatgatctcagatgcaggggctggttttggggttttcctgcttgtgccaagggctggacactgctggggggctggaaagcccctcccttcctgtccttctgtggcctccatcccctcatgggtgctgccatccttcctggagagagggaggtgaaagctggtgtgagcccagtgggttcccgcccactcacccaggagctggctgggccaggaccgggagagggagcactgctgccctcctggccctgctccttccgcagttaggggtggaccgagcctcgctttccccactgttctggagggaaggggaaggagggggtcttcaggctggagccaggctgggggtgctgggtggagagatgagatttagggggtgcctcatggggtgggcaggcctggggtgaaatgagaaaggcccagaacgtgcaggtctgcggaggggaagtgtcctgagtgaaggaggggacccccatcctgggggatgctgggagtgagtgagtgakatggctgagtgagggttatggggagcctgaggttttatgggcctgtgtatccccttctcccggccccagcctgcctccctcctgcccgcctggcccacaggtctccctctggtccctgtccctctggtggttggggatggagcggcagcaaggggtgtaatggggctgggttctgtcttctacaggccaccccgaggtcctcagtggttgcctggggagccggacggggctcctgaggggtacaggttgggtgggccctccctgagggtctggggtcaggctttggcctctgctgcctctcagtcaccaagtcacctccctctgaaaatccagtcccttctttggatgtccttgtgagtcactctgggcctggctgtcgtccctcctcagcttcttgttcctgggacaagggtcaagccaggatgggcccaggcctgggatcccccaccccaggacccccaggccccctcccctgctgctttgcggggggcagggmagaaatggactccttttgggtccccgaggtggggtcccctcccagccctgcatcctccgtgccstagacctgctccccagaggaggggccttgacccacaggacgtgtggtggcgcctggcactcagggacccccagctgccscagccctggtctytggcgcatctcttccctcttgtcccgaagatytgcgcctctagtgccttttgaggggttcccatcatccctccctgatattgtattgaaaatattatgcacactgttcatgcttctactaatcaataaacgctttatttaaagccagttgccttgagtggtgctgttggggtaggggacggggggcctgggctggggactatgtctaggcccccatacggctcggctttcggggcttctcacttgactgagtgcctctatgtttatgatctgagttcttattccattttacagagaaggaaacaggctcagcgagaagggacttgtccaaggtgacctgccttctggtggcagcacaggcagcttcctcagccagacctgtgccgggtgcccctcgggcagccttgggtgatggtgagtccaagagggatggcagcaggcagcagcttcaaggccactcagggccctggggtgcccacagaggggtgggcccaggctcgggctggatccaaacagtgatgccagctccttcaacgctcccgatcacactcctgtttaccaagcgctcactgtgggccaagcgccttgtgtgcaggaacagcagcctcgagagagctctagaaagtggacacagtcgtcaccaccatttcaccgatgtgtacactgaggccttggaaggtggggacctgggctgagcctatgtggtacaggaacagccctcgagcccctgcagctgttgggggtgggttgccccatctatgggtaaaaacatgtccctactggtggggtggcagccagtcaccttggggatgttggcttccctggtgccagcctgtccatggtggcctagggcttgggcctgggcctccctcggtcaacaagggctgaggtgcagaacacggggctgtgtggccggagaccagggatgcggctgtcccttgctgttgtccttggcaggtcactgagcctcgagatcctccatgaggcctccctgggccctagtgagagcgtaaggagatctgcaaagcactgcgctccaggaggtagccccacctgcctcagtctctcccctcttggccaagttgagcccaggagggtgttgggaggagggggaactgagggggaactgtgggtgggaaaaggccacccagctcctgcctgggaaatgactcacacgacaaagggtattcgcctgccctgttcagtgcacaggactgatggtctcagtgagagggaaacaggcccaggcgtagggctgttctgccaccccaggacctgaactctcctgcctgcttctgcggacgctgtacttggggcaagcactcagcgccccctggaggccaccagccggtcagggctgcatcacgtcctgtgttgaatgcacagggaaaggagcccaaacactggccacgatcactgaatgagctggaggcagagcccaggtgctccaagcaggcctgccacgagcccaaggaagaggctgcacctggctcaacgccgtctgccggaaaatgcataatcaacgtgcacctctgcagcgagtgcaagtgtatatggctccaagaattgtgcagtgaccaacctgcacaaccgcacgggcttgaaggtgaggatgcttctgggcctcaaaccccgcatcaccatgtcccagttgcaaggccctgagcatttacccccatcagcctcagctgcctcactgggataatggacggaacacacagggctcctccgctcatggaggcacaggccgcagccatcaccggccctggctgcctctgggccctggtctctccacctgtgaagggggcgctgggataacacgacattcgagatggccctacctgacctctcctctcgactgaggtgcggcgcactcctggctccttccccgagaagagctgccctctgcccgagccccatccccagacctcgtcccctcccctccctgggctcccatgagaacccagtgatgactcaggccagaagcgcactgaagacaggtttattgacactcctgcttcggatcgagctacatggggtaaggagggacagttgtggagagcaggagggccccggggttctggggagcagcagagagggagacccagggttgctggtgccactgtgagcacaggcctgcaccacacgccttcccaggaaggcctcccctcacccagccaggccctcctgctcccttcccacatgcagggtgggacgggcctgtgcatggcccccagatgaggacccaagctcctgcaggggcggtggccttcagtcaagacagctgggaggcagcagatccgtgattaggctgggacgctggctcccaggctcgggtggtggtgcagcggcctctccagccccagcccccaggaccattcagactggtggtgtcatggatgaggagcacctctgcctggcccagacatgcttggagcttaggatgggggctcctgggcagtggggaaggggcccagggcaggggggagcctcatacgagtctggctggcacaaggctgagcaggagcccggggctcacagtggccgaggcagggctaggaccaggcccaggtgggcgggcagcactcagctgctgtggtaratgcggaggcgctgggcgatgtcctggcggcacagcgggcaggtgcgcagtggctggcagcactgctggcagcagcagacgtggccacagttgaggaagatcatctgggcctggggagggagagcgggagcatgtggctggccctaccaggttccaggagtcccaggcccgtctttttttttttttttttttttttgagacagagtctcactctgttgcccaggctggagtgcagtggtgggatctcagctcactgcaacctcagcctcccgggtttaagtgattctcctgcctcagcctcccaagtagctgggactacaggcgtgcaccaccatacctggctaaattttttgtatttttagtagagatggggtttcaccatgttggtcaggctagtctcgaactcctgaccccaagtgatctgcccgcctcggcctcccaaagtgctgggattacaggcgtgagccaccatgccggcccccttcattattctttagcatctttaccataaacgcctgatagtggggccttcgggcatttgaccaccacagaaacagaacaggcacggccgaaacaggtaacctaggccttctgttagcagtttgctgtctatttctctatagtttgtaaaaaatataaatacccatataaatgccccaactgattctttcttaaataaaactggggattatattcctgcgctctggacaggcgacggaggcctattccgccggcccctgccggagggcacgcagggtgttcaggcttctttcttgttgatgcacttgcccaggccctgaactcctcagtctacaaacaatcccaacccggagcagcagccactgactcaggaccacactttgcctcagcatctcctgctttcaggaactgatccaagctccgctcaaagctgtctggaatgccaagggccccagaacagggattatatttggaaccaataggtccatccatatcatggcatgagtcaggtcaacgggagaccctggaatcatcaaactgcaaacatggctgcttttctaagtaggatccctcagtggaggcaaaggaggatttgtatttcattcactgctctgtgtaatttttagagtaagtgttaatgaatttttaaaagatgattttttcttttttttgagatggaatctcgatctgtctgccaggctggagtgcagtggtgggatcttggctcactgcaatctctgcctcccgggttcaagcgattctcctgcctcagcctcccaagtatctgggcttacaggcgcccaccaccacgcctggctgatttttgtatttttagtagagatggagttttaccatgttggccaggctggcctcaaactcctgacctcaggtgatccacctgccttggcctccaaaagtgctgggattacaggcgtgagccaccatgcctggccaaaagatgattttctaaagcctctgcagggtaaatcatgttgttgatatttcatgatttgggaaattttttcctaatgtatttattaagtaggaacaaaaagaaaaaggtccggaaaatgatgtgagcgcagctcatatttgggtcatgggaccaggggtcatctttatttcctgccttctttctagatgagcacagtctacttagagaactggagaaaacacgttcagagacaaccctgtacctgcagaatttgaggagggtggccacaggcagggcaggcgggtggggagggccccggacttacctcccgttccaggcacacgacacactctgaggcctgcacctccagctctgcagggggagcggatggcctcacagactcaggaggctcctggggggccgtaggggtgacgacctcacccattggtggtttcagctctgtggggaccagacagacagactgagccagggtcatctccgctgaccctaacccctgggggctcattgtggccctgcccatccccatggtgagtgagctggagggtgggggagcctctgctctcagatctgagggaagtgctctccttgccacacactctcttcttctcttctctgagcctcatttcccatctgcagaatgggagtgaagtctctctctgcagggatggccgcagcgcttgttaagtgggtcctctgatctctaatgtccccgggacgcttcatagccaccctgcaagtagggcttggcactttcagagatgagacatttgaggctcagagacggggagtcactcaacccagggccatgtggccatctggtgatgcagctgcagatccctggggcaggagctctcagtgaagggccagctcttggcttctccacctggttgcccaggagacaggatgggctgctgcccatcaggtgacccaggggagcagaatgagaggccccccgcaaggctgttcccctgcccccagccccacagagtccccagcatgctggctgctctgccctggagtcagcatcccctgctaagacatcagaagcagcccttacaaaatgctaagtctcttttttttttttttttttgagacagtctcgctctgtcacccaggctggagttcagtggcgcgatctcggctcactgcaacctctgcctcccaggttcaagcaattctccttcctcagcctcccgagtagctgggattacaggtgcccactatcacgacaggctaatttttgtatctttagtagaggtggggtttcaccatgttggccaggctggtctcaagcttttgacttcaggtgatctgcccacctcagcctcccagagcgctgggattacaggcgtgagccaacgtgcccggctgctaagtctctttttctatcatgcaacgtgagccacccacttccttgactctatccctcgttcccttcctgatcacggttcactttattctacggcttgaattacaagcattattttttataacaggaaaaactaaagtttttctttttttttttgagatggagtctcactcttgccaggctggagtgcagtgtggtgcgatctcggctcactgcaacctccgcctcctggattcaagtgattctcctgcctcagcctctcctcttgcgtatctgggactacaggcacacgccactgtgcccagctaattttagtagagacagggtttcaccatgttagccaggatggtctccatctcctgacctcgtgatctgcccgcctcggcttcccaaagtgctgggattacaggcgtgaggcaccgcacccggccacaactaaagattttttaaaggctgttacaacactagaccctctaaggctatcagtgcttccccccaaaccaccatttcgagggggcattcatatatatatatatatatatttttttttagacarggtcttgctctgtcacccaggctggagtatagtatcatgatcacagctcactgcagcctcaacctcccaggctcaagcaatcctcctacctcagcctccagagtagctgggatgacgccttgctaattttttttaatttttttgttttgtttttgagacagtcccactcttttccaggc

SEQ ID NO: 6779 - DNA, 16425 bp, Homo sapiens
ataaattgttagagtaggtagttagacatgaacagggcaggagagggcctcctctcctaccaggcaaccatcaggtgatggtcaggcagttgttaaaccgtccctaaaatgataattggttgaagccaatgccagggaagggccatctcccaatagaaatacctgaaattggtaatcagcaccttccaagtaagatctcaggagttggacaagtgggctcaagcatgtgcactaagaggcaaaatggcagagtttaactggtatatgaacttcttctagaacacttgactggtagggaaacaatgcctcaagtgagcatgtgcacaatttcagtaaacacactgagcatgcagccccagcccctcccaagtgctggcagatccctgcacatgtagacagcccaacccaagggaagaaacaggggagaaataacgaaagaccccagaagcatgccaacttgcaaaccccaagtcaaaggttaaatgaaataacaaaagaccccagaatttccttgtgggcaaattgtgaaggaagtaacgaaagaccccagaagcatgccaacttgcaaaccccaagtcaaaggttaaaccatgcacttgaatctcttaagttacccacttggccctctttcaaggtcaagaatataaagcacactgggaggccgagcctggcagatcacgaggtcagaagatcgagaccatcctggctaacatggtgaaaacccgtctctactaaaaatacaaaaaaattagctgggtgtggcagcgtgcacctgtagtcccagctgctggggaggctgaggcaggagaatgttgtgaaccagggaggcagagcttgcagtgagccgagatcacgccactgcactctagcctgggtgacagaatgagactccgtctcaaaaaaaaaaaagaatataaagtgcattcaagtacttcacttccccttattcctgctctaaaactttttaataaactttctctcctgctctgaaacttgcctcaatctctctctttgccttttcccctcagtcgatttctttcttctaaggaggcaagaattaaggttgctgcagaactgtatggatttgctgctgctaaccaaatgactattcctctaccccaccaccatatataaattgtgtattcagtgaaaggctgatcaaagatccaaaagaatgcaaccttttgtctcttatccgcctatcacctggaagctcccactttgagttgtgccacctttctgaaccaaatcaacgtacatcttacatgtactgattgatgtctcctgtcttcctaaaatgtataaaaccaagctgtgccctaccttgggcacatgtcctcaggatctcctaagggcaatgtcatgggccattggtcactcatatttggctcagaataaatctcttcaaatattttagagtttgactcttttcattgacagacacaagactagtcatgccatgtaggagatggagttcgtattcaagtcgttctccttcaaagctcataagttagaagttttgttcttgtttttgttttttctgagacagaggctgactgtgtcgcccaagttggagtgcagtggtgcaatctcggctcaatgcaacctctgcctctcaggttcaagcaattctactgcttcagcctcccgagtagctggaattacaggcacccaccaccacgccctgctaatttttgtatttttagtagacatggggtttcaccgtcttggccaggctggtcttgaactcctgaccttgtgatccacctgcctcggcctcccaaagtgctgggattacaggtgtgcaccaccatgcccggtgtatgttagaaggttttcaaagtgtggaggtggctaggcttgctgctgactggttgggcaaagacaaaatcatagacagttgaagctgtcctcctgcatgctgaattgcttctggatggggccacaggaggaggattggtggattcaggtgggtccaggtggagccatgggtatcagacatgcaaaaaacctgaaaagatgtgtcaaaaggccaattttagggtcctacaatagtgttgttatttgcaggagtaattggggaagttgtgaattgtttaacctcaggaataacggctatcaaacttttatgtctgccccctagtaggattcagtctccgctcctccccacagcctaagggactctcattagctttacaaaagtggttgagtttgggggacagcctattaccatttaaactataatctaatgtcttccaaagttagctcaacccaatagcccagaaataattatgggaaaggcaagatgggggttggtgagttagctcagatctcattccctgtcataattttctcactgatacaatttttgcaaagatggtttcagcctgaaggctgcaatccccttatgagaaataaagctctcctttcaaaatttatgaagtttgttattcttcagttgaaattataaaggatacaactattagagacatttgaaccagagaaactccatcttgaataggggctgggtgaaataaggctgagacctactgggctgcactcccaagagcttaggcattcttagtcataggatgacataggaggtcaggacaagatacaggtcaaaaaggcccagctgatgaaacaggatgcggtaaagaagccagccaaaaccaagatggtgatgaaaatgacctctggtcatcctcactgctcattatatgctaattataatgctaaatttagcattataatttagcattagcatgctaaaagacactcccatcagcgccatggcattttgccatggcaacattcagaagttaacctatatggtctaaaagtgggaggaatcctcaattctgtgaattgcttgcctttttcccagaatactcatgaataatccatcccctgtgtagcatataatcaagaaataactttaagtatacacagttgaaaagcccatgctgctgctctgcctatggagtaggctttcttttattcctttactttcttaataaacttgctttcactttactctgtggacttgccctgatttctttcttgtgtgagctccaagaaccccctttttgagtctgtattgggacccctttcctgtaacacaactaaggaacaaccaaatggaagagttgcatagggcaaggtatggggtgagtagggggaggaagggtgggcatggagcttccatgtttttgcttgggatgctactcttccagcacctcaatgtgttcaccaactcaaaacctctcagaaccccatcctttaaagcaggtgtccccaatccctgggctacagactggtagtagtccgaggcctgttaggaactgggctatacagcaggaggtgagcagcaggcgagcaatcaaagcttcctctgtattaacagccattccccatcactcacattactgtctgagttccgcctcctgtcagatcaacagaggcattagattctcaaaagagcacgaaccctattgtgaactctgcatccgatgaacctaggttgcgcattccttatgagaatctaatgcctgctgatctgccactgtctcccatcacccccagatgggaccgtctagttgcaggaaaacaagctcagggctcccactgattctacattatagtgagttgtataattatttcgtttatattacaatgtaataataatagaaataaagtgcacaataaatgtaatgtgcttgaatcatcctgaaaccatccctgcccagtctgtggaaaaactgacttccacaaaaccagtccctggtgccaaaaaggttggggattgctgcttgaggggtttttatggaggttcacaatatataggtaagattttgatgactgattgaatcattggccactggtgactgaactcactttctagctcttcttccctccccagaggttgggggatggggctgaaagttccaaccctctaatcatgccttggtctttttggcaaccagcccmcataatgaactatctaggggcccccagtagtgtgacttcattaacataaactcaggcatggttgaaaggggtctgttatgaataagaaaacatgcttcctatcactgttggaaattccaaggaatttagaagctctgtgacaggaaccagggacaaaggctaaggagatatttcgtattataccatagcagtgctatttacatgggaaacaagatcaccaggaaatcctccctgaatctaaacccctcacttgcctaagaagcaccaaaggacacaggacaaacctgaggagcctctcagctggaaccaagcactatgtagcaactgtgtctctcaagaaactatgaggtcaacctcttggtgctcctggacttttgtttctagcatatttttaaattcctgtatttttctagaatgcaaatttccctgcagactcctcctaagaaaggcaaactttctaactcttctattatgctttcttactaagttaacagacacagacccagaaagaaaataaagttgtgttaacagtaaaagtcattgcatttgtgtcataattctaaccgaatgaaaacatcacaagcgatgttcatagaattgcaaaccagacaaaactgacctgaggtttgagaggagctgaatgagacaggatgatgggaggagtgagttttaatctattcaggctaagatggatcactcaaaggtaggtagtaaaataaaagaattttaaaggtagctatgttcaatttttatttgaaagcatcaatgcttggggttttgttgtgatgataaccattaaaataagatttatcttttcaacagatgttaggaaatataaaacctaaccaaaattaaggtatatcttattcaaaaggtacacattcctcttttcctgtttggttttgtgctggtaagttgcagaaagtattttcttctcaacattatactgactgacttgctagaatcttttcatctgatatagtgtcaggagaaggataactgagaaaaaaaaagaggaccctattctcagatgcatcttccaccatttaaatacctgtaactgcctgctgcgaagaggtctgcaggaaggacagagaccactttctattagttcctccatgtggtgagaagataatctggccgcctgagccacagtcccaggaaggccattaaatgccctgcagaatcaaaaccacagtgagatagcatctcatcctggttagaatggctactatcaaaaaaacaaaaataatgaatgctgatgaggatgcagagaatggggaaccttatatactgttggtgggaatgtaaattagtacagccactatggaaaacagtatgacgtttccccccaaaactgaaaatggatttattatgtgatccactgctggatatatatttttaaaaattgacatcaagttatcaaagcgatatctgtattctcatgttcattggagcaccattcacaatagccaagatataaaaacaaactaagtgtccatcagtggatgaataaagaaaatgtagcttatagacacagtggaatattattcaactataaaaaagaatgaaatcctgtcatttgcaacaacatggatagaactggaggtcattatgttaagtgaaataagctaggcacagaaagacaaatattgcacattctcaatcatatgcgggaactaagaacaaagtggatctcatggacatagagagtggaatgttggttaccaaaggctgggaagggtagaggggagggaagataaagaggggtttgttaatgggcacaaaaatgtcattaaatagaaggaataatttctagtgttcgatagtacagtagggtggctataagttattgcatatttcaaaatagctagaagaattggaatgctctcaacacaaagaaaaaataaattattgagatgatggacatcccaattaccctgatttgatgattacacactgtataaatgtatcaaaatatcagttctttcagtgaatggagcaaaggaggatgcccatcagccagcaggtgtcaggggttttctcaggtgagctgcccttttgtccatttttggcactgctggagaggagcagcccaacccgtccgtgatcttgggcctctgagaatagaggaagcttgatgtgggcctcagtccaacttaatctggaaagtctgcctaaggcatattttagagagggaggacacattttggggcacatawgttttatattgttgcaccccaaaatatatataactattatgtctcaataaaataaataaattgatgaattagttaattaaaaataaaaataaatgccctgtagggcagtatttgaggaataggatattggtgagagagattcactactaagaggttcctatttttgttaactgcattcctggtcaygaaatcatgttaatcctagtgctacacatggggttgaccaggaaaccaggttgacctgcccagggccttagcagccagcctgcccaagaggcttttcagcaaaatgctcaggtgtgtccagagccctctgaccygaagggcctcaaggagaacctctagattatgctggactgaagccctcatcaagctgctcctattcgcagaggctcaagaccatggcaaggtggggtgctcctcccagaaatgccaaaatttgacaaaaggggagctcacataggaaaacacgtgtcacctaatggttgatgggcgtcttcctctcacccatccactgaaggcctggatctccctctctatctatctctctctctctctctcacacacacacacacacacacacacacaaacacacacacacacaatgataatgccaaccctaatgctaatgyctaagttctatgttctgcttggtaattagctcactctgccttgatctcttattgcgttacctcagcattctcactatagttctayaactaggaatgattataactcttactgggtcattttgcaaatgaagaatttggaaattgaagttaattacttaaactcacacatgtactaagtggggcagaattgggttgttaaccaggttccctgactctctgcttcctaatcataaaacatatgagaatgaactatcttactgccctttatttgctcagtttttaaagaaataggaacctggaggattttaagtgcctagcatctatttagagagtaacaactactgtttaataacatttcaccccagaatgtgcctgtggctcacaatctagagaggaaaagatggcccatgttggggaggacacacccataatcaacacaaaagaaaaacctctcctgcttgttgccaaggcagccaagcattattgttcagattattcattagccaaaggggtaagggaagagaatgaaacccagtctacatttggctcaccaagataagtgtcctggcaagggacacatatactcacagaaaagggcactcttttctaatttacacaagcaccatagagactagaagtggtrcatgtgaggctaagagtgatggtttaaaaagaattggatttttactagagatgggttttctccatgttggtcaggctggtctcgaactcccaacctcaggtgatccacccgcctcggcctcccaaggcatgagccaggcatgagccactgcacctggctcgttccccatcaaacatggggattccctaagatcacagcagtcaatctcaatgatctttcctgcttcaatgttttctctgtgtattaatttcctagggctgccataacatagtaccacaaattgggtggcttaaaaccacagaaatttgttctctctcagttttggagcccaagagcctaaaatcaaggtatcagcagagccatgcgccctttgaaactccccgcagcatccttccttgcctcctcttaggtgccatgctctctcttcacatggcatccttccttgtgtttttatatcttccctccgtgtgtgcctgactctgtctcatttcctctccttatgaggacatcagtcacattgggttagcgtcctcccaatgtgctcatctttgattatatctgcaaagaccctatttctaaataaggtcacatttacaggtactgggagctaggacttcagagcatctttttggtggacacaattcaaccctccaatatgtcatagataggactgggcataaaggagtagttggctcaaaagctgctcctaaccaattctcttttggcatgttgatgactctaagaaataattctttgtaagaaaaaggagaagaccatgcctgacactgagtttattcagaaaagtcactttgcccaccgtcttgttttagggggaagaataaaactagaaatgtttatttcactatttctgccttggggaaagaagcagttgttttcaaatcttaatggaccaagttggaaacctagagaaaggtgagaaagagcttctccttgccccaggttcatttctcctgacagcattattgcttttttgatgcatgtcatctgctatggcatcctgagaaacgaaagtgtcatatagcattgaggagttcaaaacctatctaactgcattagttttccaactaatctaagtcactggcagatttaatccctttcagccagtattcaagcagacaaaatgcatttgctgatatcatgatgttgataatttttaactaaggcttcacagcctagtatggttcctccttaggatattgcagggacagcaccaaacacttggcaatatggaatgacgttgacaatgttaagctttacctaagccttatgctcctggaaaacagctatggggaaaaaaaaatccaccccccaccctccacctgccttttttttttttttttttttttttttttttttgagacaggatctcattgtgtgtgtcaccctggctggagggcagtggtatgatcacagctcactgcagcctcaacctcctgggctcaagcaatcctcctacctcagcctccctgagtagctgggactacaggtgtgtgccaccatgcccagataaattttttttgcattttttgtagagctagagttttgccatgttgcccaggcagatcttgaactcctaagcttaagctatctgccyaccttggcctcccaaagtactaggattgcaggtgtgagccactgtgcccaactatttaacaatgtttctacctatcttttcattagatagcattccatttccatcagaaaatcacgcaaatacttcctgtttattttcacagtaaaaatgctgattatcatggagtcaaagataggcttgagcagttgagatgtcactttacatgggggttgctaattgaagcccttgaaatttctgatttagaaaacagggtcttggaagagatccagttcgtggacacaaagtacagtgtgggaatgcacaacatactagcttatgtgaaacactggaagggccagaatgagaaagcactagagaaagaagttgaatgagaacacaccaaccaagcagacatgagtgaccagtatcatcacatgggcaggtgacctggggcaactttgcctgggctggggcaaatttgcctgggcgtatcaccacataggcagactggcagaagcccagacttacctggataaggtagagaacatttgcaagaagtttgcaaatgcttcccgctatagaatggagtgtcctgagatgaactgtgaggaaggatgggccttggcgaagtgtggaggaaagaattatgaacaggccaaggcctgctttgaaaaggctctagaggtgggccctgaaaatcctgaattcagcactgggtatgtcatcactgcctattgcctggacggttttaacacaacagacagtaatgagacattttctctgcaccccctaaaatgggctgtcagtctaaatccaaaagatgcacacattaaggttatccttgccctgaagcttcaggatgaaggacaggaagctgaaggagaaaagcacactgaaaaagctctaatcagtatgtcttcacagacctatgtttttckatatgcagcccagttttatcaaagaagaggcaatatagataaagctcttctgctcttaaaaatggccttgcagggaacacccacttctgccttcctgcatcaccagatagggctttgctgcaggaaacagacaaaaaaagctaaaggcaggatagagaaactgtagacaaaataataagattagttatatctcatgttgaatttgctgtagagcaaaggcccacatttgcaatggtttatgtggacctagccaacaggtatgcagagggaggtgaacaccaaaaagttgaggacatttaccagaaagcactcagcctgcatgatattaataaaagctgttgcaagagatttattatcgttatggcccctttcaggaatgtcatgggaagtctgaagctaacacaattgactaatattaaaaagagctgggctgggcgcggtggctctcgcctgtaatcccagcactttgggaggccaagatgggaggatcacaaggtgaggagatggagatcatcctggctaacacggtgaaaccctgtctctactaaaaatacaaaaaattagccaggtgtggtggcaggcacctgttgtcccagctactcgggaggctgaggcaggagaatggcgtgaacccgagaggcggagcttgcagtgagctaagatcatgccactgtactccagcctgggcaacagagccagactccatcaaaaaaaaaaaaaaaaaagcgagggggggcgggtgtggctaaatatagaaattcagtcaagtgctagaggaaaaaaattttagtgctttactgaattggctaacaggcaagttcatttgcttaaatctgatgaggagagtttgaatctcattgtgctccttcacacattgaaaggggaaaagaaagtgaagctgtgctgtcctatgagacagcctgagacgggctactggcctgaaccctgtcttttgagatgttaaatgttatcatatctaaatctaaatatcagataaatcttccctgatcgctgctttcaaaaaggcatgacaggaagcaacataaaactgtttggtggcacacatcgcatcatcagctcaactcccactttttggctaatgaacacctatccacgtggttgtggcagcaatatcagcacttctcctttatcactgcacccctttgtcactcttgatatgtcttgtgttaggtacctggcacctkccagaccaatcagacttctgagaatttgcaattggaattgacaacttccattttcagtctactaggtcagctgttcaaaggagatttatattcagggagtacaggaagtcaactttttcatatgggcaaagatgttgacccacaagaagatctacaaacaaagcacatgggcagaaagagagaaaagattcttgtgtgcaccacagtatctcagctccattttcacttcttaaggcccatctctctcctatactttcagactattgagataccttataatataaattattatagctttataacaaatccaatcctttgtttaagaaagttctcagtccttgaaagcgaaatagttctaaagtattcatatatatgtatacatataatatatatgtatatatatagtatatatataattagtcattctgacctaagggaagttaagttgcatcacaaaaagagaaagtgaaaaaagtccccctatttgagatgcacaagtagtgctaggtagtgtgtaatatactctttgctctttctctgtatccaaaaatctatagtaaaattaaccaagataacaaatttgtgagtagagttttaaattgttgcaacctctaagaagctgtgaatttacatgtctgtgtgggaagcaagaaaactaaaactgtctgtgcagaaataagaggcagaagaagccataacatctacctacaaataaaagacacacatcaaggaagcatttagccttccatgaattgcacagaattggagagtgttgacaaatttcacagatatttaagggctgggaaaggatatggagcccttcatgtagctgacatgggtgtagaattcctttctaattttggtgaggagatttattagttttattcaaaagaacattaccagtgcatggggtttccaaggagctctcctggcctctccttgaattccttacctaataccactacagacctctgtgtaggggcagatttgactttccttctggaacacagctaaagataaaatctaaagacagagatcttgtaaatttgtttgagttctttgtagattctgggtattagccctttgtcagatgagtacttgcaaaacttttctcccattctgtaggttgcctgttcactctgatggtagtttcttttgctgtgcagaagctctttagtttaattagatcccatttgtcaattttggcttttgttgccattgtttctggagttttagacatgaaatccttgcccatgcstatgtcctgaatggtattgcctaggttttcttctagggtttttatggttttaggtctaacatttaaatctttaatccatcttgaattaatttttgtataaggtgtaaggaagggatccagtttcagctttctacatatggctagccagttttcccagcaccatttattaaatagggaatcctttccccattgcttgtttttgtcaggtttgtcaaagatcagatggttgtagatgtgtggtattatttctgagggctctgttctgttccattggtgtacatctctgttttggtaaaagtaccatgctgttttggttactgtagccttgtagtatagtttgaagtcaggtagcatgaagcctccagctttgttcttttggcttaggattgtcttggcaatgcgggctcttttttggttccatatgaactttaaagtagtttcttccaattctgtgaagaaagtcattggtagcttgatggggatggcattgaatctataaattaccttgggcagtatggtcattttcacgatattgattcttcctacccatgagcatggaatgtttttccatttgtttgtgtcctcttttatttcgttgagcattggtttgtagttctgcttgaagaggtccttcacatcccttgtaagttggattcctgggtattttattctctttgaagcagttgtgaatgggagttcactcatgatttggctctctgtctgttattggtgtataggaatgcttgtgatttttgcacattgattttgtatcctgagactttgctgaagttgcttatcagcttaaggagcttttgggctgagaccatggggttttctaaatatacaatcatgtcatctgcaaacagggacaatttgacttcctcttttcctaattgaatatcctttatttctttctcctgcctgattgccctggccagaactttttacaaatttataagaaaaaattttttcacaaatttacaagaaaaaaacagacacttctcaaaagaagacatttatgcagccaacagacacatgaaaaaatgctcatcatcactggccatcagagaaatgcaaatcaaaaccacagtgagatactatctcacaccagttagaatggccatcattaaaaagtcaggaaacaacaggtgctggagaggatgtagagaaataggaacacttttacactgttggtgggactgtaaaccagttcaaccactgtggaagtcagtgtggccattcctcaaggatctagaactagaaataccatttgacccagccatcccattactgggtatatacccaaaggattataaatcatgctgctataaagacacatgcacacgtatgtttattgcagcactattcacaatagcaaagacttggaaccaatccaaatgtccatcaatgatagactggattaagaaaatgtggcacatatacaccatggaatactatgcagccataaaaaaggatgagctcatgtccttcttagggacatggatgaagctggaagccatcattttcagcaaactatctcaaggacaaaaaaccaaacactgcctgttctcactcataggtgggaattgaacaatgagaacacttggacacagaaaagggaacatcacacaccggggcctgtcgtggggtggggggaggggcagggatagcattaggagatatacctaatgtaaatgacaagttaattggtgcagcacaccaacgtggcacatgaatacatatgtaacaaacctgcacgttgtgcacatgtaccctagaacttaaagtataataattaaaaaaaaagacagagatctgctgattagagattgtaaagacaacacttctccaatcagacagctcttagcttctggcttctagctctgtcctgcaattgtttctaaaccacttcttattcttgtaaacaagatggctatagtttcccattactggctcatctaggcctatagaaaccaaaggacatattgttccttcttggttaaaagttacatagaaaatttactagaagttagatggcattatttacaggggttggctaacaggcaagttcatttgcataaatctgatcaggagagtctgaatctctttgtgctccttcacaccttcccctggtgctggaaaccaaagctggtttccctagtaaccagcacctattatgtgtgagagaactgtgactgtgagttttgagcgtttgtgtgtgtatttgggtaattactgctgactgaggttttcagtacagcatgaacttcttttgtgccagaaacagaaactattttttttttccagagacagggcctcactctgtcaccaaagctggactgcagtagcatgatcatagctcgatgcagcctcgaactcttgggttcaagcaatcgttccaccccagccttccaattagctagaactacaggtgtgcaccactatgcctggctgattttctttttttaattttttgtagagttaggtctcactatgcccaggctagtctcaaactcctggcctcaagaagtcctcctgccttggcctgtcaaagctctgggaagaaactattaaagttcattttgaaatgtcattgattgactctcttgacattgggctgcatatgagtgctttctatggggcacacgacctggaggaaaggagggaagaatgaaaatagtgtggtgaacttgtgaattcatattccactagcacagagctattaagaaatcttccccagtgatcctattgtaaactctggctacacttctatgtataatccatatgcaccacacctcacaagcctttggctacatcacatttgtgtgttaggcctaaattatgatagctttagcccaaacagatcagaataccagaaagggtccccagctgtctcaagcattccaaagaggacttccacaaacatgctcagcagatattcatcaccttcttcctctccagcctctccacccaccaactctgctctctcttctgctgatggatttcatgggcttactgctctcttgggaccattgtcttaagtgggttatagaaaatatatacatatttaatatttgctttaaaatatacttattgagctctcaatgtatgtaagatataaacatggtgacaaaaagcaaattaaaattaagatggtgagagaaaaaaggaatagccaggtctaacacatcaggtaagttgtccacttttcctgctctggccctggcttggtgctagttataactcaggttcaagttactaaggatggagaaaaaaatctggaggagtccaaagtagacagagaaagacatacccccagaccatcactttaactacacacaaacatataaacttacacacacaaactcacacactcacaaacacaaacacaaaactcacacacacacacacacacacacacacaaatggttagaaggcatccgaatctgctctccctggctctggaactctttggagctgccaggtgtctaccacagggattggattatttatattcattaagctcaatgtcaatctttttccatgggcagtgctgattccatggccttctccacagtctacggcaaaggaaaaactccttagaataacttgtacacacaacagaagcattctacttgtacattcttcttgtacatacaaaagaagcattcactccaagctcagggaagagaaactcagtctcctgcctttctggggccccagaatgtctcttaagtgcccttccaactagtgcttggtaaatgagacactgggctgaggaaaccactgaccacaggccacgtcttccctctgcaagcttctagattcagttgccaggatgggctcctggactgtgcctattctactggacactgattaaaagtcatctctgtgccctttcatttcaggcagctggggaggggatggcagtgagcagccaaga

SEQ ID NO: 6780 - DNA, 289730 bp, Homo sapiens
  misc_feature (1)...(289730): n = A,T,C or G, or insertion/deletion polymorphism (see Tables 1-2)
cagccttttttttaaagtagaggttactacaatgtcatggctaaatctttttttttttcttaaataaggatacaagtgaataaccagggcttatcgttatgtgcttaataacatctttcatttattgtggcaacctgtcaactttaattcaataattatgaaatgccttgaaataaatgagagttagaggcatcctaaacttaccctgatttgaaaggaccaagaaaagtagctgaccttcaatagaaagccaataaaagttaactgaacacattaaactaatcatcaaactaaaatgctaaagtcatgaaacataagaaaagattgaaataagaaatattaagggtttgatcatacagaaataaagttatttagctatttttaagttattttcatctccttgttactatatgaaatttctcccaaactgttatcaatacagtgcagaagacagttcttcactaactttcccttatttggattcatagagcatatgtaatagacctataattaggaatagcctttaagagttattttgatttagcaaattgtaaatgaacattccttctttcccattgattggtattgcttcctagatcaagaattttttgccaaagcaccctatatctgggatgaaaaattggttaataaaatttagaaagtttttcttagtaaaatttagaaagagctccaaaacagaaagaatgaaataatatataaacttttctgtgagaaaaactatgaatggaaagtaacaagtagatgcagtgatatacattttgtatagttttaaaaaccctgcctataacatacatttacatttaaaaaaccccacaaacataaattgtgtcattgtggattatctgcaaagtaggtaatatactcatggattattcaaggctgacagtaaatagcttaacccaaccaggatacttgatcctaccagaaggtagtaaatcactggcttcttagaggcttagtattattttcaagccactgtcacaccatttagtagatggaaaggagtcatttcttttttttttttgagacagagtctcgctctgtcaccaagctggagtgcagtggtgcgatcttggctcactgcaatctctgcctcccgggttcaagtgattcttctgccttagcctcccgagtagctagggctataggcgtgtgccatcatatccagctaatttttgtatttttagtagagacaaggtttcaccatgttggccaggatggtctcgatctcttgacctcatgatctgcccacctcggcctcccaaagtgctgggattacaggcgtgagccactgtgcccggctaggagttacttctttttcctaagtttttggcagtttttgttgaagtttgagctgtccaaattagttcataggcctgatatgttatttttccatttttaccaaaaagacaaaatatattttattattttaagataaagtgattattttaagccctgattcattatatgtgagtgggagaggtgaactcatatataaaaacaaacagaatttccattaaaaataaaagagatcaaatcattacataaagaaagaaggaacattgcacagtagcgtttgaagagatgccagagatacataaagatatagtcatttggtctactttttagatagattgttttacagcaagcattttcaactcaatatgtattttacctagaactattccactaagcatcctgtatatattagggagactctttcaatcactctatatcaactgtcccccaatacttattttgtttcatattgctggttttacacgacatccttgattaattttcaggccttgaggtgctacttattaaattaaggatacagcccactaaattaataaattattacwgtggaggcactcttgtcttctgcatgtataagtgcattgcttaaattactctcagggaataatttacacatgaagaggcactggtggttaaaaaagctctgtgtatttcttatctctggaaatagtcctggactaggtgctcaaacggctatcaaagcaatctttttttcaaaatagtaatgagtcttaccattctagtgttcccacactatcctagaatcatgaattaaatataatgttaaacatgtaacattttgaaccaaaaatttccataagaaatggggagatgatttcaactgagaattgctcatgatcttgaaaagacttagctttctttcattgtgggatttttttttttctccctaaaagagctgtaaaaaagtgaacatacaaaatacttcagatcaagaaaaaggaaagtaggaactggctgctgttgcaagaaagatatctgcctctccccaccttttaagtattaaaaggtggaattaaggacaatgactcctggcttctaatctcatgccactgtttttcctgtccttgggctgttcatgtcaggtttctatgctcctcgcttatatatgacacgcatcttatcccaaatttagctgttatgaaatttaaaaaaaaaaaagtttttggcgaaacttctcccctggtttataaactctgatatcaggaatcctgtcattcttacagtcttagggcctaactctctgcctgagacgtggaatgattttgtgaataaacacatggatgcagtacacagaaaaaggtgcacaattatggaagaagaatccttaattactttgagtctgatttttgcaaaatgtctatttagagtctggcacattttctagttttttccatgcttcttcttcctcttttctccccaagtctatacagcaatgacgggaaataaatggtaaatttttattgatttgaatttgtgcatcaattatctatcacaacaaatagataagtttattttaggatgctccttaacactctaattacacgttaaaggccctctctttgttctgccagaaacatggaaactggctttagcttccagactaaagaaaacaattgcaaataaaaaggctggagccaaaatgatggtggtagggcaatggtgatggtagtggtggtagtgatctgtcacagacactgttctcttttattcttcatcacgatttttatttgatatgttaattacttttctgatcttcaaactaaccccatggtgcttcatactgtgctatatacaacagtatgaattttggtaagataattattctttggataagtagatgattttatccctcaccacttccattttagttattatattactatttctgtatttagcactgaagtttgtcttaaaatttctttacagtacattttctataaccacattgtcaagtacacaaaaggttattttccacatttttacctcacgttaaagtgtgaagatctgcacaggaaattaatcgattttaattgtttttaatggcaagcttattaaaataggttgtaattaataaattgacagacttgcataaatttctttgtccaaagttgaagggagagtattcagtcttgtgttttcttttctttcttttctcccccttcctgatctttttgttgtgaaggggtcacgtaaggacgtccgtggaagagctccgtgcgccatctactgacggaatctaaatgtccagtatttggagattgggagtaactacgttgggttgttagagcattctttgaggaaggaggggtactgggaaaataccctttcagactctatggcttattagtgattgctggaataaatctgaattcagcaaacacataattcaaaaaagagacctctatctgttgtgcgggtacaagttttggagacaatctcaagagagtccggtggctggcgccggaagaagttaaaccctgaaatgaactcaaacggggaatgggattgttgttttttgcctgtgtcctgagctacactcgctgttaatggttacttcttaataagaaatggctttactaatggcacgtccagataacctttagtttccaatactattattacaaaggactgctctcaaatttgattattttatgaaaagtttaataatgcacaataaataggtccccccttcacgtagatactacccacacagcttgtctctgcgaatataaacgtagtccttgtacatacatacagacacagcgacgcatatacctacaggatgatatgcagttatgtatatgtgtgtcagttgacaaatctaagcccttggatttagattaaaatgtttctaccttcagtcgtttgctccattctatgctaaatcctgtagaaggctgggaagaactggggacctcaagccaaagaagtttcttgattataactgacaggcagcggaatatcagttttagggaatcaaaagttgagttggaaggctgctggtttggaaactaaggttggttccaagtggtccgacctgattcccaggatctttgtgagagctgctgggagaactgaaaattaacagcgaggacacaggacgccctaggtaacgtcctccccgctattctgctcttctcaattcaagggccgagacaacttgcttttgtggaaaagggaagtaaagggaaaagaggaaagcaaggaagttcagtcagaaagaggaagagggacaaagaggaaagaaagggacaaagaggaaagaaagggacaaagaggaaagaaagagggacaaagaggaaaggcaaggagaagagaaggaaaaatcaaggttcagcaagaagttggaaggcgagggaaaaaggggagtaaagagaaggcaaaagaggtctaagggctaggaagatgcaaggatctttttttaacgaaccaaagtcacatccatctttcactttcaaatcaatcgtctagatcttatccgtttcctttttaaaggttatctgcgtctgtaaaggaagccagtagttgatactcctctccgcgccccacgcgtggccgcgctgttctatctccggccactgagatcaaatacaacgcgagtgagaacatttgcagaggcgcgactctgggaacactcctgcgactggctgtcacccgggagtctaaccggattaatactcagagatggattacgctggttgtcaccaatacgcctaaagattataatccaatttaygcamattacagtcagtattaactttatctgctattttaagactcccggttgccccgcgcgtcctcagaggacaatcctccacgttctgatgcaactcagtaggctgtcaggaggggaagccccccgaagaaaacaactccaagcctggtccccgagggtctgtaccyggcactcccaggtgtcttgctttcacctgggcaccgctttatgaagcttcccagccggggattaccaaagcggaaggcgttcccttgcaaggaaatagcatccttgtttctcccttgttcatttcattttcaaattttcggtggcggtggcagaagggcggggagtgagggtggcgggcgggtgcctgtgagtggatggggcagggggccaggggatcgttgcgggttagaacagcctcagtcattgctattttcatgctcgttttttgcaggatggcatttctctcgctctctttaagtaagtttgtttgggtgtgagttcttgtcttttcagcacaaaaccacagaaatacgtggtggaaagtaaaagaaagcccactccctcctccccgtgcgtactagctaaggacttgatttaacaccccctctccggctgctgagggctctaagcagtggctacattccagcagttttaatccgttttttattgtagggcgagcagagyttacacaggggctgggatggctccccagctggccgctctccccactcctgcgtcccctccctgccacccccccagcaggaacctgttactttaagcgaggctttccagtgtggcgckgcgggccgccggggtttcgggaggtggcaggtgattggctctttcgagctccccctggctcgctcgctctgcctccccgcgcgctccgccccgcccgcaagccctccctccgccctgtgaggctcggagcccgggtgtcaggcgccacggcgcatgctccgcaatcatcttctttaccctggagctgctgctgctgctgctgcttttgcttttggggctgagtttaataagcgagcgagcgagcaagcgagcgcggggggaaaaaggcagagaatgtccgccatctaccctccgctcctgggcgcgctctcattcatagcagcctcttcatgaattacagctgagggggggcggaggaggggggggtaccacacaacaccccagcaaacctccgggcccccaggcatggctagctcggkaagtacgcgcaaaaataataataaaagccctcccccactttccttcctcgccctgcgccgccgcagcccagacagcgccagcgctccgcggttccaattagagaaaggttggtacggcttgcagggagctgccgcctctccctcagcctccgctcccctcctcccccacccccccccggcgcgcacacagacacacagacacacacacactcacacacgctcacactcgcccctccaccccccgcgcctccctccctcctcgcctctttgcagtcacaagaagcgcactcacacactccctctcgctcacacgcgcgcactcacacacacacacacacacggtggaaggaggcgaataataactcagccatatttcagccgccgccgccgggagctgcgggcacagtccggggacgcggcgagcagcctcggcggccgcacctccgcaaagcgccgcggccgctacgatggtgcgttctccgcggcgcgcgtgtgtgagccgaagtgtgcggggctgacagcggcggggccgcacgcaactttgccccagcgccgggaggtgctgagcgcgagccgaggctcggcggctgtccgcccgccgccctgcctttctgaatttcattttttggggggaggtgggagatactttggagccacttgggctcttkaaagtgtgttgcgggggctcggttcgactggcctcgccgatcgcgtggggcttttcgctggggggtgcggggtgctctaagttatggatgcctcggcgtgttttcctgcgggcgtgtgtgtgtgtttcagtgtgtatgacgacgtctcatttttgttgtgcacgaaccccgtggcaagagcacgggagtttgtgcccatcagcagaggctgcctgtagtttccatttcgcctggcacagcgctccacacgcacgcacacacacgtacacaaagacttcctcggcgtgtgcctgtcgccgcggtactttcggggagggggctcgccaggagcccttcggtccccctgggtcccagccacctcccctcccacgccgggaaaccgccccggcatcgccttctgatttgtttccgatgcatttgttgtcgtgcttgtcgtggctgagtgtgttctccctcttttccccgacccccttcccgactggggataacattccgttacaatcctgtccgatgtagatgcggggcccggggcgcctggggccaagccgggccgggcgggcgggtatatttgggggtgtggagtgtgcgcgcccacgcgcgtgaaacgtggatgcagagggcaccgccgtttccttttatgtgcgtttcaagaaggaggaaaaaaatgtcaggcgcaacgttcactgccgaaacctcgccttcctgttattcacggctgtctctcctccccctgcccgcagtgtgccgtgcaggtgaagctggagctggggcaccgcgcccaggtgaggaaaaaacccaccgtggagggcttcacccacgactggatggtgttcgtacgcggtccggagcacagtaacatacagcactttgtggagaaagtcgtcttccacttgcacgaaagctttcctaggccaaaaagaggtagggctcgaatacaaaagggtcttgataaaaaatgtctttgaaacaatcgcttgrcccgggcggtcccgctgtccygctccccgccccccgcgccgcgctcgccggcgtagcctcgggatccgggtgcgcggcgccgcgcgggccaggtcccggctcccgcctgcccgcgcgcgcgccacttcggcttggtgaaagtcaccgcagagaaaggaccgtcaggtgtcgagtgtttattcatcccaagccagccctcaccagtcctctggggttagccgcgggttctgtggggaaggtgcaattagttgttgagtttggagatgtggggaatcgggctggagggaataaacactttgcgcgygtgtgtgtgtgtgtgtgtgtgtgtgtgtgtgtgtgtgtgttttcctagagaaattaagatttacctgtgttattagcaaagaatgtattggatgtagttattgttcggtcttggcaagtcggttctctttagggtcttctgtgctttcctgtctgtgtatgaggcaccaggtgccagttgccatagacttttctttttgtggcttagccaccgccacacccactccagtctggattttatgtttacttggggggcttactcgttcctccctcccacccccgcgtgccacttgactgctcctttgattctgagcaacgttccaaagtgtctgccggatgtgatctgcagggagactgttcttgcaaaggtcgaagctaagttgaagaggaacgatgtggaggaagccttttgctttagtccctccccaccttggttcttagccttggagtctagtttgcataatcctactgggcctctgtggtcccaaacattttccataatgggcaggacagttttggaaaaaagaaacggagtgtcattttgaaagaaatttaaagagggtttgagaaataccgatttcttttcccttcaacctctggaaaactaatgtctggttgttttagttggattagtgaaggtaacagtacaaatacaataaggtgctttgtttgtgagcaggtttatttatctaagtcgacacartggttagtagttatcttccatttgatccgtaatctttattggcatctagaactcctgtcgtttcttagagtaatatcataataaatccattctgcttagagctgtgtggaaattattgaacattcagggggctgaataaagaaaggagaagcgtcgtgtgccttagaggtggcagaggtttgtattggtgcttagttttgtttccagagctcatgtaatgggaagtaggattgtattttttgcctttagtggtttggtttataactcctcctgaaaacttgaacggttgaatttgatggtctttgttggatggttaataaataaatccagtttcttatagagggctagaaatatgcatggcctataggaaataacatttgaaatttgttagcattttatgttaaaatatagtcagagattattatatttcatatttcctccaaactgtggtaaggatgagcgatgtcaaatttctatcgctgatgaggttgatatgctgcttctcggattctctctctccctttccatgtgtctgtagagcagaggagtttaaacaaaagaaaccactttctaagatccttggtacacattattactactacttggctgcagttcacttcaaggtgaaataagcttttaaaaagcaacatttattaggaaaattaactcagttggcagaagatgtagctcttaaggtaactttgtttaggcaccttgacaatcaacaaattggcattatgaaattaaagatgatcaacctctattttaccattgtttttctgcttcagtggatgtgtgcattgatgttatttttatttcctatacttaatgattttctgtctgccctgagggaacatgagggtgctgctcacataggccacacctgggagttgttgctaggcgtggtaagctgcttgatagcagtgatgacttctcagaggtctctggtgagagatgtctgcttgttggttggattcctcaatttttatactcaactgtggaggttctctatgcagtctataagccattgttttaaaatgtttatttttggatttttatttgtatgcgtgcttyccatgatgtgacaagtcctgggaaaagtgccagcttacatcacccaggagagaccttgtcatactgtaattacacatgattcagattgcaagagaaggtttctctgttcattgggaatagttgtaagttcaagcaacaccaaacatgccacttaatcctgggacttattttttggcttataaagtctttcaaaatgataagaataaatatagaataagaatgccaagaatttgtatgtctacttccagtaccttttaaagtgttatgttagctatattgtagatctataagtgatagagtaaaattctaccaattggaaattggagaaactgaaaatatgaatttgtgagaaatctgagttataagatctttaaaagaaatgctcatattctataataaataagctgtgttggctatagtgacaatctaaatcactttcactgtatacagtagctgctaaacagagatgagccttaggactgaggatgaactgctcagccacaaagatgaaagagtccttagttttgtaaatctttggtttggaaaagtgaattgattttcaggttgatttcctttacttcacagtaatattagaatttgtaggagaaaaaattatagtatttttaacttgttgcttaatgagaattatgtataccatttcagaattgagctaattggatttgaattaatgaggttttactctgtcacaaagatgggtgggagaccttcaatttaaaactaatggcacaaaatcttagaaaagagattttgatgaaatggtgaagcctggaatgtctattagccatgacaaaacaggtaggtcagagtatgatgcatttttaaactatttacctgcaaaaaaagacaatatcttatttattagtaccaaagatttgtactagtctgatatgactgaaatgaatagtcacattcaaaacatttcttttaaaatattaatgtttttgtttttagtatgatgtgaatttgagtgaactttttttccagttacagccatccttactattgcaatttgtttcactgacatttatgatatgaaatctgttgcttattattttatggaagctaatttggccactggtaggatttgatagctttttatttgtagccttagtcctttgagtgggcagataaagcttaataaatccactctaacaattttcctttaagtgtatgaggccagctttactgcatagttttgatttgtgttaaatggtcttctgaaataatttgggtaagtttttatcaaggtaactaatacttgagggcttactagctgaagacgttgtgtgcatctggtatattttctcttcagagtcatttaaaagatataaggaacaaaatgaagatgagtgactgttctgatagattcagcgagtgttatttgtgtagggttctgtatgaaatttagatgaccagtgagaacagttttactgctgtgcattttgaagcacataaagtataattttccaaggcacttaaaagctgaattgttggtggaaatctcatattctgtgggtgagaatgtaaatcgggcaggggtattttggagaacattggcaaggtytattaagatttttaatgtttatactgtttagcctagcaaatttacttctaggaattttctgacaaatatgttctcacaagtacacaaagatacagcatgtttcttgtgactgtttttgtaatagtcaaaatttggaagaaagccatataggggccctcaactggatacaattaaatgatgataatctataaaaagaggtatatctatttgtagatgcaggaagatcttcaagaataattaagtgaaataaggcaagttgctaaatcattgtgatctcattttttcaaaaaagtgcttgtgcagataagtataygtatgtctatacaagtgtatgtctgtaaataagtaaatttgcattagcgggcatcaaactcttactagtagtttagtagctacttgtggtggtgatgggaggttatttttgtagtgtttgatttttttttaaagttaactccgtatatttaaaacattcaatgagcacacataactttttaaaactgaaaaagaataaaaaaccaatatagaatattgttttaaaaatagggattagcatgtagctatctaaaagttaaagatctaaaagtgatctttaatatcttgggtagatattgttgcttaaagatggagagaatttagggttaggaattacagacttgtattcaaatgttggtttaagagactccttgtatggttttggacaagttacttctgtgtctcttttctcatttgcattatggaaatgatgataaaatagaactattacctcataagttgaggttgaaatgtaaatcaactgttttcatacttattgggcttaagatccttttacacttacaaattgaagaacgcatagagtttttttgtgtaagttatatctattaattttagtgtattagaaattaaaatggagacattttaaagaaattaatttgtctaaaggtagtaacctattatatgttaacatacaggtaacattttaatgaaaaatraacattttcttaaaaacagtgacaagaggggcattgtttacttttcttttctttttttttttttttttcaaatctctttgttttaatagaagacaactaggtcctcttaccagcttctcttttcagtctattgtgttatcacatgtcctgtagcctctggaaaactctgctacacactcacgagagaatgggaaggaaaaaggcamataacttaatagattttattatatatatagatttaacgtcaccaatcacctgaaaagatcatagggatcctgagatcctaactctacactccgagaactgctggtagaaagtattcagcctacaatctggcacacataaattgcccaatacatggaagctgattgttattattgttgctaataaaaacttatttaatggaaagagaaaaggtaaatcttccaaggtatttgcctcattaaattccggtgaatgattacctaacaaaattgttttcagaaaaggataatttaaacttgggtttttctgggcatattttatagctactattactatccattcttttttttttktttttttttttttttttttttttttcacatggtctggccctgtcacccaggctgggttgtaattgcgtgatttcagctcattgcaacctccatctcctggactcaagccatcctcccatctcctggtctcaagccatttcccaaacagctcagactataggcgtggaccaccatscctggcagtttgtgtgtgtgtgtgtttttggtagagatggggtttcactatgttgcccagactggtctccaactcctgggcccaggtgacccaccagcctcgatctcccaaattgctgagattacaggcatgagccattgtgcccggcctatcactgtccattctgtgatgcattacctgaattatgcagaagtcttttatattcattattgtaggtgcccctctgtagaactacctatctttatgaagtaggccaggcagggatatcacttggtttgataattttgccttaaaggtcctttgttccttctcttggttctttgaagtttctttctcatgggtcttccatggaccaaccttggcccctttcttgcctttctagtcatttattacaggtaatccccactacataacatcacttttacagttctaagatatagaacttttcttgttttgaatcttcaaaagagatgtcatagaagctgggaaattacatggcacaattttgtggtgtagcttttatgaagaaccttgttcatttttttaaacaaatgaaatgttttttttttctawtttgtagatatttgttcattgtagaaaagtcaaaccatggacgagttatctgaaattttcatatataactatagttaatatttgttagacatctttatatatatacacatacacatcaatattaactattaacattcattcattcaacaagtgtgtgcttttttttagctcctactatgtgcgtgcctgcctrcctccctccctccctccctccctcctttccttccttccttctttcattttgggacagggtttccctcttgtcacccaggctggagtgcagtggcatgatcttggctcactgcaacttctgcctcccgggttcaastaattctcctgcctcagcctcccgagtagctgggattataggcatgcgccaccacgcccggctaattttgtatttttagtagagacagggtttcaccatgttggccaggctggtctcaaactcctgacctcaggtgatcctcccgccttggccttccaaagtgctgagattacaggcatgaggcaccgcgcccggccctagcacccttcttagagctggagataaagcacagaggaacattcctacccttgtggcatatcatcttttaaaattgttggatttttctggtatgacattgtatatggatttattatacttcttttggattgttcccagttttgatttgttatgaatagtgctgtgrtggacatctttgacattcattttaatggtttttctaataatttgtttatgttaaatttctagaagggaggttgtggagtcaaaaggtatacagagttaaaattttgttatatattaccaaactttcctccaaaaagattgtcccagtttatatttcctcaggcatataaactggaaattaacagcttaaaaaaatctttgccaatctgtgtggaaaaactgcctcattttggtttgcatttatatgattagcagtgccacatatctttcattatgtatttatttaccgtttgtcttttgtgatgtgccttttttgtcctttgtagtccatggctgcttttttaattaaaaaaaaaaaagcatggggaaatgcagagaatgatataacaaacattcaaatccccactaccaagaatgaataaatgtttacatattatcttatttgattccttgtttggattctggagaattaactattatagatgcagctaatgttttaaaatgcttcccagccttttcttccaacccttcagtctgtcttccattctatttattttgcacatatatgttgcttacaaataataatgtattgtgtcttaaaatcaacgtgaagaggatcatgctagtgaatcttttttttacaattgagatataattcacatgcaaaatttacccttttaaagtgtgcaagtctgtggtttttagtatattcataaggttgtgtaaccattgccattatttaataccagaatatttttatgagtgaatacatttgcatcttgcttttttcccccactcaattctgtttctgaacctgtccacatttcatctataaagagccacgtcattctctttaatttcttctgcttagtatttcatcatgggaatatattgtatactttacttttctgttttcctattaagaaataaataggtcattttctgttctgtgcagtgagcatctttgtgcatgttaccttgtgcagatgaacaagggtttggacataggcctagattttgagttattgagttgtgggcacgtgtgtcttcatttgtactagctgctgtcagattgctctaaaaagtggttctgacagtttatactctgtcaagaaaatgagtaccatttttcctctatatctttgccaattttggctattttaatatttcctatttttcagagttgaaatttggtatctttttgttttcatttacatttctctggttcctggtgggattaagcattttatatatatatattgactattttgatttcctctttattgacttctttttatatcctttttcttaaaagaaaagattgggttgcttgtcattttcttgtttgtaggatgttcttcctttgttatttttgttgaaaatatcttgcctcatttttttcttttatcttgatttatggtatctttttrccatatgcaagcttttaattttgtcaaactgatgtgctttattttgttttgttttcctctctgggcttagggtcttatttaagaatttagttcgtggccatagtaatgtgcttaaccaaaaggcaatatatatgtaggatacagtgaaagactgagggagatacaaataagagtaagaggaggtccctgccttcagtgtgctgtgtctttttagagctggaaaggacacttgagattcttcatcttcgattaccctttcattttacttttaatcagaagcctagaaatgtggagcaatcttgcatgtagacacaatgagtcacaagtatgcctgtgcaaagataactagtaataaatggtggtcaatgtttacttttaaaacattgagtaataattcacttatattagcagacaaatgttcagcaatagctgcttttgtagacatgatctaggatttaattaagtggtggtaaccatggtagatgctgtttaaaaggaaaaagttctatagctactttcagacaaaatcaaattctctatatgaattaaagttttcctttgagattaaatcattagaaaaaattgttgctgggtggtagttatctcctgatattttgtccccaattcacccagtggtaagaattgcaattacatgaaggatgcagggtgttgttttaagaagtaatgttgcatgacttaatccttttgacttaagtgtggtaagtttgcagtggttgacgactgaagaaggctattacgatagaatttctaaaaagataaggccagcatttgggtgtgatttagttggtatgtagcagttaacaattaactttttggataaaatcaagtcaccattttttttattaaagaaaattatggcttatctttaaaatagtgttcattagtgattataaatataattagttacctttaattagttacacatattagaaggttgatattctcaaagccaagttaatttttttctattttaaaatatttgattttgtcaaaactagattttttttctttgttcctttccagtagaaattattagttatttcctcatcaataccaggcaaaatgctctgtgtgtgtatattgatttttaaaagcaaaatatatattaacagtttcctgaagtattaataataatagcagtggcttggagagtagggaggtaatttgcctcttaatgttttcagatataaattttgtctgaatgatgccttttcatttttgcagataggtttttatgtcccatttcccctgcctccctccaaggatggtactggggatagaatactgtctgattattccaggtatctattcatttgataaacatgtaaaacactttgggtgtttaaaaaccaggttcattgtagactttatatcatctttaccctttaccacaaatacttcattaatatgaataatgaaagctaaataattacgaccttttttatattgaagaaacattcttctatttcacatagtattttccttcattttacttatttctctgtttctctataataagcagctgttttatagagtcaatgaaacatgggggatttgggctgttgagatttagttgcattkagtggaacacgttatttgaaaatgttgacccagttcaagattgtctgatgcttgttgtatgactttttctctgtatgcacagaaatagtaactagtgggctggaagctaacttccctcattttatggagcaccaaagcagcacgtgttatgtgttacatgctttcattagaccaacactcccttctctttgtatatgttatctctttttcctcctgtgttgcattagagttacacatcagaaaggatgggacctatgttatcactgtagatactacttatagctccatcaatgtaatgtcttgaccctggaattttttggcaaccgtataaaggcaggtattgcaagtcagaaaaagggttttagaatccctggctttactttccactcctgtaagttataaattattactcagatttctgaaactcatttcttctgcacctctaataattgactttgtgtaaacagaaccaccacttgaatttagcaggaaacattgtgtctgctgagaatcacattttctagaatgtgttctagcatttgtaataggcaaaaatgaatttttctcttttctcttttttcccttattctttcttcacttactttggatgcttaaaaagaaaagctagacacaaacttgaaggacttggccagctctatcatttttttactacctaatccatgaaatacaaccagccttttagctttaaaaataagagtctaatgtaattccagtaactggtaggagcagtatttagcagtgtggcaggaaaggccctggcctgggaggtagaaaggatgtgtttggactgaataagctgtgtgggcttttgcagctctgaaaatactgtttttcctttagttttaaaaaggataaattctgcaattgtcattgatctagtgtttttataacaatgaaataataactaccctttattaaatagctatattggttatcatgctagacaatagacatgtggagtatttaatttctgactcttcctawgtagtagttcggagaatgatattcttgagaaaataaaataccaatatatgaacatcagtgtattggaattttatcctttcttatggtgaatggacagtgaaatgggtgaaagacttgctgcagtaatagggaagtagaagataacatgagtaattcaccaaataagggattaagttacacttgtaaaagttaatttctgatcatatcggtgccattcacctcaaccatcaactattacttgtagattggagcatttcaagaactcagaagaccacccagtgttgataggaaacttcttcctcaattatggctcttgaccatgccattagatcgttgggtttttcatgcttttttgtcttttacataaaatagaccttgaaattgtgtcacttaatttgcttttctgaagtatcacttaccagatattacttgtgtttttattatcaatagagtaataattgaggactgcccatgtaagctaattgagggctgtctgtattatcatgtgaacagattagaagaaagtatatgaaatttttgatcatccaacatacttgcatacatacatataagaataaatagggttttctatttaataattcaaatgctgaattgaagttgttttgaaaagcaagtacttttctactcttcagttgtaacatgctgtataacttttaggtcaaagaaaaaataattttagttagcattccaattctgtaaaggaaattgtcaagcaattgactagagccgataatttatccaaaaatacacaaatgcagacatttaaaatagagctgcaaataaataggaattttcttacattgtaaaggctaaacaatagcttatagttaatgcttcttgacagagtatcttttttaggttaacatcattgattcagttcattttctgtgttagaatggctagatttgttcatctttaccccacattttgagaagtatgtgatagataaaaatacatcactgaaaagatgggaagraatactatcgtagaatgttaatataagtgatctctgggacgtgggatatcaggaacttcttattgttgtcagtaaaattcgttggctttttcaagttttcttgaatgactcatattatgtgaaagtaaaactagtatttaaatgtatgtatgggcacatttacaataagatttttagttttttctacaagtaatttggaacatgattaagactgtctttcccaagaaacattttcaaattttgctatttgacatttttgccaccttgtcgttttgagtcttttcctttaatgttactatgagtatttgcacaatgtttcataagttgatcgtaagctttaaagggagacatgtagataacgttcttacctttcttaacattttgtattgaagttataaaagtaatgagattaacctgatttataaatgtgtattcatataggatagtcttggtaacagaaagatacccatgtgtaatatatcagtacagtatacatttttggagtacttaggaatgttttgaaaagttctggccyttttttcctgtggagttttgataactttgataattaacatgtctatcttgctgtgtagtgttaaaaatttttctagagcctacatctgactttaaaaatcaactacaaataaaaagactgtcatcatgttgcttagatatatggtgattatgttgaagaataaatagtattgataattggaaataaaagactcawttccartgtgtgcatctttgtatataatttggaagttaaacatgaacttttaagaaataaaaagtaccaaaacaagtaccaaacataaggcatagagaaaaaaagatttagggcagagaaagaagtggtcctttttggatggagaattcatgcataattccataaattcaaactattttgatactaagatgattttattaatatttcatatataagctacaaaaataactagaggtttttacaaagggaaattagtacataattttatgttttatatacaatgcagattgatatgaatattccttaagcataactaaaaatgatttccgcaaaatgaggaggttaattttagttgtctcaagggtctctctgcaatctaaaatttatctaattaagtccatgattttatagtccgtgagaaaacacatttgcattttgacattaaactttaaaagtgtactgtgcactaatgcatagcaaagctatatgtcaaataaaaataagggcattttccctttagtagtagatgattttacaaaatccataaaatacaaatagattaactctaccttagaatgtttgtgaaatataaacaatgatgtttatgatctgggtatttcttattagctgcttgaataaaattgcaacttcaaattctatttgccagcatttggaataagattatattccatgaacttaatttagttctgctgacaaatttctgcttaactatgtctattccttttgagagaattctaaatgtgattgataatggcctggaatcccttcttcaggattaaggtgtrtacaagaatgaggaaaatatactctttggcacaatgagtacagatggcaatgtttatttgctgcttttattagtaagttaatttatatagatgtcttaactgcaaaaataaaataatagttttaaaattaagtaattgttttaaaacttgttataaccaaataccccagacaccaagttgaagagtggagagtttgagcaatatgaagacctggtttgagtattgcaaagagattccaaattggcaccaaattaaataaaaatactcataaaattttgttataggacagacaaaactatggtagatgacgatagtgtacaaatggcccttatttggagcatatggagtgggagcatattttgcagtgaaagaggaaccagaggacaaggtgttctctacttgtagacttgtaaagacctctgagttttctttatgttattgtagaaagacattatttttgctttggtgtgcttaaaactaaagggcaaatgatccaaaagaataatcttgaaattcaatagcaagagaactacttgacattgtgggctggaggccagcaaacgtggggctttcattgaatgcgtgggaaatggggcaggcctggaatttaaagagacagggtgcagtaccctagaaaagaaaagccctcctgtatgatttgcttacttggagaaaaaaaatagacttaaagttttctctaaaggatctttattggatcaactgtttaaggcattgaaagacactgagtgaatttttcctaactccacctcccacactccctagccatcttctcttgtctgaaattggtgcagagtaaaattgtttataacagagcacaagcagcttttcaaataaaagtactttgtagcctgttcaaatggagtataatgtaattctctctgaaattgagcacttattactttgtttatgtagctgttttaaaagtaygggtgggtgaagggggtacggcaggaacctctgctttagaaattactgtttttttctgagttttcctcccccatccactcatgaatccgccttcacccctcccccacctcctgcaatccctcaataaaatagtatttaaaagacttgaataaccagtcctatgtaccagcttcttgctggaggcaataatgttctattttcaatgggtggtcttgaatctccatgggagattttacaggcagtgggctccaagacccactaagtgtattatatgaacataaccagctaaatttcccagccatagagaatacgcagggatagttttacgttattgaattctcgtcattaattacttgcaaactaatttatttaattttatttgaagaagtatggtttaagtccctaaagtgaaacatattaacccagcatttgggagttactttttaaaaccagtaagccattcataagtgtgtcagtttaggaatatccattcgtgcacatactttaattattaaatgttaagtaatttgtactcctttacaaaaccaacacttagtaattgtcttcaaatgcttaatagttgaagtgagatttcttctacttaagatggtataaaatgatgatataggactcataatcagaaagtatgtttgatatatttataatcaattagtatctcttacctatggcatatagtataaatgttatactagcttaaaatctgactaaaattgttctggcccaaacctttgtggaagtaaacatgattggaattatgttaaatactggattaaaattgttctttaggcgaattacttgagtaagacaatatagttacatatgcatcataaatattgaaatggggaatgttgtgtcatatctattcccacataacttagtttgaaattattttggagcttctttctagtatgaacccgtggttattaactagactaataagcataactttgttgggtcacttatttaaattactttgtttccgttattcacattcttcagacacttgatttataaataaataaatatttataagtcccaattagctagatgtctgaaatacctgttttccacagggtaagtagaaaagaatgtaggaataggtatctcagatacattgatagtaaccagatgatgatatgtaatgagagagctatttttggtttattttgaacagtgtaagtagtttttggtaggaaattgtaatccttgaggaattgagtttgtttcttttataaaaatcattatacagttgttttaggtcttctataaaatggtataaatcctgcagttttcttcactgaaagaatcaaacatctatggctcaacagtttacagcaatgactaaccatttgccttttattttttagcttaatatgttcttgaatagctaaaaagttttccagtagtttttataagtgagtttaaagaagtgatagccatctgaagttttatcttgtgtagccagtatttaaaagttattaagattatctacacagaaaaaagatacaacttacttctggccatatatgtgaataaaagtttaacattgttaaaaattagcttgtcaagtaaacgtactgactgaggcataattttgttttcgttatccattccgttggctgaaaatgaaatagaaacgatctggttactaaagaccagtgctgcattggatcacttccttgagcttttgctatgatcgttaaaggcaaagttagacagctgctgtagrttttgccagtggcctcacaaaataaattgtttaaccctattagtttcaaacactatcatttctactttgcagatatgctagctgtgttttatatgaatctatatgactatgatttgaatttctgatttacaggaaggtagtatagcagaaaatgagtaattttaacatgattatattttcatgtcttggaatataacaaatctcaacatttttgctkatattgggacagatttaaaaacttcagcttagactgtttaaagttagactttgttttttgtatctgaagacttttagaaaactgtgaaaattgagtttgacttataatccttgataattggatatttaaatgtcatttttaggcttgaagttcagaggaaatactaactcattgactttaaaatctcatcttggataagtgtagagttagaataataccatgtactcctggaattgatgtcataatgttaaaaatcccaacaaaatttcaacaatgttgggtccttctgtataatgtgtttgcgttattgctatagatttaaagggcagggaaatactttattgttaagtcttaagagggcaagattttgaaacccactgctacgtgattaaatcagtgtgtttgccctgaggcttcagccattcaatctgaattcatagcctgaaattttggataccttctgtgtttgaaaataatacttcttaaacaattttaagactgcctttgcctattcacatgaaaactattgaggcaaattaccagggttaagattttcatgtaatcaagactctcaagataaatttcagtattttaaagagaaagttcacagccactgtacataaaattttagtgggcttttcattaatctaaaataactggtctataagtactttatcagtgaaaactgctcagcatgtaaaaygaggagtagaagagcacaaaggcttcctgcaaattaagggcacaatgagtactaacggactttccagccatctccagctgtgagattattatagtttttgcaaacccttttctctcaaaactaaatcaagaatggtagagtcctgataaaaagaagtgtagaaaagcctaactaatccttagatgagttacttcaaacgtgccaaaatagaataaaatcagttaatagcatagattaagggttacttttaatgcatttttatcactcacattgagaattttgttgtatgttaatgcatttggccttagttaacaaaattcagaggaaaaaacataatgaaatttgagagattacataatcacattattttgaggaaatttagtactaagttgcrggtgccagatttgacctaagaggtaaaagtggtgttcttgagatcagagctgaaacaggtggctcyaagttttctggttataaatagaaggctaacctatatacttataagagttggcttattatatagattttgaaaaacaatgtggctatatgtctttggataaatatgtccaagtggtttcttggataagattatagaagactgccaaaatcagatctggattaatgtttcaaaagtgcttgattcttgctaatggtaaagagaaagtgagaaggagaaattagaggcagattttaggtgcaaaggtagtctttattttatgtatatatctaaaaatgatctttcatatatagagggagactatatcatatctacttttaattcagagccacatgttagccaactactgaatttgtggaattatggcatattatgataaagctgccaaaaatactgggttaaggaaaaattgatttggcatgatgccattggcaggaggaattaaaaagtgacatgtctttctctttttaggtggagataaataaatatatgtgtgcatatgctgtgtgtgtgtgtgtgtgtgtgtgtgtgtgtgtgtgtatcaaacttaataaaacattgttacaagagcctggcagtaggagatttgataatcatgttacatttgccactcctccaagatgccaaattctaagtgtctctatgaggacttaacatttacttccttgtaataaatgtattgcttttgcagtgggataacaggaaatagtttgactgtcactcctgagcacatgcgtgtrctatatgggktaggtgtttgtgtgtctatgtgcccatcccacatatcccatatacaaatgtagatttttttataagccatgtgagagtaaagttctgttaatttatagtcaaaacatataatttgcccatacatacaattcctttattgaaattctgaccacatttaaccttattgaaagcttctagcttgaatgagttttgctacattgamtaaatactatgctgtatagttatttatgtgcttaagaagctgaactttcattccatcccagtaagttcccatgggataagttattttagtaaatcagaaaatttctctgaaagcaaagtaattcttaatttttggaggcttgaaaatggagaaaatagccrtacgagttagcgggaagaagttctcattgattcatatcgctaaaaaataatttaaaatacttgtactcttaaattatcgtgagggggaagaacccaccacagtgctgctgaattgttttacttctgggattatatctttgtgtgtttataggagtgggaacattttatcttctgtgtttctgttgaggttgtttttcagcagtgccccaagaaaagtcctggagtctagctttgaagcccggtggacaagctggatatcaaagagccagaggaattcagcagtaattgttttatgactggccagaaatcagacctatttgtataggtagcacacaaaatagctgtgatttgacaatttggtgctatttatacccaccataaaaagagaaaagaaaaagttaaagggatattttggaaacaggaactaagctgtaaatgcaaattgcttcattttctcaaaggaacaaaaaaagaaagggtttaggaagtttttattgaagctacattattgaggatctgtctgctttcaggacactcaatattgtactcacattgaaactacacttctttctgtttgcagttttttccctattcccatctgactaaaattatttttgtggagcaaaagaaactctgggggaggagggatagtggagtcacaaagtttccaactctatcttagtagacatttacagtttcatattgctgttgttatttagcttggggtaagaacagtctgctgttgctacagctaagtatttttccatataaaagttacatattttccacagtcagttgcagatcatttattatagtgaagtgtgagactttgctaggtaagttttcatgtgtttttttagaaacacgcagaataaactttctactttctatgactatttttgatctggaagccagagacatctttttgaatacaaaacgccttaattatttgttcctctcacctggagaatattctgaactaaaggtgggcagtgtatcatggtatgtctytacttaagtgggtagcccaaagtgaagtttgactgtttccagaatgtcattctgacgttttgacgttgtcaaatgcttcattgttttgcctccaaaccccagcccctagagcaatctgagtctgggggcaacggtgcagagaaaaagcaaacatgtctgtgattgactacactttttttttatttaaagaaaccctagaaatgccttagggacccctggggctttgtcacaatttaaagccattttaccattgaaggtgccgttgaattttgactgtattaatttgctttggtttaaattttttcccattggattctgattctcccataataagtagagtgatctatgtcatgtataccttactttctaggggaaggctctatagttatggctggatgaaaatagttcactggggtaggataaaagaagtggaaatgggtggagataattgggtgttcaggcagtcagttctggctttgaaagaagagtaaggtttaagatggtgtgtgaaggawcagaagcttctgagtaaggatttaaaatgggaatctcccaaaagcctaaaatctagttggatttcaaggtgggttccttaatcgggaaataggtgacatcactctatagagaagaaacatttggattgctgttattcctgaggagtgtgaacactcagatgggaaaagaaggatacatccttacagaatattttcatgggttgagaatgtacaccagttggggttggttaaggaaggggttgtatttctaaagtattgattacttattcagccaacattgagcaccatctatgtgccaggcactgcagtaaacatggaggatagcaacaaaacagacgtggttcttaccttctggaaatgcttagtctggcatcaggcatgttttccatacacacaaacacaataacagcacaacaagatgagtgcttttatgaagctatgaaaaatgaagctgtggaaacagagttctgagtgtttagtactgcccaggtatcagaatttgaactaagtgtttttttttttgttttttgttttttttttttggacaacattgcaagtgaaatgtttgataagaaagagaatcagtgtggatttaaaaaaattatcctgaatctgtcaaagatrgattttcatctctttgagggttctctttataaggctgtataagtgcagtgttcttgcaatttctgaactcactgggttagcatcgtacaatataatattatataggtgaaaaaagaagaaagctaagcaatttatagttactgaaggtttaattttacaccttgttattttacagacgtggcatccaagactgaagattaactaacttgcccatggtccatgtggcctatgaatatggtgactctatgtcctgttttgctgaggacagtccaagtatatacctattgtcctgtgttggtgtcagaactattgctctttggatgatagattatatagtcacccttttttagagtggcataactaagatttaaactcaggccttttgactccaagtcctaagctcatcactgttttrctctgtttataccatgcttctaggtcatatctctacttttaggttggtctaatgagaaggattctgaggcctaagtctggcttagtacaatattcagttcttggttatgtttaccatggacaatggggagaaacatgagaggtttcatgctaccttttttttttttttttaaacatctggttactaattgtttcagaatgtratttagttttccttcaraaattctgaaggcatttgaggaactttatgtcttaggattgtatttataaatattagtcatcattgcatgatactcaaagaaaattctcttttttttttttttttggagacagagtcttactctgtcgcccaggctgacgtgcagtggcacgatcttggctcactgcaacctccatctccctggttcaagkgattctcctgtctcagcttcctgagtagstgggactgcaggcgcgtgccaccatgcccagctaatttttgtatttttagtagagacagggtttcaccatgttggctagcatggtctcgatctcttgacctcgtgatctgcccgccttggcctcccaaagtactgggattacaggcgtgagccaccgcgcctggcctactcaaagaaaattctaatgatttgagtcctctggatacgtggaaatttggcacatctcttaatcattgaatattgtgcttttccctttaatttttgtttccctttcttaacctaatcagaagcctaaagcagcagaatagggtttgaggaaagtaactctaatttggaaaagaaaattggaaacttatgttgtgatttgcttaaattgatkagcattgccaccaggttttctggacagcttttgagtgaatcacctttatttggtttcacttaaatagctcagcacttcataaaggtagttttagaagtgtactgtctatcaggtaaattagctaaaacttagatggattcagtttactgatcatcacttctggtaattagataactttattttgttttgtgtcatttgtcttatatactgtctgagcagtgcttcactgaaggctgtagtgtcctcacctaaagaatgactaatggcaactgttagaatgataaaagcaaaactaaagccatttttgagaacttacaggttggatggttattggggtgggatggaaatgccttatgttgcacatcctacttctcttccaaatttacacatctagttagacatatggcttctctgccctcagagactcatatgtggggcgaaggggagatagatttgtaagtggataaatttcagtgtaatttaaataagttatagtttggtaggaacggagttttttgggaacataaagtggtaagtagagattgaagatgagcacagtaatgtttccatttatatagcagatgtttgaacctgaatctttcatattttatatcatttttggtttctacagcattttatgttggtttgcttctcttttcagagactgtttatgacccaacttgaacaatgtaatgaaattcttctttagctcaagctgttatgaatccaaaaatagatctgggctaagattagactttgtggcacaaattgtggtttgttaggttgtggctgtctttcttccaacaaataaatgtaaattaacaattatttagaagtaaagcaaatgttgctgagacagaaacaggacctggttgattttaaatggtgctttggaacactaagcagatatctaagtttaaagaactatttggaaaaaaattgttttagttaaaaaatattagtaagcttctatagaatggcagaattggtgactgcagttctataggaaccttacttattgtaatctcttactccttttattttccatttctttttgtttctcttctgaaaattcaaaagcatgaaataggcttcacagaaagaaaaaacaaagctagtaattacaagacgctaaaactttcttatcttattggtcaagtgcaatacatgacaccactctgcagtaatactggtgttcagaagagttatggaagaatctagtaataaacatagkaagaagaaggagggatgaacctcatttgtatggttgaaaagtagatggtcttctgaggctcttaacagtatatgaaggtaaatttgttgtaaaggaaatcttattcagatttttaatatgatgtctatacaaattacttgtgggacaaggatgatctatttctgcagtaagacctctagctccttatggacaggattttttttttttttaagtcactgtgttactcagacctttgcacataagtggtattaaataacaactttatagtaagacacctttgtaaggccctagataaataaaagtacttcagtggcctactgtgtgccaggctgagtactgggtactctccaataattaccttattagtctaatgatccctatgaattgaggtactacctgtactatccccataatggatgaatttatcaaggttatagcatacaagattagtataaaaaratagtatttctacgtacttgcartgaacaatctgaaaatgaaattaaggaaacaattttatttataatagcatcaaaaagagtaaaatacttaggaacacatttaacaaaacagatgtgaaatttgtgctgtgaaactacaaaacattgttgaaagaaatagaggactatttaaataaatgaaaaaatattccatgttcatggattgggagacttaatattacgatggcaatactcccccaaattgcttcaggttacatacagtccctatcagtcagaactccaactggcttctttgtaaattgacaagctgatttaaaattaatgtgtaattgcaagggacccataataatattttgtgagtgagactacatttttaatgttttcaagcagcttattattttattttatttatttattttttgagatggagtcttgstttgtggcccagcccaggmtggagtgcagtggcacatctcagctcattgcaacctccagctcctgggctcaagcgattctcatgcctcagcctctcaagtaactgggactacaggcatgcaccaccatgcccagctaattttttgtatttttagtagagacaaggtctcaccatgttggccaggctggtcttgaactcctgacctcaggtgatccgcctgccttggcctcccaaagtgctgggattataggcgtgtgccaccatgcctggccagagcttattattttaaatgaaaactgcaaatcagtttttaaaaatcagtcatgaaaatagggacgtcttaaatcagggtactcctatacatttaattaaatgccatagttttcctggtaattcagtgttttggggtaggtttaaagctttataaatttaattccgcaagcttttattcagcatttattttttgtagtcaagaaaacatgctataagaaagttcaatggaggcaattcctgatacagaattatctggtgataaaagcttataaaatagttttataagtttttcaagttttcccttaagcctgcccataatttaagcttgtgactttttatattgtctttcatggctaggtttgtttataccctgcagcagtactgtctaaaacaatagccactagacatatgtggcttttaaaatttaaattatttaaaataaaacatttaattcctcagtcacttgccacatttgaggacttaacagtcatgggtagctagtggctgccgtattggacagagctaggtagagaaatggtaacagatttcccggacttctttttacagtgggattcagatagtatatgtgcttttgtgagggataaaaagtagaggaaaagaatctgataagactttttatataaaatcgtgtctttctttttttgtggttactgctactagcattatgacactttgtatctttcaaacgtcatgtgctacaataatcttttctctaatggtcttagcatctactgctgatctttttttgatgagcttgaattaactattttattggggttgcaaattggtgattttccttctttgataacgcttatgtttcaaatgatagatacaggatctattctatttttcctgtttatggttttgacaaaattttatattgtgacaaatgtttcctgtgtctgattttatggataacttagtgaagtatgtggtaatataaaattataatataaattataaagtaatataaccttatttttccagtaatttttattttattttattgttttttgagatagggtcttgctctgtcactcaggctggagtgyagtggtatgtatgaasacgattcactgctgcctcagtctcctgggatcaagcgatcctcctgtctcagcctcttgtgtagctggatccacaggcacacacctccatgcctggctaattttttcttttcttcttctttttgtagagatggagatctcactttgttgcctaggctggtcttgaactccttggctcaaatagtcctcccgaattggcctctcaaagtgctgggatgacagttgtgagccacggcaccctgcaacccccatgcccagtaattttttttttaagtgaaagtaagtttattagagaagtaaagaaacaaaagaatggctactccataggcagagcagcagtatgagctgctgtttggacatttttatggttatttcttgattatatgctaaacaaggggtggattattcatgagttttatgggaaggggctgggcaattcctggaactgagggttcctctcctttttggaccatacaggggaacttcctgacattgctgtggcatttgtaaactatcttggcattggtgggagtgtcttttaccatgctaatgcgttataattagcatatagtgagcagtgaggatgaccaaaggtcactttcatcgccttcttggttttggtgggttttggcgggttttggctgacttctttacctcagtctgttttgtaagcagggtctttatgacctatgtcttgtgccaaccttttgtcttatcctgtgactaagactgccttaatcttctgggaatgtagcccagtaattctcagccttattttacccagcccctattcaacatggasttgctctggttcaaacacctctgacatattgcccccctcccttttataagagaacccttaatcctaagggttgaagagggatgaagatccatcttctgtaacttcttcaggctgaatagaggtgataatattcctgcctattagggtctcttgtattcagggtagagaggagctcagtcagaaagcattagtatgtcgaggagcactcataactcttgagttccaacgaaaggtgatatctagaagattaataaatgtttaatttaagagaacattggttgggcacggtgtcttatacctgtaatcccagcactttgggaggccgaggtaggcggatcatttgaggtyaggagttcgagaccagcttgaccaatatggtgaaactctgtctctactaaaatacaaaaaattagccaggtgtggtggtgggtgtctgtaatcccagctaattgggaggctgaggcaggagaatcgcctgaacccaggagacggatgttgcagtgagccgagatcacaccactgcactccagcctgggcaacagagcaagactccctctcagaaaaaaaaaaaaaaatgagaacattgagtaagcttatcctgcattcctacacatggagtacaacaacaatgtattctacaagagtaaagctaaataagcaaagttatcctaagtaaaataataagaaggctttctatgaattatgcaattgttggaaccaagctgatagtctgaagttgctggctgattccagtacgtgcccagaattaaaatactgcctcagagttttacattacccatccctattgtttcttctgagtcacagccagagatcactggttggttcacaggaataagcagagttagtttaaattgcaggaaaaaaactgagaaacaacgaatgagactagaatctaataacagatgtaccatagttgttgaaacataatttttctctctccagtgtcctatttttactaaagacaaatcatggtaaaactgatctgctttattatacttggcgtgattatttgtataaagtgcagcaagaaaaattatttttcacataggcttttaaaactggctttgatggtttcataaggartctcagataagactttcttgatgctaagcccaacaacgggtttctrccctcaaatatstataagtttgtgtacattcctctcctctcgaggtcccaggataacttggggtttctgggcctgtcagaaagtgaacacacccattaatttttaaatgttgagatctgaggagagaggaggtggttccaagggaagaaacggatttgagtcagacgtttatggccatttaaatttacaatattgaagcccttgtttttttattttaaatatgcttgtggcttctgaagagtcatgctatctcagaagaaatttctgctatagtaaatttagctacagtacagaaaaatttgagcttttattaagttctgggcatggtcatcaaaaatgccataataatacttaacagctttggtagcaagtgttggaatgtcactatataaactccacctgcccttgccttctctttcattgcttctttagttttatcagtggggatggatgagaaaggaacttgtctgaaattttgttgctcataggaagtggcttaaaattcccaggatagttttggaactgattcttgatcttggaatgttggaatagacctcctggtaatcgtatggctgaagtgcacctgcattctaggagggatctggttagacctgagtgtgtttttctctttgcttgtgagtatttatttaggactttttcaaagtttttgaagtaatgattactttaagttataaaaattatagccagttataatgttatgtgccaaattatgtgccccctacccatgcaccacaaattcgtatgttgaagttctaagaatgactatttggaggtagaatccttaaagaagtaattaaggtaaaatgaggtcrttggggtaggacctaatctaatatgacttgtgtccttataagaagagaagattaggacaracacacmaagaaaagaccatgtgaaggcacagagaaaggatagccatctgtawgccaaggagaagcctcagaagaaatcagccctgctgatatcttcatcttggacttagagcctccagagctgtaaataaattcctgttgcttaagccaccccatttgggttgtttaaacccactttgttatagcagctctagtgaaggagtaagcataggtaagcaggttattctggtttatatctaaaaccacatgtaagttggggtaggggagatgatagggttaagtaaggatggattgtgaggctaaaagtctaatttttcatcttccattttaattttttgggatatgtgattggaataggtagaatgtttactcataggcttgccttatctttttctgatctcttaatcacttgggaatgaaaatatgataatataggttggcggctcactaattcttattcattctattcttaatttatttttattattaaaaaaatgtgttgcctaggctggacttgaactcctgggctcaagcgatcttcccacctcagcctcctgagtgactagctacaagtgtgccaccgtacctggcttcattctgtttaacatttcttaaaaacactcttcctttcttttccatttgggaattaattttctgtttttagtttcatgttccttagaaaccatctttcacatggttgtcacaaaaacttttttttgatacacattcacttatctgcttaaacacctttctcttaaagtattctttctgtgaaatatttcatattcaagatgctccctaaatggtgagttcacagtttgcatgtaagtttggtaattttcaggtgattctttgttccctaaacatttcgcgatattctataactctgcctaagttgttcccctcagtctggaattcctttggtgttcactactcataatcagttccttttttataggcttctagaattcacagatggtttttaacatatctgtttataagttcattttgtgggccaggctgagtcgttctgtggctgcatttgctgaatacacctctgagaatgccccctacagtcgagtcatattttgttaaaaatgcttcctccacactatctgagacctattgactgggaaccttttcagagtgaaatctgggaatgtgaatttttaaatgcacccccagtgcccaaattgcagcacctctgctgtacagtagtggcaggaacttactcttcttcctaagtgtcaggcccccagtaaactagaaaaaaacatactaaataaattggagagaacaataaamctagattcaaaaaataggtccaataaattcagaatgccactaggtatatactaaaattgatttgggattgtgggttaatgtgactaaatgtcccttgtgttctttttaaaaactgtcaaggctaggtacagtgggtcacaactttaatcccagcactttgggaggytgacgtggaaggattgcctgaggccagtagttcaagaccagactaggcaatgtaggaagaccccatctctacagtcaaataataaaaaaaaaaaaattagctaagtatggtgatgcatgtccatcatccatcccaactactcaggaggctgaggtcagaggattgcttgagcccaggaattcgaggctgcagtgcatgatgatcaggccactgcactcaagcctggataacagagcaagacaatgccactaaggaaaaaaaagaagacggcaattgtattagttcattttcacactgctatgaagaactgcctgagactgggtaatttataaagaaaagaggtttaattgactcagagctccacatggctggagaggcctcaggaaacttacaatcatggcagaaggggaagcaggcatgtcttacatggtggcaggcaggtgagagagtgacagagagagagacagacagacaatgaacacgagagaatgaacaagtgaagcgccacactttaaaatcataaattcccgtgagaactcactatcatgagaacagcgtgggggaaactgcccccatggtctaatcacctccgactggggccctgcctccgcatgtggagattcatagggattacaattcaagatgacataggggacacatgcaacccatatcagcagtaagtatagggactctgtctgggtagcactgatgtaaaggggactcatgaactcatgctttctagggaggcacaactgccattttcatctaccctgacttctaggatgttaagaagcttggagagagttgacgcccattgaaatgtgtgtaattacagctctggaagcctactaagttagagtggttggtgaaaggaaaggtagaaaaagattttccaacttctaacarctgacctagatgactttgtaaatgggctgttcattatycacagaatggcttctcctggcgggtaactcagctccacagagggctgcttacaaatcaccagttaggtcgggctgtaatcccagcactttgggaggccgaggcaggtggatcacgaggtcaggagttcgaggccagcctggccaagatggtgaaaccccatctctactaaaaatacaaaaattagctgggcacagtggcgggcacctgtaatcccagctacttgggaggctgaggcagaagaatcactggaactcaggaggcagaggttgcagtgagccgagattgcaccactgtgctccagcctgggtgacagagcgagactccacctcaaaaaaaaaaaaaaatcaccgattaaaaccatgggctgggatactattgccatcatagaagaaactttcaagaaatacaaagtttttgaatacctcaattctcaaattctttttttataaaaaatttttcttttttttttattattatactttaagttttagggtacatgtgcacattgtgcaggttagttacatacgtatacatgtgccatgctggtgtgctgcacccactaactcgtcatctagcattaggtatatctcccaatgctatccctcccccctccccccaccccacaacagtccccagagtgtgatgttccccttcctgtgtccatgtgatctcattgttcaattcccacctatgagtgagaatatgtggcgtttggttttttgttcttgcgatagtttactgagaatgatggtttccaatttcctccatgtccctacaaaggacatgaactcatcctttttatggctgcatagtattccatggtgtatatgtgccacattttcttaatccagtctatcattgttggacatttgggttggttccaagtctttgctattgtgaatagtgccgcaataaacatacgtgtgcatgygtctttatagcagcatgatttatagtcctttgggtatatacccagtaatgggatggctgggtcaaatggtatttctagttctagatccctgaggaatcgccacactgtcttccacaatggttgaactagtttacagtcccaccaacagtgtaaaagtgttcctatttctccacatgctctycagcacctgttgtttcctgactttttaatgattgccattctaactggtgtgagatggtatctcattgtggttttgatttgcatttctctgatggccagtgatggtgagcattttttcatgtgtttgttaggaaaagaggaagtcaaattgtccctgtttgcagatgacatgattgtatatctagaaaaccccattgtctcagcccaaaatctccttaagctgataagcaacttcagcaaagtctcaggatacaaaatcaatgtgcaaaaatcacaggcattcctgtacaccaacaacagacaaacagagaggcaaatcatgagtgaactcccattcacaattgcttcaaagagaataaaatacctaggaatccaacttacaagggatgtgaaggacctcttcaaggagaactacaaaccgctgctcaaggaaataaaagaggttacaaacaaatcgaagaacgttccatgctcatgggtaggaagaatcaatatcgtgaaaatggccatactgcccaaggtaatttacagattcaatgccatccccatcaagctaccaatgcctttcttcacagaattggaaaaaactactttaaagttcatatggaaccaaaaaagagcccgcatcgccaagtcaatcctaagccaaaagaacaaagctggaggcatcacactacctgacttcaaactatactacaaggctacagtcaccaaaacagcatggtactggtaccaaaacagagatatagatcaatggaacagaacagagccctcagatataacgccgcatatctacaactatctcatctttgacaaacttgagaaaaacaagcaatggggaaaggattccctatttaataaatggtgctgggaaaactggctagccatatgtagaaagctgaaactggatcccttccttacaccttatacaaaaatcaattcaagatggattaaagacttaaatgttagacctaaaaccataaaaaccctagaagaaaacctaggcattaccattcaggacataggcatgggcaaggacttcatgtctaaaacaccaaaagcaatgtcaacaaaagccaaaattgacaaatgggatctaagtaaactaaagagcttctgcacagcaaaagaaactaccatcagagtgaacaggcaacctacaaaatgggagaaaattttctcaacctactcatctgacaaagggctaatatccagaatctacaatgaactcaaacaaatttacaagaaaaaaacaaacaaccccatcaacaagtgggcaaaggacatgaacagacacttctcaaaagaagacatttatgcagccaaaaagtttttcaataaaggatttctctgtatttgaaagccacattatagatttttttcttttaatggttaaaatgagtatttttttttcttttatcttagaatttaggcattattgtgaagtggaaagagtagggggcccctctcttgtcttggaggtgggagtccttggtttgagttttggctctcttatgcactgaaggccatgcagtgaaaaagtttccgtcacttccaagagtgtctgctttcttatctgtaaaatgaggagagacagatgggcttctcctacctaattcatagaatagtgataataggagtgaataaagaaaaagattatatgatatgtcatttttatctgctttgtgtcttattggtttctttgaaagttccctttgcagatatgaacctattgggaagttgttttttttttttttttggcctagctatctgctatctgttggaaatatgcaaaaattaaaatatcaaacttttgtttaaaaaaatctaagggaaattggtatattaacattattttaagctgcagaatcaagtcttttattttgtacttggttttatcaaataattggctggcttctcctgactcctacctagaaagtttgaggaaaattaattcatcacatcttctacttaggaaagaatcatgcttttgttttaaaaacagattgaggtttcatttcatttttaaaaaaaacaaaataaaggatgtagcagatagattgaaaatggtattatactaggaatagttctttcttactcttatttttgctcttttttctcctcccaacttgctcccctctgctggctccttagaggaatgggaaaccatttccccacttccctaaccagtgagtctcattatttctctactttttttcccttcattcctctcctcccttggaaagaggtaaaaaaaaaaaactccttgatgtttattaggggctttaaattggagtttgacttgtgacctgccatagtttgaataatttgcytccatggtattttgcctatctcagtttcccagctgcatacctaacttctgcctctctttttcagcaggttagttgaacttatttttaaggagaaccagtccactgccacccctaagccccccagtgattttctaggggttatgtacgaagtcagtgatatcacttttgggatttgggcaaacgtcaattttcaatctccttttttttttttytttccagtcacagaatgactttgatttcctgattatgtcagtacccatccatacccatccatattacttttttttttctctgagatggggtcttgctctgtcacccaggctggaatacagtgccacgatcatggttcactgcagccttgaccatctgggctcaaacagttctcccacatcagctaccagagtagctgggactacaggcacacaccaccacacctggctaatttaaaacattttttttgtagagatgaagcctcgctatgttgcccggctggtcscaaactcctgagtgcaagtgatactcccatcttggcttcccgaagtgctaggattacagatgtgagtgattgttcctggcctatatttattctctttaagaggctttctggttgaaaagtcagcagcccgtgaggaaaagataatggttgcaggtctctarccaatccatccagtaagagtcaggctgaccattggtgattcttattcactgtttctccctcaattatagcagtctgtttagtgtttgktattcttgactgtattagaaaggtcttaatatattgttactggttggagcccaatcttctgcatttctaataagcagtcctggtgatcatgctccaagatgaccatgagaccacactgggaaatagaacagtgaaaagagtattttgcgacaccttgccaaagaaaatgtacagatggcaaataagtgatgaaaagatgctcaatatcacgtcattagagaattgcaaattaacaaaaacaatgataccactacataccattagaatggtgaagatttagaatcaagtgctgggaaggatgtggatccacagggactcacattcactgctggtgggagtgcacagtgacacagccacttttgaagatggtttcacggttctttacaaaactaaacayactattactgtacgttgtggactgactgtttttgtgccccyaccaaattcatacgttgaaaccctacccttctacgactgtatttgtagatagagcctttgtggaggttaaagggtgggaccctgatctgatggaattagtgtctttataagaagggacaggatgttgtgtaccataaatatgtacagtttttgtcagttgaaaaataagagactgaaaagaggcctgcctgcccccyggttgtttgaggacacggtgagaagttggccatctacaagtcagaaagagagtcctcaccggaaacagaatcagttggcccctttattttggactttccagcytccaaaactgtgagaaacaaattactaagccaccaagtttatggtattttgttaaggcaacctgaacagattaatgcatcatgtgattcagaaatcatgctccaaagtatttactcaaatgagttgaaaacttatgtccacacagaaacctgcccatgaatgtttataacagctttatttataactgcccaaaatttgaagcaatcaagatgtccttcaataggtaaatggaggarctggtgcatccacacaatggaatactgtttagcaatgaaaagaaatgagctatcaaactacgaaaagacatggaagaaccttaaatgctgatgcagtttggctgtgcccccacccaaatctcaacttgaattgtatctcccagagttcccacgtgttttgggagggacctagggggagataattgaatcttggggcctggtctttcttgtgctattcttgtgatrgtgaataagtctcgtgagatctratgggtttatcagaggtttccacttttgcttcttcctcatttatctcttgctgctgccatgtatgaagtgcctttcacctcctgccatgatactgaggcctcccagccaygtggaactgtaagtccaattaaacctcttttttcttcccagcagcgtgaaatgggtatgtctttatcaacagtgtgaaaatggactaatacagtaaattggtaccagtagagtggggctttgctgaaaagatacccagaaatgtggaagtgattttggaacaggcagaggttggaacagtttggagagctcagaagaagataggaaaatgtgggtaagtttggaacttcctagagacttgttgaatggctttgacgaaaatgctgatagcgatatgaacaataaagtctaggctgaggtggtctcagatggagatgaggaacttgttgggaacaggagcaaaggtgactcttgttacgttttagcagagagactggtggcgttttgccctgccttagagatttgtggaacyttgaacttgagagagatgatttaggatatctggcagaaaaaatttctaagcagcaaagtattcaagagatgagttgggtgctgttaaaagcatttagttttaaaagggaagcagagcatagaagtttcaaaaatttgcagcctgataatgtgatagaaaagaaaaccccattttctggggagaaattcaagccctctacagaaatttgcataagtagcaaggagcctaatgttaatccccaagaccatggggaaaatgtcttcaggccatgttagagaccttcatggcagcgccttccatcacatgcccagagtcccaggaagaaaaagtggttttgtgggctgggcccagggtccccatgctgtgtgcagcatagggacttggtgtcctgtgtcccagctgctccagccatggctgaaagggaacaacgtacatcttggtgtctggcttcagagggtggaagccccaagacttggcagcttccatgtgatgttgagcctgtgggtgcaacagaagtcaaggattgaggtttgggaacctctgcctagattgcagaagatgtatggaaatgccagatgcccagggaaaaatttgctgcaggggtgggaccctcatggagaacctctgctaagggcagtgtggaagagaaatgtggggtcggagcccccacacagagtccctactggggcactgcatagtggaactgtgagaagaaggctactgtcctccagaccccagaatggtagatccrccgactgcttgcacagtgctcctggaaaagccacagacacttaacactagcccatgaaagcagcagagagggaggctgtaccctgcaaagccacaggggcagagttgtccaagaccacgaacccacctcttggtatcagcacgatctctatgtgagacctggagtcaaaggagatcattttggagctttaaaatttgaatgcatgggccctgtaactcctttgtttggccagtttctcccatttggaatggttgtatttacccaatgtctgtactcccattgtatctaggaagtgactagcttgcttttgattttacaggcttataggtagaagggacttgccttttctcacatgagactttggactgtggacttttgggttagtgctgaaatgagttaagactttgggggastattgggaaggcatggttggttttaaaatgtgagaacatgagattttgaggggccaggggtggaatgatatagtttgactgtgcccccacccaaatctcaayttgaattgtatttcccagaatttccatgtgttgtaggagggacccagggggaagtaattgaatcatggaggccggtctttcctgtgttattctcaygatagtatgtctcacaagatctgatgggtttatcaggggtttctgcttttgcttcttcctcatttttctcttgctgctgccatgtaagaagtgtgtttcacctcctatcatgattctgaggcctccscagccatatggaactgtaagtccaattaaacctctttttcttcccrgcagcatgaaatgggtatgtctttatcagcagrgtgaaacaggactgatacaagtgcatattgccaattgaaagaagccaatctgaaaagcctacatattatatgacttcaattttataacattctgaaaaaggtaaaactatgaaaacaataaaaagttcagtggttgctgggggtttggtggggaggaaggaagggacgaataggtagaacatggtgggatttttagggcagtgaaactactttttttgatactgttatgagtggttacatgacgttatacatttgtcaaaacccatagaacttccgtacaacagagagagaaaaccctaatgtaagggatggactttagttaatagtgtgtcaatgttggtttatcagttgtagcaaatgtaccaccccaatgcaagatgttaataataggggaaaatgagagccaggtagagtggggagagggaatatgtaagaactctctgtactttctgcttaatttttctgaaacctaaaactgctttaaaaagtacagcttattggttttttaaaagagtattttggattcaccttagttttgtaaggagaataatttaatataaaaaattaaaaatatttttcattgcggctggattgagcatcagatatagaactttgttctgtggtttcaaaaataggagagaaaaggttaggctcttttaaacctgagagagggttgctctccttaaatagtgatatagagccttaaatgcatttctgttgttgttgttgatcacttagagaaatagccagaggtaatggtattcctcttaccaaattgaaggattagctctgtagaaatgttgaattttaaatgttttccttgtacctgatagaattgcatagtgttcctgcatcttatatgagaggtagtttaaggtgcttcatcaactgtggatggaatcctcaaagtccagtctctgattggctgccaggggcctaaacaggttgaatattttaatcaactatacaggagtcaaccatcccaagagttaaagaattgcatagatcctttagtttaagggaaaaaaaattccaagtgaatttctggtgtgaattagggaagacttatttacgttgccctttaagtcattaaagtggcctcttagaactcctgatttaatgaaaagataaaaatgttttgtaattagcagatcaaagtactgctgtggatggtgtttacattgtcagtatgtaaattaaatttctaaagggaaagaaagaatttgtttaacacctctttaattttgtttatgtaatttcttgcttaaaaatctcttcccactcccacttaccataaatgatcctaaaataaacactaacttaccactctcacctgtgtatcaaagaacttgagaaacagcaatgtctgaattgttgaactttgctatatttaagacagattgagtttatcctccaaaaagaaacatggtcttgaaaggttcgttcagcagtcctaaactataaatgaatccactgataaatggaatttaaagaagcaccaaaataaacgggtgtgttcatagtcattttgtattggaatttggcaatatccttttgtacaaattaccaaatgcagtgtagcttggcatgcattgcttgtttggaatataatgtagrtttaaaaacaaaatatgttgacagaggcttttctgttcaggtggttaggcaggttagccctgtgtaaattgttgtagttctggttcagttcctctgaactggagggaggggtgctctccttacacattgctgtgtatgattagaatgctacgtctaatacagtaaatattttatacaaaaatgaattttgactgctttatttcaaggctttacctctagccatgtttgtgaaggagtgtgtgaagaaaacattgataagccatgcctatgtgaaaggaaaactatattatatttcaagtcattccatccctagtcactttttgattagcagccttggtcttcttcaggactaaccattataggcagagtgtgcacaggttccagataaaactgctcaaagcaaatggattaaaaaaactgtccaagagagtctaagaacttgttttatgaagagtcttggctctccaatggtgagtcccagtctgaatttattcaagactgaaagaagttggagcatgtctgtgcaagggtatttttcaagagattttctctaagaaatcgagcttaaaaaaaaaaaagtcaagttaactaacgtaacatgcaaagtgttagatgggactcttatcactgtctagttacagcaatggaaattattattaatttccataaatggagagaagggatttaacctttctgttttgttttaagagttaatgctaattaaatgctcccaaggaagaaagagtaaagtagtggatagcatttgcatttatgaccattagcatggctggggttgtgcctgtgtgaatgactaagatgagtagactttttgtactgtgagactgtggtagctgagccagagctcttgggtcttgctaaggtggtaagaagctatggctttctttatttaatgggcctgtttagtgtaactgggataggacctcactgctccctatttacctcacacgagtctggtgagatttaattagtcttacttacaaaaatctgcctggggtctactttagggtctgaattcacccagtgtcttctctccccctagagaaaacaaaaggtttctccctctttgctacctaggcatcccatactgagctctgtggatcaccaggctggaggcctcacctttatgctgttaccatgtcctgtctagcctctcatatgtgtccctaacttgatttggacttagtagtgagtaaaaagggtggggttagagcaaagagctcttttaccctaaccacaagtccacatttcctcataccatactttactttctcataggaaattaattttgtgtgcctccataatggctctcatcaacttcttgttttttaaaagtttatatttttttattcatgcgtcagaattgtgaagaaattatttggatacttagaaatcttatttggagagatgtttttaaaaaagtcttctcatgggctctttgtagaaggacatttcctcttgtttctcgatgataccaagttgttttgttcttttgtatatatataattttcatttcttctcatttcttaatttttttttctttttaatagagatggaatcttactctgttgcccaggctggaatgtagtggcgtactactcaaagctcattgcagcctttgactcctgtgctcaagtgattttcccattgagcctccagagtagctgggaccacaagcatacgcccagctaattttaaattttaatttttaatttgtttagagacgtagtctcactgtgttgcccaggctggtctcaaactcctggcctcaagcaatcctcctgcacttcagcctgggattacaggagctgcgattacaggcacgagctatcatacctrgcttgatttatcctgttcttaacccttctttcaaaaattgttaaatgttttacrttccttaaggtaagcaacgctgtacaatagaaatataatgcaagtcacagttgcaattttaggttttctagtagctttactcgaaaaagtaaaaagaaacaagtaaacttaattttaacaatataatttatttaactgaatatatccaaaatatcacttaacatatctataaataattaataaagtatttcactttttttggtgaagcctttggaatctggtatgtatttagatttcataaaatatctacttggaaaatgttagcgtcatatacttgaattgttcccaatataatgttcaagggttttctagtaattgatcatattttaaaatttttaattaattaaaataaaatataatttaaaatgcaggtcctcagttgcactagccacatttgacgtgctcagtagttgcgtatgcctggtggttgctgtattagatatcatagtgttcttgacctgtcattctttatttgatatgtttcccatcttctcttctttttctttttctttttttttagagacgtagtttctgtgttgaccaggctggtcttgaactcttggctttaagcagtcctcccacctctgcctcccaaagtcttggaattacaagtgtgagccaccacgttcagccccattttcagataatgaaactgagccctggattagtaatcaatccctgtttttcattatgcttccataatacttagaatagatgttagttcagagtgattcaaaattttaatacatcttatgtgccagatatgactagrgaagggaggacttacatggacttcttttgagtttatctagcagttcttacattcttatttagtcaaggtcagcagaagagctgactgtagtacagatcctccaaattgttgtctatctcttctatcatgccagmcactaataattccctttgtggtggagtatttccttttgcaaatgataggaacttaaaggaatccttttctgtttagtagtrtgtaggtctggattcagttgttgatagcagagaccactttagccagttttagcagggagagatttgatactgggaactacagaggatactggaggatcaggttttaggttaaatttctaggaatgattcccaaataatatagaactggccagccaggaaaactgctatgtctgctgtaatcaggaagctgaacacatgagcagtcttccattatcacagcagcagacttcaagaccctaaagcctagctggcaaaatggtgtgtgtgttcactcttctcccttgaagctgaaaactaaacactaggatttattcagaagcacagccccaccccacagtgcttatttctacctttcgaatctgtcatggctgtgtctggcagaagtctgtcttctattgtgcagtaatggggctagaatggatttgaatggacaagtctgtgataattgcccaagtggttggtatattggtatgaaagtgagagatggtcaaggtgaatctttgctgaacctggggctctttgtcttgctgggagaatttcacagagatgttgaaaaggtacatgggttaagagaacaggcgctgtgaaatgaaagttgtgttttcttctctggagggcatttcttcagattcatatcatctgaaaagataaaaacaaatggttatactcctggatcaaactttattatgttgtgttttgaaagatctcagagcctaactccacgtgaatatatcaggttagtgtctagcctacttcatgatttttttgtgcatctgaacattcagggccttaaaaataggagggaagcaatactaaattgaaatgttgtcctactattgctttaactggagttattaaatatattaaatttgtgtggtgataaatcaccacacagaacagtgtataattttagaagagacaggtagaaagagttatatgttttgggatttttagaggtcaagataatagacattggacaatgttgcaggattactcctggtttgaaaataaagtacaggtatacttcattgtatggtgctttgcagatatagtgtgatttggtttttgagatgagatctcactatattgcccagactggtcccaaactcgtgggctcaggtgattctcatgacttagcttcctgactagctgggactacaggcatgtgccaccacatctggctggatattgtgttttcgtaagttgaaagtttgtgccacaacccttcattgagcaaatctatttgctccatttctccaacagcatgtgttcactttatgtctctgtgtcaccttttggtaatgcttgcagtatatcagaatttttcattattatcgtatctgttatggtgatcagtgatcgttgatgttactattgtaattgttttgtgttgccatgaagcgtgcccatataagatggcgaactagatatatgctgtgtatgttctgactgctccactgctccagtcattgtctcatctctcctcctctccttggacctccctatttcctggcacaacaatattgaaattaagccaattacacatctttcatttgaaatcaaaagctagaattattaagcttagtgagaagaccatgtcaaaagccaagatggccaaaacctagatctcttgtgccaaacacttagccaagttaagaatgcacaggaaaagttcttgaaggaaattaaaagagctactccaatgaacacatgagtgataagatagcaaatagccttattgctgatatggagaaagttttagtggtctggatagaagatcaaaccagccacagcattctcttaagccaaagcctaatccagagcaaggccttaactgtcttcaactctgaatgctgagagaggtgaggcaactgcagaagaatagtttggaggttgttttatggggtttaaggaaagaaaccatcttcataacataaaagtgcaaggtgaagcagcaagtgctgatgtagaagctacagcaaattatccagaagatctagctaagatcattgaggaaggtggctacactaaacaacagattttcaatgtaggtgaaacggccttcgattggaaaaagatgttatctaggactttcatagctagagagaagtcagtgcttgacttggaagcttgaaaggacagacttactttcttgttaagggctaatgcagctgctgacttttagttgaagccagtgctcgtttacattctgaaaatcctagtgtccttaagacttatgctaaatctactctgcctgtgctctataaatggaacaacaaagcctggatgacagcacatctacttacaatatctgcttgccacactgaatattttaagtccactattgagacctactgctcagaaaaaaagatttctttcaaaatattactgctcattgacaatgcacctcatcacccaagagctcgatggagatacaygaggaaattactgtagttattatgcctggtgacacagcatctattctgcagtctgtgggtcagggagtaattttgacattcaagttttgttatttaagaaattcattatgaatgtatacattataaatgcacaggaaataaaaattttgcacaaaccttaaaaaatttaattttaaaaatgctttattgctaaaaaaattgctaatgatcatctgggtcttctgcgagttgtatctgtaattttgacattcaagcctrctatctatggctatagctgccatagatagtaatttctctggtggatctgggtaaagtaaactggaaaccttctggaaaaggttcactattctagatactattaagaacatttgtgattcattggaggaggtcagaacattaacacgaataggagtttggaagaattttttcccagccctcatggatgactttgaaaggttgaagacttccgtggaggaagtcactaaaaatgtggtggaaagagaagtagaattggaagtggaacctgaatatgtgactgaattgctgcaatctcatgataaaatttgaacagatgaggagttgcttcttatggaagagccaagcaagtgatttcttgagatggaaaccattcctggtgaagacgctttgaacattgttgaaatgacaacaaaggatttagaacattacatataacgtggttgatcaagtgacggcagggtttgagataattgacttcagctttgaatgaagttctactgtggtaaaatgctatcaaacggcatcacatgctacagagaaatcttttgtgaaaggaagagtcaatccatgcagcaaactttattgttgtcatatttccagaagttgccacagccaccttaaccttcatcacccaccaccctgattagtcagcagccatcaacatccaggcaggaccctccactagcaaaatgaggggatggatgtggcagatacaacttgcagaagacccagatgatcattagcatttttttaagcaataaagcatttttaaaattaaggtctatgcattatttttaagacataatgctattgcatactcaatagactatggtatagtgtaaatgtaactcttaaattcactcagaaacccaaaaaattgtgtgattttctttattgtggtattcactttatttcagtcatttgcaatgaacttgcaatatctcataggtatgattgtactttacaccatagtgacttttcacagaacttttgttctttaaaatgtgtggtataaatcaaataactggaaaattcagacagtggaattaggttcctttgaacatgattcattcttcttttattgtgtctctaagtgtttgtcatgtttcttttttattggtataaagcagtgggtctcttaattgtgatttgcagttagtccgggcattatcacctaggaacttgttagaaatgcaaattattggacattatcttgaacttactgaatcagagaccctggatgtagtgtccagaacccggcaatctgcattttaacaagccctataggtgattttgattttcaagtttaagaactttgatatgaagtgatttactattctccttaataggagtaaccagtcaccagttcttctatttctatactttctcaaacccaaaaaatgaaaccaaacagcaaaaatgcaacagaattttatttttgagcaagtaacttgatctgtcttgtacctcagtttctcacctgtaagatggaaaaatttatagttttgggttttgatgaggattaaatgcaatagatggtttatgtaatgtgcaaagaacagctcaataattagttactgttaacactgtttttattatgttccagtttttcaaagcctttttggaggtagcaacatgattccattttaccaaggggagacgtatacccaacctggtttggttttagttctcttaaattgcttcagatcttataattcagacatcttttaacttattaaagctttttaacatctactttaaacattaactttatttgcattttctttaacttttctggtcttcattcatttccattttagttttttatttgtattatgtcttagtggtttttaaaatcttcctcgtggctggccacagtggttcatgcctgtaatcccagcactttgggaggctgaggtgggtggattccttgagcttaggagttcgagactagtctgggcaacatggtgaaacccatctttatgaaaaatacagaaaattagccaggcacagtggcatgtgcctatagttccagctatttgtggggccgaggcaggaggatcacttcagccctggaatttgaggttgcagtgagcagtaatttcgccactacactcagcctgggtgaccaagtgagactgtctcaaaaaamaaaacaaaacaaaaaaaaacaaacaaaaacaggaacaaaaacaaaacacaacagcgaaaaaaaaaaaagttctcctgttgtgatagttttactttgacctagttttcaaacttggtgggagatatgaaagtatcaacaggtgaataaaccaaatgatttcattaagtctcctagtcagtaatctggaggtacttcattttatatgcaagtgtataattttttgaaggagaaactatatctatggatggagaaaacayatctttgagcaaggagaggttttctaattttagttttctttcaactaataaaaaggtagttcagaaattttctgtttctagacctaattaactgagaaatctggatgttactgtttacttatttatatattattattttttgaggtggagtcttgctccattgcccaggctggagtgcagtggtgcaatctcggctcactgcaatctctgcctccagggttcaagcaatccttccgcctccacctcccaagcagctggggttacaggcgcctgccatcacatccagctaatttttatatttttagtagagatggggtttcacgattttggccaggctggcctcgaatccctgacctcaagtgattcgcctgcctcggccttccaaagtgctgggattacaggcgtgagccaccatgcctggcctaatattttgtattaatrtataaataaataacaaactatatatttttggagtataatgtgatattttgagagctttawagattgtggaatgactaaatcaagctaattaacatatccaacacctcacataccattttgagatggcaagaacatttaatatctactctctcagcaattttgaaatataccgtatattattattaaccgtggtcagcttcctatttgatctccagaacttattccttccatttaactgcagctttgtgccctttggccaacatctccccattcctccacccctctgtccctgcccctggtaaccaccattcyactctctacctctgtgagtttgactttttagattccacatacaagtgggattatgcagtgtcttttcatgtctggtttatttcacttagcataacgtcctctaggttcatccatgtgtctctttgacatactgatttcatttcctttggatatgtacccagaagtgaaattggtggatcatgtgattgttttatttttaatgttttgaggaacttccatactgttttccaaaatggctatactaatgtacattcccaccaacagtgtgcaaggatttccttttctccacatctttgccaatacttgttatcttttgttctcttgacaaaaactgttctaacagaagtgaaatgatatcttattgtggttttaatttgcatttccacaatgattagtgatgttgagcatttttttcacatacctgttggccatttgttttgtcttttagaatgtcttttcaggtcctttgcccattttaaaatcaggttgttttctgcatgttctcactcataagtaggagttgaacaatgaaaacacatggacccgggatggggaacatcacacaccagggcctgtctgggggtgggaggctaggggagggatagcattaggagaaatacctaatgtagaagatgggttgatgggtgcagcaaaccaccatggcacgtgtatacctatgtaacaaacctgcatgttctgcacatgtatcccagaacttaaagtatagtaaaaaaatacataaaatcaggttttttttattgttattgaattgagttgcttatatatttcagatattatgctcttattacatgtaggttttgcaaatattttctcctattaataggtcatcacttcactgtgttgtttgtgtgtgtgtgtgcatgtgcttgtgcacactatgcagaagtttagtttgaggcaatcccattgtgtagttttgcttttgttgcagttaaaaggtttttgttggaaagttaaaagcttttgttggaagttataagctcacctgcagcattatatgaaaataaatctttgtttcccaaggaatgatatgtatatgtgtgagtacacgtggtggtccttgtttttttctgtgtgtaactaagccactgtgtgcttttctatactacaaagacatgtcttctattttcagtgagtgataaagcctagagttttactcatggcttcttaattttgtatgaaatacagtttagcaattgtgtagttagtttacaaagtctaggtatgactcatcttcaggctatggctttttcaagttatgcttaaaggtcagaatctatttagttcttaaccctgccttttctaagtgggaagttagagtcaaaaaaagtaagaaaatatggaatttgttgggacttaatccagacctataggtttcttattttattgggttgctttttaaagaagaacaatcggtattgctaggaatttccagaatttctaagtaatttgaaagttaatcgtttaacagtgttcataaaagttggacctttggatttttgattttgcttaaatgtttggttctgacaaatacaaaaattggtaaggttcacaattcattttctactcatgtcataaatgtacatatgtctaaatctgttttgttgttatagacattccagaaatctcatttaaacaaaaatagtttgatgtaagtagcttaagaaattgttaaaactgtgatacatgtaggagaaataatttccatgtttgttagaaagtgtagtgtttatgtttagccatattaattttagtttcatttctcttaagtgttagtgaataaccttgaaaaaacacagtactttgactctgctgttgttgtttattactaccatgctagtaatgctgacggaagaaaattaagattctatgacttgattctttggaattctgactgttgtcactgtataaataaaacaatctctggctgctcatgcagtttttgtcccttggacaatataatatcctggcatttttcatactctattttcaaagccaaggtctagaattttaagtgggaaattggctctgaaataatcaaatgccaaacaaagcccatctgaaagtccaataaagtaaaattatagtaattgcaaaatagcgttactgagctaaatccccacagtttgaggatctttcatttatagaatagatgctgttgtgttgtcagagtggagggaatgtagtttgggccagctgggggcaaatgaggagccaacggttcatttttctgctagggttattggaggagaaaggatgtttgcaggtacagaccacagcgcattaggtggggaagaagactttactgagcttctgcttcacattgagtgtcaagcactgagctttaygtatrcataggtatgttagctccactaaacagggactgaaatagctaagagatgacgtgcccaaagtcatagaacttgtgagtggagaaactgggatttggaatggtctcttcactccaaacctttagaactgggtgttctaaataccaaggacaccgctgagttttccctagtgcttgtttgctgaagttttattataggttgtcgtcattggcttgtgtactttttgaaatatcaagcatattataagtatgttgtagtagatttctgtgtagtctttctaacagctctgagactttgaaaagtcttgggacatcttggtgactgttttgtggggtgttaattggggagtgtagatagatgattgctattattgctataactgtttttaaagagggaatgagcctagatttcaaggtacaacattgggtaatggtgtgtgcagtaacccatggaggctttctgggtctcgaaaacagtttttgcctactagcaggtatctggagcaggttacctggtttctccgagtctcagtttttataaaatgggaacgataagagttcctttagtgtgtatgtgaataagaccatgggaggcacataagtaagcattctgtaaatgctggctgctgttgttgatcttattgaggcttatggaacttttcattcttcttgatgtattccttttgcaatcatttgttccccttggtcgtgagcatggacaggaggggtgtaagtgttaccctcacatagggttacgttggaacctgaggctctggatagttttcctttgggaattttttgaagtagatgaattattatctttgtgtttgggaattttctctcctattttttttctctgagacatcttaaagacaaagatgtgattcttaaattcttggaatccctactccaaccccactctatttttactctctcaacctcaatgtctttatttctgaaatgaaggtaataacttcctctcaggactgtagtgaggattagatgtaaatacagacaagttttttgtacataacaaggacttaatcaacattagctgaaaggggaaataaaccttgttaaacagatgatattttccttcaggaaaagaaattaacttgtcttactttctgttgggatatttttgtcagattcttttcattctatacttgttacatcctcactggaaactttgtttatatggatttttgggtgtgtacccctcaggggactgtagttttctcttaagcttggatcttgctacagcttggtttgcttgtattagaatggcttctaaaggcatccagaagtattttgtagaatcattatgctagttataaatattttctgaacataaagtaatatgattcttgtcaaaaagcatactgaataaaattatccataatccctccattaagaggtattagcattttattttaagttttcagtccttcctccccagccttgtattatggaaatttaaaaatattcagaaaagtagagagaatagtataattctctgtgtattcagtactcagcctcaataattattaactcacaatcttgtgtcatcaataccaccatctaagcctcctttcctccctctctccgactgaatttattttgaagtcagtcctagacatcaaatcttttaatctataaatatctcagtggcggatgcttttaaaatgttacgtatcacagtttctaacacacatacacacacccctcttttactttatttatgagtacttatttctgtcaccatattcttcttaactaaggtttattaattgggaattattgaatagccacagaacatggactccaagtcaacatcttaattgttcctgaaggcagctgtaggtggcggggatggaggtaagtattttggtgagtggggtggagggtaagagagaagagttcttgaaacatgggcctttctcttttttaaaccccttgctccccagtggaatgaagacctgttagtttcagggttagaagccaagtgttagtgtatgtagcccttcttgactctgagccaaaaacctgtttggttaatgtataaatcaatttgttcatttcaaaatatacattattgttggacatgtaccctgtgtcttggtcactgggaccattctataaatctgggtaatgataatatagtcagggctgttgaccaagttgtggaaagtttcttgtgccaaatcttgcagttacgctttcttggaaccctggcaaggaaaaggagaactgtaatgataagccaaattaaatgaaatttcaatgttcaaatctgaagatttactaaaacagagtttgacatagaagagtttcctgtgccattttatgtttaggctcactatagcttggggtggctatcagttggtggcttgattgcaacagcaaggctaataaccttttaaaaaagttaaagaatttatacttctatattgagttgcatattaattggttaaatcgtttgtgtttttttttttttttttttttttactgaatatagtactactttcagctcttcttttggttatagaaacacgtttaatttagattcttggagaaaagggacccagcctaattttaattttttcagccctacttttttttttttttttttgactttgagtgataacatttcctcttgtgcttttggttgcatcctgaagtttctgcattttttctaaaatgagttataaatattcaaacacaattcagacccactttctaatccataaatgatctattctgaggttgataccctgagaatcctatatgcggttgctggacggtgcctttaagacagttaataagactgcccttgagatcagggacatagcagaatcctaatggatctccctctttggtcagttgctttgagtattattattattttttaaagatggatatgctgctattcctccgtatccttgtgctggctaaccagtgatcatttggtgtaccacctggagccctaggttcagatgccctctaccctttttcctccttcttaatctcagatgagcatgggcacaagcatatgtaaggacacagacatgtgtttctccttgtttctgaagtccccagaagacctgcttctctgtggctttaaccgtttgattatttcttgagtaaatatttattgagcaactatttgtatcagcagggtgccaggtactggatgcacaggtgaatagggcatttcttgctcttatagagtgcacagtctgttagatatgctagatctgtaaactgataagcatgtatacgtgtttaagtatataaatcaggctggaaggatacataacaaatggttagcagggattggagggagaggagaggactctgttttaactgaatatgcctacgtattgtttgaacttgtcctaagcgtgtattgttcatgcaattaaaaagaacatgcattgtgataggtacaataagtgtttattttgttagggggcagaagggtccttcacatcccctcttcttttttttgagatggagtctcactctgtagacttggtagaaactgggtttcaccatgttggccagggtggtctcaaactcctgacctcaagtgatccacctgcctcagcctcccaaagtgctgggattacaggcatgagccactatgctcagcccaaaaagtgtttaaaaatacagtgggaaagtggttaattccatgtgatgaaagtacactttatatatatatttatatatatatatatacacaaatatatatataaatatatatataaataaataaatataaataaatatatataaaaatatatatataaataaatatataaataaatatatatataaataaatatatatatatataaatatatatatattttttccttgagtaggaggaaggaggaagtgaggatatagagagtggactttttctgaagagggactagaatgtgcccacgatggacagagtagctttttatgttcagggttttggtagtgactagcttatctagtctaggtctcagggcaccacagcttttctttccttgggggtggagaggtaaaatgcaatcatattttctttggggatttggaatatattagtttcaatatatttaatatttttgaaaaggtaccgtaattcgtggttaggttttcagtgaacctgggcaygttttaaaaactcatggtatagataactgtagacttggactgtgactaactttgtttcaatgggaatattaagttgaattacctagcagtgtgtattagattatgagagtggggaggacagtacttatagcagtggttctataaagaaagtgaacaattaggtccttgggtccactgggctactctagaagttttcctttttgggcagtgagttggtaagttattcgcagtgtgcgcaccccaccaagagcacagttgcattacagctcactgtgttttcctcatccctcccaactccttagcccaaactgttctaagtgtagctgataacctagcggaaccgaagctttgtgcattgtacagtttgatcagtaacacacttacagaagataatcttgtcaattgtaaacaaatactcagtggggcatccttttattcctccaattggtgggagaaaactaaatactgagaaaaaaaaaaaacatatcagtcagtaaaccagagattttacctaatatatgtggaataaagcagttaattccttgattctctgtatatgccagtactatagtgatatcatatttgaaagattccagtgtgttttaattctctaactttttacagataaatggaagacgtgtaagctgagtttaatgtagaaaccagtcatattaagtgctacccataccgtgtggtatttctcccctgactacaaaacatttgccttttggaagaatggatggctcaagggattagtgatggggaagtggaggttttcacattggttcagatttgaccttggtcagtgatgcttgaaaatcagcactatttaataggcattaagagagcccactttttgatccacttccagtggataaatatccatagttctttaatgccatagttgcggaactaattggcagaattaaatgatttaagaactttactccccttttgccctcagaaaatagttggttgttgtttaaatcagaatcttggaaaatgcatgagttgtttctgaggacctgagactatagctagctttgcagcttttactgtattgggaagcttatgtactttgaattacttttagtaggtgaggctggagaacgcaaaggctattttttcttttagtttgcaattttgccaaattcgaggcttgctcatctgatcctagacacacttaaaaacatacaggagtcatttatttccagagattcattcttcttttctccatgatcaaataaagggagtgtaagagccatctcttttctaagtctcctcattttccctcccctggaagaatttcaagtgcatgaaacttttctgacaccctgcttctgattgatatgatggacttctgcagtgtggcttaagtgaagttagtagtgttttacattttacactgagtaactgccagtcttgatcactctgtatttatagagcatccagggaagggtatgcactcagggatgatatattacctgctaatttgtttgctgaaagataggcccgtatatttagaatgatgacagattagaatatttggctaagtgtattagtcagtgtctcatttttcaaaacatgaaaactccagcatgctgctctaaaaatgctgtgctggagatggattttacttgccaartggatttctatcctgactagattcacttgcttatttatttatttttaaaagtcatcttttgttatatcctaagttggataatgaaaacttgtggctgattctttttcttcttttacagattctgtttgtcattcctgcaactcactttcctttttcttattatagcagtrttggacgccaacgtctttcccacataaagaaggtcaagtacagaaatctgtaggtctgactactctttgttctgtctgtctgtggccaagaggtatagacaaggccttcactgaaggataaagggaaaaaaacaatgggctttctaacccagctgagaggctttaggattgtaagagaaattaaaagcaccatccaggaaggcagaaaagcagtatttatgcttagcaggtagagatgctgcttgttccagatgtctctgtggacctttatggagctgttctctccttgtgcacataagggaatctggaaatgtatttagcctggtttgtctgaatagactgtcaacaaaaagaaaaggaaaaggctgtttcaattattatttgtcaaatatatgacacccctccctacccagcagggacctggctttaggacggtaagattagatagtgaataaaaggtattcttagttcacctgttatagcaagtgatctttaaaaaaaaaaagtgttttagatattagcagatcagattccaggtaaacccattaatgttgttcctccacgacatgttactgattttcccaggactgtgcttgtaatccatatgttttaaagatatttatgtctggagttgatcagagcttcagggataaattttttcctttgaattctgcctagtgtgcttcttggaaactttccccagcatgtctgacagctctgataggttactgtgcttcttagctcttagctccaggtttatgagatctaagctagcaagccagcagggctgtgagctgtgactggatgggaatgggggacggtaggtgttcctagaaggtgtttcattgggtacagtataagtaaaataaagacaaaatgcaaagaatgctctgggacctagtgtttttgagatttcacaactctgattagttaagacttgaagccagtcttaactactgtatcacctgttatactacacaaagtattagggaaacactttcatttttctggtcttaccaggcagaaagataggcagggctactgagcctcttattcttaagaatagtgtcttctcttaggaaatcaaaatgataaattatttctacctggtcatcccctaaaaacacttaatgtataaaattgcacatgtatctgggaaatgattcttctgccattaaacatatttactcctttttttcttgtcactctttttttgcatttgcagtttcttttattacacttttgaatttgcttaaccaaattgtctctgaaattatctttgctggtgctaagggtccattggtgggttgtttatatttatgaagtagtttattaaaatctgttagtgtcatagatcaaattttaaattcctttacatgttacttttgaggtgcaaagctagaagtgtaaattatttctaaacttttttttttggtgaggattgcatgaatgatggtggtggtagaggtagtggtgggagtggaaacagcgatagcagaattcaaccgcatttttaattactgtcatggtatatttttgcttttggttctgtgtagccaatggctggaaacttatagtgattgtgaaactagtattactatggaagctactgagtcacttagtataatagcccttttcacaagcataacttgcattacatggtaaatgttgacatgcatggctttatatatctcctcagtataaatgggattaaataaagcatgaaaatatgacataaaatatttatagaaagataatatttaaattattgtgtctgaggttaggcttaggattctctccatctccccttggtgatgtccttacttctgttccctaatctctgcccccccacccctcaaacccaaacaaaccaaaaccccaaaactctacattcttcaaaaggatcagagaaagttaattatagtgatacgcagcgagtaggacaatcatagctgttggtctgtcccaaagcctacagagggttcttatttcataagcagagataatttgtttttctctgtgtgccatatggttttgcaactgcagagatcaaacagatttgtggatgtaaacttcagttctgtacttaaaaaactttgagtcgtgtggagattttcataatgtgcttgaatcattgatgccaaccaggtctgttggagtcaaggatctcttgtcagttctgtaagcaaccatgtgtggtggtttttatttgccttggactttaaagacaactttggaaaggaaacttggacacagattgtcaactggaatgcaatgattgtcttttgctataaagacgatgattaaaaccagcaatcattagcatagaaggataatagttctgaggctgcccaggtggtctctggaaaagattggagttttttcttaatcagaaaagttttaattacacgaatttattttgggattaattattttggggatagtcttcagaatgaagagtttgagtatcttgattgctatttttaaaatgagaaaaaaatgtaagtgtgccaatgatttccctcattttttgtctatatatatagtgctctgtcctgctggtctcagtgtatataatttttaatacagtgctccattgatctaaagtagatacatgttaactagagaaataaaatgcatgtgcttgtgcacacacgcgtgtgtgtgcgtgcatgcatgtgtaacctggagaaaagtacaggaggcagcacacacacacacaaaataaagtagatacatgttccctggtccctttgcttttcagttataacatttaacagtatacctaaattatctaaactgtctcaatttatagatataacatttgatagtgtctaatatttcaaatatttcgaggtagctagaagagaggatttgaaatgttaccaatacgtagaaatgataagcatgcaaggtgatgacaccccaaattccctgacttgattgttacacaatctgtatgtgtaaaaaatactcacatgtaccccataaatatgtaaaatattatgtatcaatgaaagaaaaataataaaaatagaataaaaaattttttaataagagtgtaaggctatcctctctgcatagaatgctgtctcctgttagcccacaatgctcccygcccacartccttaaaatcttagatgaaatgttattccctgaggaccttcacacccagcttcttctactattaggttttcgggcacaccctatatctacttcttttgtgcatcaacatcacgtttgtaaaaattctttaattttggcttactcccttgctgtttatctagctccaaagagcaggaactgtttgtcttgtttttgctcttttccccaactcatggctcataatgggtgctcagtaaatatgtgttgaatgaatgacagtatagttggtataaatcatgcttatttagtatgtaagatataatatgttttcttttgctaattttcgtatacatcatctttcaaaatagtagttgtggctttttgcctccttcttttaaaaatgactacataccttctgtttgcatgtattgaagggatctggtgtctgggtatccagatgttatttctgatttttttttcttcactttaacttatgcatggcagctattattttgctatttcccaggcttataattccagaaccctcagcaggaataagcagacagtaatgaatttctatgtcaacttcacaatatgtttcatttttgttggtacagaaaacaacacctgagactgcttgaaaagtacaggtttatagtgtgagcttttaggaatcatgttatccaagtctcccttattttatatctgaagaaaccagtggcacagagaatgtatctggtgttgcccaaagtaaaatgactagtctggtttgtgtttacgtagggttaagaacatagtcacttgcttctgtgttagtactcttgctgctacaaaatccttgtatttgtcagaaagtcagtctttctttttaccaaaactatgttgtgcatattgaacattcaggagtgactattccataaaatatgtattttatgctctctcaggcagtggtgataacaggtacacaacatttgacagcacagagtaatttatcctacatgactcaggtggaggaggcactcaaattaaaggatgccatgtgatgcatttcaaaggggtgaagtgatttggccaaaggctctgccatagtaaaattggtcaccatgcctctgcctacccctgcaaaaggcattggctttgaaataaatatccccatataataaactcagcaacttatcagataagttaatgtggagtgccaaaataaagagaagttttattcttccggagtgctattcttaccctttgcactggtgtaaaatgcccccacccctctgctttcacaaaaacagcttggaaactggaatggcaacttgaacaccacttactttaaccagttaacaaaagctttgtttattttatgtttccttttaatagcaaaagttaaaagtgtctcagcttttaaaagtactcatacatatgttttgcaaagragtatcctttgctctctttaggaacacaaatattccaaaatacttatatcagtattttaaaatggaatcgtattataaagtataactttacttttatataaaattatttttagtaaaaacaaattagcaaaactgctcagtgaatgattcccgagagaccatatcccatgaagccccattttcctgctacagggttcctgggccataaaggtggacctggaacaggataaaacaaccattgtgctacagtctaccctcatcattcagccttttagtgaaaaagacaagcagccgtcagggtgattcagacccttcaccaggactgtgactaagctatgagaaagatgctctccccttcctttctgtttgtaatgctggcaagtttcaaatccgaaacagtttgtagtcatggtcccagtcttgtggaaacagagcttgctgatgcaaatgatgccaacagtttctcatagtgggcaaagtaagtatgaattgcatttgctaagtgatattccagggatgtccttcaggcagtggtcataaaactacagtgtacttaagaattccctgggggtttgtttaaaaatgcagattcttgatctctaccccagactgagtcagcctctctaggggtccaggaatctgtatttcacacaaatatctcagctgagtttaatgcttttgggtgctgttgaattgataagagcctattcttcaacttggcagctgaggatgtgatgctggcttgcatttaggcacaagtgaggtttaggtttattgcaatgaaaaagttatattgcagttcgggttggaaagatgcttcctggttgggtgcagtggctcacgtctgtaatcacagcactttgggaggctgaggcaggcaggcaggcagatcacttgaggttaggcacttgagatcagcctggccaacatggtgaaaccctgtctctaccaaaacaaaaacaaaaacaaaaaataattgcttctgaaggccaaatatggggctgcgtttattagggcaaatcatttgttaaaaagaaacattctttcctgaagatatgattttggggatggttgttgtagtggtcrctgaaatcaatggttctgtgttcatacacctgccagcccatgttctccagagctgctgtttagtactgtccttggcttccttcctgcagcctctttttctgttttcaaccaactgtaaaaagtgaactacagccaactgtaggcctgaacaactggagaggagaggaataggcagtgatgtctgtatcaatcgtctatccagttattttttggttttctttggttatcaatataggttatccccctctaattattttccatgtattgtctcttgattcaagataaggaatgaatgaagccctgggaatagaaagtgtgaccttctcccagcagtttcttcccaggacttgccctctcccggtactttttgccactagatttttctgtttctgaaacagggtagaattactcgctaattaaaatacctttgctagtgtttctcttccttaaccccagttgatttacacagagtttttatggaccgtattatattctcactagtgcctttctctaggaagggactaatggggttcatagatattcttgtttgtttcttgcaagtaagcagtgccctgaaataggtgaggaagtagcaatttataaagatgtgggctagtgtctacacagtaaaaatctggaccaggtgtggtgatagtcactgtagtagaaattttggtgggggcaataacgatgatgtggcaaaaactgtcaagcagggctttaaaggttttagctatattaattcattcagtttacaacacccccatcaggtaatgttgattataattcccattttaaagatgaggaaattggaccacagagagattaattggcttaaactagtaaattgtagaggcagattttgaaaccaggtaacctgctaccacattccatgccctcaaccccactaccccactatgttattctgctctcctaccaaattagcagttcacagcacctgaccaaaagcccctgcttaaggaagaatggtggaatttgaggaggactgggtctgttttcttggtggtatgaacaggggccaggaggtgggaaagtgcaaagcttgtggaggaaatgatgttcctgagactccaactgcaggtgcaaaccgaggagctgttgttagttaaagactggaacagtaggttgcgttcttcttctgaatcgtagtcattgagtgcagaccgactgctactggtatagctccatggtcttcaaatcttgtgctgattgcatacgttgtcattataacttaggttgtttcaaaatacgtaatttggggcatattgtaaaaattggcttttaaaaataggccttttacataatatacttaagtagagctgatgaaaaatctaacattgtcataccagccaccattcattaaaaaaatcagtgaacaagctctttaattggaaacttatctctccctgtttacttgaactcttttgttatcttatttctcccccaamttttatttatttatttatttattttgagatggagttttgctctttcgcccaggctggagtgcagtggtgcgatctcggatcactgcaacctcctactcttgggttcaagggatttttctggctcagcctcctgagtagctgggattacaggtgcccgccaccacggctggctaatttttatgtttttagtagagatggggtttcaccttgttggccaggctggtctcgaactccttaccttgtgatccgcccacctcggcctctcaaagtgccgagattacaggtttgagccactgcgcctggccttctcccccactttttattctaatataatacatgttcatgttttagagtcttttatggattatcatgtcatacttatgtaataaaaatatatcaatactgaaaattaaaaatatcctatgcctcaaggattatttaatccagaagtaattgtataaatatttccatttgtggaatggagttgatcaaaataacatgattatattacaaattctgataaatgattgataaaaaataaaaatatttctgtttatacatycatctattgcatatatacaggtgttttattctttataaattcgtttattactagatgagaaaagatttggcatcatttttattttccctttttcttttctgtgtaagatgcaggcactgaaaaaacttgtcaaaaatgaaaaagggagtattatagcagtgccagtcaattgtttggagtttttctgaagttatatggcaaaactcacacagtaatctcatcagaacttatttttaatgatttgttggcagatggcttaaagaatggatgctcctgtaattttgtttgaagcaatccaacttgcaaaagcattttgttcccttttagacgtctagaaatgtttcttatttatttatttgcatcaagaccagtttgcttctagtgggtctcctccttgttgcctgggaggttttataatcgtgggcagtgtgcctagtgagatgaggggagggtggtggctgagaggtatgcccactttaggaagtgagaggcagttaggaaagagaagggaaattctcaggcatattattttacaaggaagttgaagatggagagatagttgttttcctttagagttttcatgtgccctaaatgttatacatagcccggtttaaagaccatcagtgtagaatgtagtagagtagtgagattttaagttttatgttttctcagctttatgggttcaagaaytcagttgcagcctgggtctggtggctcacgcctgtaatcctaggactttgggtgggagaactgtttgaacccaggagttcaagaccaccctgggcaacatggtgagacgctgtctctattaaaaaaaaatagaactcagtttcagctctaaaaatttaggttggaggctaatacttacagaggaaactgtgttttcaaccaaaatgctatttccggcatgaaaataaaccagagaatccagtgtaagattaggttaagatgatttgtggggtcagttagatgaccttcaggaggagtgctatctgaagactcgtctggccaccctggggaaggggatgattgggagtggccaccaccatatgctttatcatatttgtttagcttcacgaaacacttcttaattcgacaccagctgactacttggtctagttgtagttaattaattagaaaggaataattaaaattaagaytaaaattattgtttcttacagacttaaattctctttccaccgttcattaggcagttattaatttagccacttccgtttgagtatctgcaaagtagttaatttagtttttcaaaagtagtcatttttcaccctcattttattggttaacaaaataataaattacttaagtacaagagcaaatggtcaagaacaaaagcaaaaagccaggtttcggaacaaacaagatgccttgtactaagtatattatgggagaggtacttaatagctatatacatttgctctttggagggtgtcacccatgtattttacagagggaaagtaggtatccttgtcagattgagaggtaagtgaagtcagttaaaagtttaaagtatatataatcagctttgttttgctgaactttgttttattgagagttttgtgcaatttataatattgtttcattgattttctttcttattgcatcttatatggactgttgtaacattctgtgagtatattttgttcatgtcatccatttttggtgttcagtaattttaaaaatgaattttaagtagggacaggagcttgaatatgtaatttggttttatgtaccagaagatccatcagaaactgagtagccaaacttgtaacaacctgtattggtgcatattctgccagactatgaattttcttaagtaatagagaacagaggtctttaaaaaattgtgaactgagatttttttaaaggtgaaatgaaagcagtactgtacaggaaattaagtttttgggtaaggaagtggaattggtttgattgaaattgttaatgtctctttaatgaggggttatatgaaaaatgttaggcagaaagtgtgatccagttaaaaatcctaaatatgaaattgattcagtttgaacaaacagtatttggaactgaacagagaggaaaaggaaaattcttatgtggaagaaactagtcattatcaagggtatgaaaagctgctggaccattacaattgatttgcttttctctaaagagaaatacctgactcagagatttgtgattttagtatgtgaagttttcctcaaattagtatttagtattctgggaacattttcttttgccaggagggttgtgattgtctatttttgtgaattgtaaattaaaaaaaaaaaagctgtttattttttgtcttgtacaggcaaggaaagtttctaatgtagttataaaaacttagttacatattcaagctcctgttgtttcctgtcttctagatctgtaagataagaatgtctaaaaggtcaagtaatttgaccagccttttgggggaagtccagtgaatagtagaataatatttagagatgaattttctgtcataggcatgggataaactctatttcagtagaaaggcaagataatgagcaggatcttatrtagacaaatcgttcattccaaacatgctggctctaggaggtgttcagtgtgtttgttgaatgagtgttacagatgaattgaggtcagatggaattgaggtcagatttctccatgagtggagggattttttttctctcatgtcctgggcacctaacaccatgcctggcacatgcttgtcagctgtcctttgttgaatctgcgaataaatgtgaggccgactcaacaactattacctccttgtggatatgcatataagctcttctagagtattttgggggaagaaataaccagaatgtctgccctctcttcttcctttgtgaaactgttttctacagttacatttagtgtcgagaaatgagggcttttttgttttgttttaagtggcttttaaagttgctccaagattcatgaggttaaagtataaaactttaatactttagaaaaataaggacttaattctggattctgacctctggtggtgaagaagaaacacctattactcataataaaagatcagattctcatatgttctgtagtactttctggatgtccaatgtagggaaagtcttaattagaaaaatacaaattttgtatgtggttttgaattttcatgagacaaaaattttatttttttaccttgcaactttttgataagcatataaaaaacatttaggttgtacctttacaaggctcattactgaaagtggttttttatttgggaccttgcctgatgagaaaaagtagattctacgtgggatttttatatggtaatactagtcttatatttgacttcttaaactttctattaaaactatttcctaagtaaatctaaggtttatttggataacarttatattgttatcaagaaaaacatgaatgtattacttgggaggaatgtcaaggtagattattttgggtccttaaaaataaactgcttatcagaaactcaaaactcgtctttattatcacacctatcactgggctcrtaggttctgttctcgcctcttctrctctcaaaccgtctattctgccccaacaacaacaacaacgataacaacaacaaactgggaaggagatgttctagcagctagagtctagctgctagtggtgccgcatgtgatgagctgattctgctcacacgagtgatgtcagccttaattaaaaaacaaaaacttgaattttggtggctgaggaaattaaaagggtagatggaacacttgctaccttgcacctgaactctaccttgtatctactgggtggtcttttgcaagtgacttaaccttatttttggtgtgtgttaaataggattacgaatgcttccatttctaaagtgtaagaaggctctgatgtgagtgtaaagttctttgcaaacaagactccaagtaataaaatcctaaaaacatctttgctactgttgctcactgtcctctgccaatatgcttctgagaattgatcagagctttataaaaggaaagtggttacagtatgtcaggaagcaaaacccgtgagaaataagtaatccataaactttacagtcataaagggatccgggtgggtggatctgatgacttggcaactcagagagggaagcaagtgtaattgttgattttatcagagcaggtttgtgtatttgtttgtgcacrtagggggatgggggttgaatgaagacttaacaacatgaatttcgtgaggttacaaaagtctactgctgcataaatcgtaggtaatatgttcatgtctatagggtgtaatgttaatgttcaataaaaattaatatcaaagtctgtcatagattttatgttttggggcctccaggtaaatggtttgtatcatcattgggaatttatggaagttgatttaagtatacagtagttagcactctattaaatactgaagtcatgcactgtgtcaccttgatcaatgagcaagttttttttkcttttctgattctggaatttcagcactttcagctttgaaggttgccttgggtttgtttttgaattaaaagtgtcacaggagaaaggctgattgttacattcatgaccaatcagaagggtctgtaggactcaaaatgtttggtacattccttaaattagaagatatgcttctggacttttcccagggaaagcaggtccatgtaataatttaccaaaaggaagttgggaaaatgaaacatcaccttttgtgagaaagaggatggggtggggagagtgctttaaagtgatctttgctttgtggaatgcattggattaaagagtcacagaggccacaaaaagcagctcagtgagttatcaaatataggagtacttgagaaattaaaccaggtatgttattattctttcttggggagcctaaaaataaactcaaggattgggattgttccttttactttcatatctgctggctgctaaaggcaattggaaattttagccaacatattgacctacttgattttcacgatgagtatttttttcctcagccgaattggccatttaaagaaaactttgtggctgggtgctgtggcccacgcctgtaatcccagtctttggaaggctaaggtgggaggattacttgaggccaggagtttgagactagcctggttaatgtagtgagaccccatttctaccaagaaaaaaatgaaaaaaatttagctgggcatgatggcacatrcctgtagtcctagctacttgggaagctgaggtgggaggattgcttgagcccaggaggttgtagttatagtgagctatgatcatgccactgcagtccagcctggacaacagagtgagaccctgtctcttaaaaaactaaataaataaaataaataagactttgtaacatattaaacaagctttatcatattaaaaaatacacacagctgggcacagtggctcatgcctgtaatcccaacattttaaagaggccgaggaagttcaagactagcctgggcaacatagtgagactctgtctataaaaaaaaatttagtcatgtggtggtggtgtgtgcttgtggtcccagttactcgtggggtgggaggatcacttgagtctgggaggccgaggttatggtgagctgtgattgtgccactgcattccagcctgggtgacaaagcaagacctgtctcaaaaataaaaaacaacaacacacacacacagtgaaacgaatggcaccaaggaagaaatccaagtgcaagaaaagagggaatcgtacaataagaacaatagggtggaaagccagggtgaaatacacatctctgatgaaggaagggctgtgtatctgggtccttacttttccccttttacttgggtgcttctgtcattattatttgtaagtcacttctctcatgaagtgctttgagcttttggggcaagtaagagtagagaaactagaaatagttggcaattcattatcaaccttgttacgtgggattagaactattgtctaagatgggattgtgagtttttgaattgtaggtgagattttaatgcgtgtgtccatgcccccattattgaagtgggtttggagttcatgatattagaagcaattccttagttagcagttcttgtagatgagtgatgagccacaagatttctgttgagatcaacattcagttgtatgaaattcttgaggtgcagaggggagtagaataggaatttcctaatttggttggattgactccattttggaactagattttctacacgcatgtgctaagaagagagatggtggtcacagtgaatggatcactgcgcaaagatctttggtgagtaaatgtggaaagaagttttcatgtatttgtatttctgtcagggtgggattaaaaggtctkagtaggtagtggtctttataattctcagaccagccaaggtgaatttgatagtcttggctgtacagcgtagtggttaaaagcatgccatttggagccagactgtttaggttcaaaccttaggtcttccgccagtcgcctgtgtgacctttgttcattaactgtcatttccatactttcttcatcttcagaatgggtcgcataaagtacctgctttctagagttgttgggcagattaaacgagttaactacgtaaaatgcttaggacagttcctggcacggagtaaatggcatatatgtgttagctattattattactactaatattattagtaggaactatttgagttagtcgttgttgttgttataaaccatgctgggttggtaacagagattgttaccaacaattgttggtgtttctttgtagagaaagcaaagcctgatgtcatttttatctttgtgtccagtgttttggctcacacaaattatagctacttggcttttctcattctgatgttgccaaggaatcttataatttaatcagtgatttgagtggcctgtgccttgtcaaatgaaggcactattcctaatgcctcattttattattattgttatttttgttaatatctttgaggcagggcgtgatggctaatgcctgtaaccccagcactttggcaggcccgggtgtgtggattgcttgagcccaggagttcgggacccacctgggcaacatggtgaaaccccctctctacaaaaaatactaaaattagccgggtatggagatgcatggctgtagtcctagctacttgggaggcaaaagtgggaggatcagctgagccgggggaggtcgaggatgcagtgatggtgccactgcactctagcctggctgacacagtgagaccctgtttggaaaaaaaaaaaaaatctttgagcaaaatatgtgttttggtaagtttgagaatattgaaattcccaacaaatattgcccatcagtctttcaaaggcattcaggtgagtagtttattctttttgcagctccttgctgcctttttatcagcctgctgcccagagccygcagaagagattacacctgggacaggggatgacttttcttcaatcttactcttaacagggccattccaaatggattttagaacaatttcacataattagggtaagcaggttttacccttggtgtttccaataattaattattacaattaaaatccatttactgtatgtactccaatgggatgtcaaatgtaatctgtatttagcacccccctggaaaacttaaaatattttcatttaccattgttcagactccaaatgctgatggcttttcagagaacaaaaatgtcttccttgcggaggaggttaatctcagcctgtaccagttagatactacgagagccatcataaacgcaatgtcagagaactggagaagatagagccaactgatgagatagatgctttttcctgttcctgttagacatatgctgtccaatrtggcagtcactaggsaaatttgactgttgagtacttgaaatgtggttagaytagagaattgaattctaaatttcatttaattttaaacttaaacaagaggcttgattcaattaatggaaaattgtaaatatgtttagagcaacttgggtatgtgaatctaccttttcaactgtaaagtttttttggactctagatacaagtcaagtagtcaaatgaaaatttagcatctgaattgagatgtgctataggtgtaaaatrtgtaccaacttttattttgttttatttttgagatargatcttgctgcgttgtccagatgggagtgcagtcatgtgatctcagtttattgtagccttgagctcctgggcttgagggatcctcccacctaagcctcctgagtagctaggactataggtgtgcactaccacacttggctaatattgtttattttttgtagaggcaagttattgttctgttgcccaggctagtcttgaactcctgggcccaagtgatctatctgcttccacctccgaaagtgctggaattacaggcgtgagccactgtccagtgtatgtaccttttttttttttttttttgagatggagtttcactcttgttgtccaggctggagtgcaatggtgcgatctcggctcactgcaacctccgcctcccaggttcaagagattctcttgcctcagcctcccgagtagctgggattacagtgcccaccaccacacccagttaatttttttgtattttaatagagayggggtttcatcatgttggccgggctggttgtaaactcctgacctcaggtgatccacccacctcggcctcccagagtgctgggattacaggcgtgagccaccatgcctggccatgtatcaaattttaaagacagtatgagggccgggcatggtagctcacacctgtaattccagcactttaggaggttgaggcaggtagatcacttgagcccaggagtttgaaaccagcctgggcaacatggtaagacctcatctctacaggaaaaaaaaaagtatatgagtacaagaatataacayatctcaatttttaatattcactacaaagtggaactatttttggtatattaaataaaatattatgttaatgtcaccagtatctgttgtgccaaactcctattgactccagtggggatggcaccagattcaagaggccaaagaagagacccagagccagcaaacaagacatggggtgtttctgggccttatatacggggaagaatccagtggcagcaggctggacagggtaactgcacaggccaatggcagcaggctgggcagaagaactgcaactgcttgcagaaggcaygcagtttatgtagcatttttacttagcaccctcctctaacagtctccacctggcaaccttcgttcaacccgaaacaaagagcctcgatcccctgtatggcccctgcctgttccacgggacaggatgggagtgagagagggtaaagacttggatgttcctcatagttaaggaatggatctccgggttggcctctcctggattccttagcttggaactctaaatgcacattcaggtgcatctgccatacagggtcattcgcaggtatgcttaagttatcactgtcaggtgtgtctaccatacacaggttcgtctaccatacagtagatttttttttttttttttaagtgataggttcttgctctgttgcccataccagagtgcagtggtgtgatcagagctcactgcagccttcaacctcttgggcttaagcaatcctcctgccttggtctcctgagtagctaggactacaggcatgtgccacgacatgtgccagctaagtttaaaatttttttgctgaaacagtgcctcactgtattgcccaggctggtttcaaactctgggcctcaagccatcttcctgcctttatttatttatttattttttaagtggcaatgggaaaactttaaattacatgtgtagattgtgttatatttgtatcaagcaacattgtattctctctttttacaatctgtgtctttggaagcattttgataaactcctacgttcctgtgtgttgggagttcatgttctggaagaggtcagagaaataaaaatcatctggaaataataytagcttaatatatgttgaatatgaaaataatctcaatcttgtccctttcataatttctttttttatgactgtttttttagagatgagatcttgctgtgctgcccaggctagggtgcagtggcacgatcatagctcactgcagcattgaaacacttgagctcaagtgatccttctgcctcagtctttctcgtagctgggactggagatgctaatttttaattttttttttttttttttttttggtagagactgggtcttactttatttcccaggctagtctcgaactcctgtcttcaagggatcctcccatcctgacctcccaaagtgttgggattacacatgtgagccactggacctggtcccctttcataattgaatatgaatgtttaacaaatagatttgctgctcgggctgatttaaatctaatacggttaaagatgtatgactaaaatacaaggttgttaaataatactttgtatataggtaatatattcctgtgtactaattgtttttattgtggcaaaaaaacttttacacataacataaaactcaccctccaatagtttccaaatgtacagtatacttttgccaaccacatgcatgttgctatgaaacagttycccagaactccttccacccaccctgtgtgattacaactctgtacccatctaacaatggatcccctccccttcaccccaggcctcaggcagccaccattctactttgtgtttctgtgagtttgaccactgtaaatgcctcatgtaagtgggatcatgtggtatttgtctttttatgactgatttatttcacttagcgtgtcctcagggttcactcttatagtatatgacagaatttctttaagactcaataacattccactgtatgtatataacacattttgtttatttatctttcaatgaacttttaggttgctcctcctacctcttggctattgtcaataatgctgctgctgctttttttttttttttttttttttttttgtagagataggtcttgctgtgtcacccaggctggattgcagtggcgtgatcatggctttctgtaacctcgagctcctgtgttcaaatggcccttctacctcagcctcagctatagcctagcctgtagctaggactacagatgtgygccaccacgttggctaatttttaattttttttaaagacaggttcttactttgttgcctagattggtctcaaactcctggcctcaagctgtcctcaaaccttggcctcccagagtggtgggattataggcataagccatgcccgactgagtaatgcttcattgaacgtgggggtacaaatatttatttgagatactgattgcatttcctatggatatatacccagaaatgggattgctgaatcctatggtaattctagttttaatttttgaggaatgttcatagtgttttccatagcagctctaccattttgtatccccaatgacagtgcacaaggattctaatttctttacatccttgtcaacacctrttattttctgttttttcagtagtggccatcctacgtggaaaagatggtacttcattgtggcttcatttgcattccctgataattagtgatgttgaacatcttctcatatgcctcttggccatttctatattttctttggagaaatgtctgttcaagtcctgttcaacctcttatcaaatagatgatttggaaatatttattcccatttcataggttgccttttcatttcattttttttcctgcatggaagtttgtgagcgtggtatatatagtcccattagtctacttttgcttcgttgcctatacttttgctgtcatgcttaagaaatccctcccaaatccgatattctgaaggttttcccctatgttttcttctaggagttttataaagtgttatgttttggtcttaatccaacttctttttctggcatgtggaaatccagttttctcagcaccatttgttggagagactatcctttccccattgtgtagccttggcatccttgttgaagatcatttgtccatatctataagactttacttctgggttctctattctgttctgtttatttatatgtctgtctttaggacagtactacacagttttgattcccctgttgtaggggaatcttgttttattgtgcttcactttattacgctttgcagataatgcattgtttacaaatggaaggtttgtggtaaccttgcatcaagcaagtctattggcaccatttttccaatagcatatgctcactttgtgttcttatgccataatttggtaattcttgcaatgttttcagtttttttcctcctcctcctccttttccttccttttatcctcctcctcctccttcctccttcctcctccgtcctcctcctcttcctcttcctcttcctcctcctcttctccttctcctccttcttttccttcttcttctttctgggacagggtctcattcttctgcccaggttggagtataccggcacgatcatagcccgctgtagactcaaactcctgacctcaagcaatcctcccttcttggcctcccaaagtgctgggattagaggcatgagccactgcacctggccagtttttcattattcttatatatgttatgggaatgtgactagtgatctttgaagatactattgtaactgttttgggggcaccataagccatacccatgtaagacttgaactgtgtattccagtgaaaggaagagctgcatgtctgtcactttaaattaaaagctagaaatgattaagtgctgtgaggaaagcatgtcaaaagctgggtgagttaggtcaaaagttaggcctcttgtaccaagtagttagccagcttgtgagtgtgaaggaaaatttcttgcaggaaactaaatgtgctccttcagtgaacagtcgaatgttaagaaagcgacacagggttattgctaatatggagaaagtttagtggtctgggtagatcaaaccagccacaattttcccttgagccaaagcctaatccagagcaaggccctaaatctcttcaattctttgaaggctgagaggagtgaggaaactgcagaagaaatgtttgaagctagcagaggttgtttcatgatatttgaagaaagaagctaccwttataatatgaaagtgcaaggtgaagcagcaagtgctgacgtagaagctgcagcaagttatccagaagctctagctaagatcattgagaaaggtggctacactaaacaacagattttcaatgtaaaccaaacagctttctaatggtgaagataccatccaggatgaggagtcaatgcctagcttcaaatcttcaaaggacaggatggctttcttgttaagggccactgctcatttaccattctgaaaatcctaggttccttaagaattatgctaattttactctgcttgtagtgtagaagtggaagagcaaagcttggatgacagcacatctgtttactgcatggcttactgaatagtttaaacccactgttgagccctactgctcagaaaaaaaagactcctttaaaaatattactgctctggctcacgcctgtaatcccagcactttgrgaggccgaggcgggtggatcatgaggtcaggagatcgagaccatcctggctaacaaggtgaaaccccatctctactaaaaatacaaaaaattagccgggcgcggtggcgggcgcctgtagtcccagctactcgggaggctgaggcaggagaatggcgtgaacctgggaagcggagctttcagtgagccgagattgcgccactgcggtccgcagtccggcctgggcgacagagcaagactccgtctcaaaaaaaaaaaaaaaaaaaaaaatattactgctcattgaccatgtgcctggttacagaagagctgtgatgggaatgtatgaggagattgatactattttcttgcctggcaacacaacacccrttctacagctcatgggtcaaggagtaatttttgactttcacttactattatataagaaatatatttcataaagcaacagctgccatagatagtgattcttctgatagaactgggtaaagtaaattgaaaacctctggaaaagatatactattctagatgccattatgaacatttgtgattcatgggagggggtcaaaatatcaacatgaacaggattttggaagaatttgatgactttgaggggttgaagacttcagtggaggaaatgaccgcagatatggtaggtgtactaaaagaggtagaatttgaagtagaacctgaagatatgactgaatttcggcaatctcatgataaaacttgaacagatgaggagttgcttctaatggatgaacaacaaaagtggttyctttgagatggaagctacttgatagggtttggctctatgtcctcacccaaatctcatgtcaaattgtaattcccacatgtcaggggagggacctggtgggtgttgattggatcatggggrcggatttcccctatgcgggccttgtgatagtgagttctcatgagatctgaagttttaaaagtgtggcaggtcctcctttgtgctgtctctcctgctgccatgtgagatgtgccttgcttctctctctgccatgattgtaagtttcctgagtcctcttcaaccatgcagaactgtgagtcagttaaatttcttttctttataaattatccagactcaggtagttcttcattgcagtgcaaaaacagactaacatagaaaattggtactggtagtgtggcactgctgtaaagatacctgaaaatgtggaagtaactttggaacggggtaccaggcagaggttggaacagttcagaggactcagaagaatacaggaagatgttgaagtttgtgagttcctcaagacttattgtatggttttgacaaaaatgttgatagtgatatggacagtgaagtccagacaggtggtctcagatggagaagaggaacttattgggaactggagtaaaggtcactcttgctataatttagcaaaaaggctggtggcattttacccctgccctagagatttgtggaactttgaacttgagagaggtgatttagggtatatggtggaagaaatttctaagcaaagagcattcaagatttgacttggatgtttctagcagcatacagtcatatgcattcacaaagagatgttctgaaattcgaacttatgtttaaaagggaagcagagcataaacacttggaaaatttgcagcctgaccatgtcgtagaaaagaaaaacccattttctggggaggaattgaagctggctgcagaaatttgcattagtaaagaggagtgaaatgttaatagccaagacattagggaaaatgcccccagggttatatcagagaccttcacagtagcccctcccatcactggcctggaggcctaggagggaaaaatggtttcaggggccaggcccaggaccctgctgctttgtgcagccttaagacatggcaccctgtgtcccagctgctccatctccagccccacccacttcagctccagccatggctaaaaggggccaaggtacagcttgggccatggcttcagagggttcaagccccaagccatggtgacttccacgtggtgttggacctgtgggtgtgcagaaggcaagaattgaggtttgggaacctctgcctagatttcagaggatgtgtggaaatgcctggatgtccaggcagaagtctgctggaagggtggaggccacatggagaacctctactagggcagtgcaggaggtaaatgggttggagcccctacacagaatccccactggggcactgcctagtggagctgtgagaagagggccatcgtcctccagtgacaccttgcactgtacaccaggaaaagctgcagacactcaacaccagcccgtgaaagcagctgtggcggctctaccttgcagagccacaggggcagagctgcccaaggccttgggagcccagcccttgcatcagcatgccctagatgtgagacacgaagtcagtggagattattttgaagctttaagatttagtgactgccttgctgggttttggagttgcctggggtttgtagcctctttgttttgggcactttttcccttttggaatgggagcatttacccaatgcctgtacctccattgtatcttggaagtaactaatttgtttttgattttataggcttctagatggaagggaccttccttatgtggaagggacttgccttatctcagatgagactttgaacttggacttttgagttaatgctggaatgagttaagacttcggggactgtcatgaaggaatgattgatctcacagtgtgagaaggtcatgagatttgggaggggtcaggggaagaatgatatggtttggctatgtgtccccacccaaatctcatgttgaattgtaatccccgtgtgtcaggggaggtatctagtgggaggtgattggatcatgggtgtggatttcccccatgttattcctgtgatagtgagtcagttctcacaagaattgatggtttaaaagtgtggcacttctccccttgttctctctctcctgctgtcctataaggtgtgccttgcttcccctttgccttcagccttcagccatgattgtaagtttcctgaggcctctcctgccatatggaactgtgagtcaattaaacctcttttatttataaattacccattctcaggtagttctttatagcactgtgaaaatggactaatgtactactcttggtaaagatgctgtaaacattgttgaaattacaacaaatgttttagaatattgcataaacttagttgataaagcagtggcaaggtttgagacgattgactccaatttggaggaagttcaactgtgggtaaaatgctatcaaacagcatcacatgccacagggaaatctgttgtgaagggatgagtcaatccatgtagcaaacttcattgttgtcttatttccagaaatcaccacagctactccagccttcagcaaccaccaccctgatcagttggtagcaatcaacatccaggcattactgctccccagtgaaaagattatgatttgctgaatgctcaagtgattgttagcattttttttaaagcaataaagcattttaaagttaaggcatgtacattttttaaacacataatgctatcgcacatgtgtatattatattatagtataaacataacttttatttgcactgggaaaccaaaaaatttacttgacttgctttattgtgatatttgctttgttgtggtgatctggaactgaatccacaatatctctgaggtatgcctgtgcagatttttaaaaarcattggtgttttatttatgtttttaagggactaaataggaatgtttaaaaactcgatttgtaatgccttacttctttaattttatatagtttataaatttttgcattttgtattcattttctctttctgggaagtgtaagggaatttccttcttttctcttttatctcaagcatgtttggagcaactttggtatacgaatttactttttcaaaagaaattgcagatggtgtgaatttagataggaatgtttgccttctcaggtattcctgatattgaggtggaggttggaagccaggaaagaaggttgggattgtttaatatggcatgctctagaaatgtggttaagactctggagccagattgcctggatttgaatttcagctgtgttacttacttacttataaattttgggcaagtaatttgacccctttgtttcaattgccttatctgtaaaatgaagataatgttagaaactacctcagagaaatgtttcaagagttaattggattaaacacagtgcttggcactcattaagtgctatttcaatgtggtatattttattactttgaattttacaaataaaagtgagaatagtagctaaattcttaggttctaaaaaaactaacctttctaattccatcagcaataatgaacacayggggcacacataatttttttccataagaattctaacacccagatggtataatgggagactttatcttctcaagtcagtggaggtttccaaatcttttaatagttatatgaaccttgcatttatattaaggaatattataagtctgccatgtagtttatcatttgtcttctgatttgtaattagtttttaaaatatatgtttcaaacctaggctaagatgaagattaatgtatttggacagcataaactatgatactttgatgttggagtgcttataatatgccatgtctgtcaaatacattttgcaacttagactttattttcatagggcaataaatcatctgcaggatctgaagtttataaatttaatggtagtgcttttaaatttcttcttcttggtgttttaattacatttagcttttgtagcttgcattgctttatatctgaattagtccaaatatttgaaaataaccatgtgaaaattcacattggaaccaaggatttgtttgagatgtatacatgtgaattggcaggactccctcacccccgcttctttttaaagtgtaaatgggtgaaaaatgttaagtgttcttttattaggaaaaccatgcactggagcttatgactcaagatgtttatgaaggtgagataatcatctstaggaaaataaaaacattcttcagataagaaagcctatctaaaatatattttcttgtacaaaaagaatacatcattttctgtaaattgtacatttccrtaacagattaaaaaataactctgccccctactctagacaaatgtaatattttcacttatatggaatacattctattctgtatgtagtatgcattgatttggccttagctctttcttgcccagctttaataacattgagtactcatttgcttttttcaacctatttcagaatgtataatattttaaatatctgtagttaagagaaaggtaagtgtatatgaatgcatatgttgaaacagctcatatatggccttaaataattggctactttgggacttcccatctatagttttacagctggcaatgcagggcacctaggtttcatggtcctggatgtttgtgtttctgaaaccttcattataaatgaagaaccagacggttgttcttcattcaggctgccatcatagatgttctggaaagctgctgctgtctataaatgtagtgcttatgttttctgcacagtatgtgcttgttggcagtttttttttttttttctagttaaacagctactacctgcaggagtcgtcccatactggagtggagaaaaaatagtcttggctaggtagtttgtagtaattttgtatttttaaaagatgcacacagtagattttattaaaacaaacaaaataggcactactacaaaagattacccttcaggaagactcatcagtaatccaatttaaaattgaagggactttgattacagtattatgccttacctatgttactattttccctttggttcactttttcttctaagctaactgtggctacagttggctcattagactgattccgagagaacagtaggcatatagcattttaattttacgggctagcattgcatattggtttttatggcgtgctcagtattaaaggcagtggggaaaagggttgaataatcccagtatactctttttgcctaaatgatacccatcaaaatctggagtcagaaaaggctttctcatggtgtcttcttttattactgtgtgccctgccaaaaccctggacacttgctcactcccaaggacaagcatgagctagamgtatgagctctacctcacttgtaggataaataccacaaagccattttcttctttctgttttgctatccatttattccctgctgtccagtttttttgttttgttttgttttgttttgttttgtttttaaagatgctggtagtaatggtagtcgcatggctgaattaatgacaaagcatagatttctggctctttgatttttctaatggattgattggctctttgcctgcttgactacattaagaaaaaaaatccccctttaaaaattacagtcagaaatatacctgtgatggacttttaaaagctactttatatttaataagtacaggaggtccttacaagttttgtttagtaataaaatcacatagtcatgtctgcctcttggtggattaaaaggcaacctcattgggtctaatttatgcattgtttggatatttctagcttaaaaatggatgggcatcttcctatttctcctaacacttgccggtatcaaacagtttttgcagtgatgtcattgaggatgtgggacatgtgggagttgagaggatcagctaatgtctcctgaactgaatttaattctggtgagcatctctgctgtaccaagaccctgctggttcagggctggtcagtacgtattgtaatcctaaacgtgtgctccttgcagagtctcttcctgctgagcgaatagaatatggttttctttcagtaactatttttttgtctctcattactcaaatattttatgattgatttttttggttgcgcatttccttttttcttggtttctattaaaagttatgttgtgtttaaaaaaggcttgctggctgtggcctctttggcaccagggctttctggggtagacctgattgaccctgtggtgctgctgtacttcttttcttacattatgtgatggaaaaacagtggtccccaacctttttggcaccagggactggtttcatggaagacaattttccatggatggggtggggggatggtttcgggatgaaactgttccacctcaaatcatcagattaaattcatcattagattcttataaggagtgcacaaccaagatccctcacatgtgcagttcacaggaggtttcacactcctatgagaaacaatctaatgccaccactgatctgagaggaggtggagctcaggcggtaacgctagctcacctgccgctgacctgccgtgtggcccsgtacctaacaggccagggttcctaacagtaccagtattaggccctgggagttggggacccctgctataaaagacttagtctttgaagtttgatctgctcattcttgtttgagcaaaccatgattagttcatgtctttggttcctaatctattttttctttataattttcttctttttattttattttattttattttgttttatttttgagatggagtcttgccctgtcccccaggctagagtgcagtggcatcatctcagctcactgcaagctctgcctcctgggttcatgccattctcctgccccagcctcccaagttgctgggattataggcgcctgccaccacgcccagctaattttttgtatttttagtagagacagggtttcactgtgttatccgggatggtctcgatctcctgacctcgtgatccgcccgccttggcgtcccaaagttgggattacaggtgtgagccactacgcctggccttttctttataattttctaagtgcttatgtgtttagtgtgcttattgaggagaatagttagaacacagtgttctgttcatccaaggaggacaaagcagagtgaaaaatgaaggggaatgctactaaagttcagaacttttcacatgattgcatgaattcataactatttctaaactttagattatttggaatgatctgtttgatagcttatataaaggattaaaatagggccataggatcactatttaaattggacctttctctttttcagatgttgaaagctctaaagatgcatttctaatgaagactttttcccatcgttgccattgctgttcatttgacttgctttttaaaagttgggtcagttctcccacggtagcaactttccgaagacatgacttacaaaatttttagaaataaatttgctaaacatttctctttcgaaatatccctattttgtataataactgttgaatattctggtggtagcttttttttaaggatgacttttatttacttaaaaatatttaattgacaaattaggattgagtacaagttatacagcctgatgatttgatatacgtgtacattgtgccatgactaccacaaattaattcacatatccatcaccatccatgctatatatatgagatccccagaagttagattttaactgaaactttgtgccctttgactaacatgtccctgattctcccacctctcagctcctggcaacaacctttctttgcttctatgacttcagcgtttttaggttctacctgtggatcatgcagtgtttgtstttctgtgtctagcttattacacttagcataatgtcctccaggttcatctattttgctacaaatggcaggatgtccttctcttttatgactgaataatattctgttgcttatatgtatcacagtttattcatctgtggatggacacttggcttgttttcatatcttggctattgtgagtaatgctacagtgaacatgggggtgcagatatctcttcaagatactgattttatttccttaggacatatacccagtagtgagattgctggatcatatggtagttctatttttaattttttgaggaacctccatactattttctataatggctgtaccaatttacattctggtggtagattttttaaacagccatcaagatgacattttcttttcttttcttttcttttgaaggaaaatttgttttattttaattatttttatttccagaaaactcaacagtgtacatttaacccagtttggtggcaagttctttagcctttgcctttttgagcttggcaatgtgagccacagtctagggacccagtgacggcagatctcatcatatctgtcattataattggtcctgatggcttccaccagcttagtcaaagctcctttgccttccaagttaacctgtgtaaaggtgacggtggtgcaggtcttcctgtgaactagatgtcccagacttgccttctccttggtaatgcacttaagggacccccattttacgacacagggcaggcaggaagacagccagctcaatgggatccatgttgtgtgcagtcaccaccagctgagcctttttgttctccaccaaggtggtgatgatattaactcctgctcgaaggacaggtgatctcttagtggggatgtgccctttgctgggagctttcttctcagcccaggccaacaagctctgcttcttgtcttgctttgcctctggtctgtacttgtggtccagcttaagcagctgagtagctgtttaatggtccagggcctgggtgaactggttaataatctcaggaagtgctttcagccrcttgtaataggatggctctgctgctgcaacctgatatagtggggccatttcacaaagcgagttaagtcccttttgggctgcatatcctgtccaatgccaaaattcttaggccttttctcaaacaggagatttaccactttcttggcctcctgctttttcaggacagcaggggccggagccaccttctttctcttggccttctttcctttgggaaccttgggtggcggaaggagagagcaagatgacattttcttaaatgttctaatgacctaggacagaatttatgatacaagttgaaaatgtaggctcaaattatatactatatgactgcaactgtgttaattttttacgattatgaacatattacattttggtgtcttttactattccacaaattttcacagttgttactcttgggtgatggtttgagtgatttatatatatatatttttttttcctatttttttacatttttccataatgtatttctaacaacagaaggtaatcttttaaagtattgctggtgaatgtttgcgagggtcactttggctaagcagtattttctagattattgtgaagactttatcacatagttgaatatcttcactttacagattaaatgatggctgataaggtttaatgtttcgcttgaggccatgacatttaggggccgttaacaaatctgtaatggaacatagctgtgaaaacaacttgcaatcgttttaatttggtcatttttgtgggcttttgaatagtgctgtctgtcactaagctaacgaatagtgaatgttttgtaaatatttgttatttagtctaaactaaaatgaaaatttttagcttttcctgtgaaagctaaaaattttcattttagtttatattaaataacaaatatttattcctgtgaatcagtagtttacacagataatattgagaggctttcttgggaatttgaaaggagtcttcaaatcatcctttccctcagagatgaaaaaatattttaaaaaaattactgtcttgtatatttgatattttgaaaatggcagggaatcaacaatttgttaatctgttgttaagatcagttatacattcagtggcatacttcttgtcttagaaattggttgaaattaatattgctagtgaaagtgtggaaatagaaacagttgaaaggaagacaaatgagaagtggaccttgcttctcattgaggatgctgcagaactagagtggttgccagcaggatgaaatctcaattaattgcttgacagagaattaaaacaaaggcaagtggtgcttttaaaaaagataaaaataggtgaatataaagttgaaargaggccaggtacagtggctcacacctgtaatcccagcactgtgggagcccaaggtgggtggatggcctgaggtcaggagtttgagaccagcctggacaacatggtraaacgctgtctctactaaaaacacaaaaattacttgggcgtggtggcatacgcctgtaatcacagctactccagaggctgaggcaggagaatcacttgaacctggaaggtagaggttgcagtgagccgagatcgcgccattacactccagcctgggtgacaagagcaagactatgtttccaaaaaaaaaaaaagcaactgaatattggatagagaggagaaaaagggcaatgtatcaaaaaaaaaaaaaaaagctaaaagcaaaactggattattcttggatttttcttttttgggaaaaaaactagaagtatcttaaaaatataagtagatgaattaaattaggttaaaaagatgtaaataaaatatgtaatacataatttgctcaaaatgtacaagcagcgccaggcacgatggctcacacctgtaatcccagcactttgggaggccaaggtgggccgatcacttgagataagtagttcgagaccaagctggccaacatagtgaaaccccatttctactaaaagcacaaaaaattatccatgtcgtggtgcatgcttgtattcccagctacttggaaggctgaggcaggagaatcgattgaaacccaggatgtagaggatgggctacagagcaagcaaaacccaaaatgtgcaagcaatttatacaggacttttggaatcatggtttactgaacacctgtttatattcagtaactgtttttatgcatgtatttaccagagaacaagacataatataggtacggatttctgaaaacattttgcacatcttgaagggaagttgctgaataaattcctctctccgtcatctagaagctgacagcttaacccctttatcttggcagatttaagctctgaacattttgataggtgacttggctttgaagtttttccactggccatacattttgcctttcattgtatgtgaataaaatacgtatgttaaatcaaagatttagtaactcttacttaacagtttcaatattgaaatatgtgtgtgttctagtcttggtaattttttatccatgtagtgagaagtaagggtaacaatgaaaatccaaccgttgtatgacttcctggtctaatcttccttcatttgtgaaatcagtttattgagatactgtttttgccacctttgcagttattcatcatactaatcaaagtaaaacatggcrtttctaagcaaaattaacaagcattaacatttatgcccaactgttgacgtgtataggctttcctttgaaataggaggcatttcaaaaaatacacatttcaaaatagaatcaactgacttttgagtttcccttctctttctcagtagtggaggtggtaaacaatcctaggtaagtagataaaagtgcagccccagaaagaatgaagaggaatcagagacaggaaaataaaaccctcagtttgtgtaactggcctggttgataaagaattggattacagtgggatgccatggctcatgcctgtcagctttgggaggccaaggcaggggaattgttaaaggccaggcgttagagaccagcytgggcaacacagtgagaaccccatccctaccaaaaaaaaaaaaaaaaaaaaaaaaggattggattaatcatcttttctagtctctgaattttgtttgtcatttctcatgccttagtgtagtggtctttgatataaaaataaaatcatgaaacagcaagtataattctaaaatgatctcaatatgattattttcatgagtggcttattccaaacaagcatttgatacttttagagaaaggtcaattaaatgaactaactggcggttcctttttatgaactagacatttattttgtactgtatttgggtttgggtttgacattctgctaacatactctgatttggctaaaagtgtcatgcatcagtttttagaacttttaatctgaacatattttcaaattaagttacaaacgtgatttttaaaggaatcttttctccctaacgagaagaggtggttgcattaaattggtaaaaaaataacaaaaacaaaccaaaaacagttyactgtataattaaggtctccatcctattttgttattctgttgggctagtggtttttcaaacctggttgcacatttggatcacctgagttaataaaaaaaatccaaccaaacctaggctgcatacccagattgtaaggcgtagtctcaggtgtggccctagagtcagtagttttaaaatgtcccaagatgattttaatgttcagtcagagttgataaccctgatccaggctctcactactaatagacatctgtagcatgacactggtagtctttgatttttcttgattttggccttcagtgtactctgaactttcatacagtacacattaaaattccctaccctgtctacagttggggccttgtatattaactgatgagaatgctcaacagttttacagtaggctgctgttgtaggccaaatgctggttccccaaaatgtccacatcctaatacctggaacctgtaaattttaccttattggaaaaaggatccttgcagatgcggtaaattaaggatcttgagataaagagatcatcctggattatctgagttttccctaaatttcatcttaagtatcctagtgaaatgagggtgagatttgacagacacacagaggcgaaggcactgtgaagatggagacacacatggagtgatggggccacaagtcaaggaatgtctgtccgtggccaccaggaaaaggcaaagaacagattctcccctagagcctttgyggggagcgcagctctgatgaaaccttgatttcagtgcagtgaaactgattgtgagctactcgcctccagaactgtggggaaatacgtttctgttattttaaagcacaaagtttgtggtagtttgttaacagcagccacaggaaactaatatagccactttcctgttaccagttgggttttggcggtgtgctatccctgtctacacagcagtatatatttgtgtaacagattaaatgcattatcccattttataaaaataagttgaaatcagagaatggctttatgtatttgtgtgaacacacacatggatatatttatacacacacccagtggtatagccataatcttaatgtgattgagataaagatggaaatcattaggatgggtctttaacctcaattagatgctcattagatttaagctgtgtttaatgatgaggcagaagaacacagttaatgaacatgtaccaaatgctggaactattttgttgaagattgtttctaaaaacgttacagataattagggattttaataaacttctattgcactgggaatagataatctctcataacatttattgtgctttcttggttctaaggtgtaacactttcctcatttctgaaatcaggataccgtgtaataaatgtgctcatttaatgtgttcaccttaagatgttacagaattaatggtgtcattctgaaatacaggtattttagaattgtggcacttcagcaagcctgttgtttgacttttccagtttgactcttggatattcaatttgagcacatttttttgaaatgcattatataagaagaccaaacattacctatatgaaattctaaagcttttratgttccagtttagttattgtttttgtcttcagttcccaggagctaccatagtgggaactttaattttgcttgttgagatacagactgttcagtggaaaaatcatggactttagaagtggcagacctcagtgcttaggctaattccactgctgattagctgtgacattaggtgacttttctttggtaaatacctatattacagggttgtgattaaatgagataaggtatttgaagtgttaagtaaggtctgttcaaaactccatagactactgtcatctgccctcatttttatccaacctattttgtgcccagtaaagatttgaaccttaggaaagatttgacccttaggagaggaaattatgttaatccaggaataaggctcattctgagttgaattttgctgcttatggctctttatgcttttgcatattgttctacctgataaatgtattaaatttcttgatggttcacctccagatttcccttctttatatattcttctctgtccacaataaccttaaattgattattccttgttctgtgttcctagaacactcataggctggttacataaccttaccctttgatcttacactgttctttgtcttttccctgtgtgtatcatgttcatactaaatagattaaaagctttggaccaagtacttgtgtccagaatatataaaggattttgccaaatcaattcagaaaaggcagccaatccaatagaaaaagtgaatgaaagacttcaacagacacttcgtaagtgtccaatatatacaataaacatatgaaaggtgcctagcctcattagtcattagggaaatgcaaattaaaccacaaggtgatttcactacaccaccaccagaattgctaaagacaatgaagtattggcaggaatgtagaacaacagaaattctcactctgctggtgggaatgtaaattgatgtgagcacttaggaaaactgccagtaaagttaaacataaacatacccaaggatctagctgttctactcctaggaatgtgcatatgtgtgtgtgggtacatgtacaagacatgtacaagaatatttctagagtactacttataatagcttaaaactgtcaatcattgtagaatgttcctacaacagaatgatctacattagtgaatatgaactaactgctgctatactcagtaatgtgaatgactcttaagaagccatacacataagcatgtgtattctatgcataagccatacacataagcaatacacataagcatgtgtattctatgcttctgttaataaaaagttcagaaccaggatggtactaccttttggcaggtctagtttgtggggtgtagtaatgttagtgggtactggggaaggcttctgggaaactggtaatgttccatttcttgaactgagaggtagtttattgggtttgttgatttagtttaacttcatcaaactgtatacctattatcattgcacttttctgtatgtatgtacactagtctttgataagcttactttttaaaaaagttcattattgtcagctagcagagtgtttggcacctcatgggtgcctaatgaacacatcttttggttttacgtgatttttataccctagtattttatggaatttttttccatgaaatgttacagtattttctgatcttgaacatacatatcttctccaaagcaatgcttcccaccaccctttctaccttgtcaaactccaagcctttcttagtgatagccaaaattataaaatgtattgcttttttggtctcagtacaaatgttcttgccataattttcaataaattcttaaagaatgtcacaacatgtaaatttagagggtcaggcttcaacctagactacaatcggtcttgtgagaccagttataagtaatagtttgatgaaaggtattaaaagcctggactgacacattaaaagggctgaaaagaatcttacagcaacaaggttgtatcctaaacctattaaatggagaagcctgtgtgctcagtgaccttgggactgactagacctacatttgagagttgacaggaatggtttacagatgaatgaaataagaagcatgtgtagtggggatactgttaacatttgataggaggaatgaaaacaagagctttagatttcatttaaaacctcagtactgtaaaaaactctaagatgtctttattttttattttttatttaagtcagagtcttactgttgcccaggctggagtgcagtggcaggatctcagcacactgtaacctccgccttccgggttcaagcaattctcatgcgtcagcctaccaagtagctgggattacatgtgcacgccaccrcactcggtaatttttgtayttttagtacagacaggatttcaccatgttggccagactggtctcaaactcctgacctcaggtgatccgcttgtgtcggcctcccaaagtgctgggattacaggcgtgagccactgtgcccggccttgaatttgtctttctgtttgtagaacttataaatgttgaggagctagctacttttttcacgcctctgttttttttttttttttttttagtctttcttcttaattctactttcttgttcatatcctctcccctgtctccttccttatacttctcatccctttcttccccttccctctttttcccctcctttatcctctaccctcactgggccaagctactaggtgccttcctgaatgctgaggatgttgtagcgccctctgtagcctgacagggttcctgctcccttctgactgaagctgctcacaaggatttagcatttgtctttttccttttggaaggacaagttttgacttcttgtctcctttgggaatacatttgtgaaaacaagcaaggtagagggggtgtggagttggggaaccttcaggcaagcagtgcccagcaggaacctcattcagagatttgctgggctgggatgaagggaatggggaacaggtatgagtgataatcacacttgagatatttggtaaaacttttggtgggtcattcatgacasctaccctgtgccacagtaatttttatttactatttttatttaaaaatgttatttctgggagaattgctagagcccaggagtttgagttcacctggtaacacaatgagagcccgagagcctgtcattttttttaaaaaaagttatttttcgttagtcaccrttattccttttctctgctttaaaaagtatggaagatgattttgattacagtacatttcatctggtggaaacatttcaatattctattgtactatgcagtagttttatagaagtttttgcagagattgttataccagaactgagataaggatcttaattttgtatcttgatacaaatagtattttaagaagcaaaacacttactttttaaaaatttagaggaattttaggtttacagcaaagccaagcagaaggtacagagatttcctatgtaacccccaaccccacacatgcacagcttcgtccattatcaacatcccctaccagagtggtatattcttgctgttgtatactttatgggttaggataagtgtataatgacatctatccaccattatagaatcacatagagcagtttcactgtccaaaaaatccactgtgctctacctattcatcccttctccctgccacttcccctgacccctgacaaccattgatctctctgtgtgtgtctgtggctttttttttttttgagatgggttctggctctgttgcctaggctggagagcagtggcatgatcttggctcactgtaacctccacctcctgaactcaagcgaacttcccatttcagccttctaagtagctgggactataggcacactccacaatgcctggcaaatttttgtattttttttgtagagatggggtttctccatgttgcccaggctggtcttgaactcctgagctcaagcgattgccctcatcagcctcccaaagtgctgggattacaggcatgagccaccccatccggcccattgatctttttactgtctctataattttgccctatcctaaatgtcatatagttggaatcatacagatgtagtcttttcagactggcttctttcatttagtaaaatgcatttcagtttcctcatggcttgatagctcatttccttttagtgytgaataatattccattgtgtggtggaggtaccacagtttatctcttcatctactgaaggacatcttggttgctttcaagttttggcaactatgaataaagctgatataaacatccatgtgtaggtttttgtatggacttaaattttcaactcctttggagtaaataccaagaagttcctttgctggattatatggtaagagtatgtttagttttataagaaactgccaaatgtcttccaaagtggctataccattttgcatttctaccagcaatgaatgagagttcctgttgctccatatcctcaccagcatgaagtgttatcggcattctggaatttggctattctaataggtgtgtagaaatagctcgttgttttaatttgcatttccttgatgacagataatgtagagcatcttttaatgtgcttatttgccatttgtataccttctttggtgatttgtctgttaaggtctttggcccatttttgaattgggttgtttgtttttgggttttaagaattcattatatattttgttgttatttttatttatttatttatttatttattttttaagacagggtctcactctgttgcccaggctggagtgcagtggcacaatcacgtctcactgaagcctcgacttcctttrgctcagatgattctcctatctcagcctccagagtagctggccctacaggcacgcaccaccacatgctgagattagaggtgttagctactgcactgggccctttgtatattgtatatcctttatcaaatatgtcatttatttccttctagtctgtggcttttcttttgattctcttgacagcatcccttgcaatttagaaaaaaacaactgtttttattctgtttattttcttctctactctttcttcttacactacactacagatttctgtatccaccctcccctccaagcgcatactgggcagtaagctcttccttacctatttgaaacaagagggaataaatatcacatatgacctcaaaagggtagtaaaaaattgacaggcaataattatatgttctaagagattatatctaagagaagatataattactgttttggtccagaatgattatatcattattttgaagaggaaaagctaattttaaaatatgttaattgctttctttcaaataatgtttaagctttaatatccaatttatcatttaaatacagcacagaactattttaatttttaaaattcttttttttttttttggtcactttcaaagctggaagggatgactttggctgtcttatttggaatggaaactacctaacagtcttctctatggaacttgtttctgtactacagtagtactttaaaaacatgaacagtttagtgctggtagtgggaatctttctttaaataattttttttttgtatcaaaacttgtttctgggctctagaaataaatgtgtttctacatttttacattcagtttaatgaggaaagtttccaccacatatttcagagtgttaaaaaaaaaaaaaactgtgacagtcaaaacttaattataattttcccttttaatatcacgtgctgtctccctttagttcctattacatttcttgttttcttcttcattctttcctcttcttttagactgctgttaaccttgaatactaagctgcattggataaatagaatgagaatattacggctattttttcagcarttaatgagttctagctggtcttaattgcttatggcatcacgaacaataagggatttttctccattaaatccaggattcaatacctatttaaagaacagaaagcactgaattttctttttcatgcattacttgagaacacattttcttaccatttcttcctgcttagagcatctatatccaacattctttgtcagtttaaactttgcttttatgatagttactgtaatgtggtaatgaatcaaaagccaccatagaggcttgagtttgagttacagttaaatgatttcttcttctgttttcttgagggttttgaactcatttcacatccattttctctcatttacacacacacacacacacacacacacatatacacacacagcgagagagagtgagcaggagactctttttttgaggaacaaattctcaattgatttggtttaaagtttacagcttaggctgggtgcagtggctcatgcctgtaatcccatcactttgggaggccaaggtgggcagatcacctgaagtcaggagttcgaaaccagactggccaacacggcgaaaccccatcactgctaaaagtacaaaaagtagccggatgcgatggtgcatacctgaagtcccagctgctagggaggctgaggcaggagaatcgcttgaactcaggaggtggaggttgcagtgagccgagatcgcccattgtgctccagcttgggtgacagagcaagactctctcctttaaaaaaaaaagaaagaacaaaaaaaaagtttacagcttagctgtgcaactcatttaaattwaaaaaaattatttcaaaggttctgtgaattcttccacatcctcagcctgtctacaactcttttgtcttagaagaaatcctgccttttccactattctacatgtcctgcttctcccactcttagtcttccctcagctttaggacagttgctgcgtctctggctttttctgcagccgtggccatggccagcattctcttctaacactctgctattcccaaatgttccttggattttcctgtccctgtgcctttaagatgttatcctcctttctgagaacgtcccctttttcttaggattggctaacttgtgctcctaattgaagactcagttcaaccatctctctgtctctagggaagtctgtactgtctcccagtcaaccatttttgttgtgtgcctaacccttgtgtgtttttattgcggtgttattcatattagtctctattcattttcttgtattatttttcacattattttttatttatatgccttcctattttgctggactttaagttacatgaaggaaatcacttttcacagcatttaggatggaacttagctggtacaaagtaactcgaaataagtgctttttcattgataggatttgtgagctgtttatgtgactgtctcaatttattccaattgagactcagtgatattctttttttttttaatttgacttttaagttcaggggtccatgtgcagatttgttatgtaggtaaacttgtgtcatagaggtttgttgtacagattatttcatcacccaggtataagcctagtacccattagttattttttctgatcctctccctcctttcactctccaccctccaacaggccccagtgtgtgttgttcccctctatgtgtccatgtgttctcatcatttagctcccacttataagtgagaacatgtggtatttggctttctgttcctgtgttaagtttcctaaagataatggcctccagctccacccatgtccctgcaaaggacatgatctcattcgtttttatggttacatagtattccatggcatatatgtaccatattttctttatccagtctaccatagatgggcatttaggttgattccatgtcgttgctactgtgaatagtgctgcagtgaacatatacatgtatgtgtctttataatagaatgatttatattcctttgggtatatacctagtaatgaaattgctgggtcaaatggtaattctgtttttagttctttcaggaatcaccacactgtcttccacaatggttgaactaatttacactcccaccaacagtgtataagcatttcattttctccacaaccttgccagcatctgttattttttgatttcttaataataggcattctgactgacgtgagatggtttctcactgtggttttgattagtatttctctaatgatcagtgatgttgagctttttttcatatgattgttggccacatgtatgtattcttttgaaaagtgagattcagtgatattctgtgagtttaactatgtacgtcattgtatatcatatagtcaaaaaagcctatatatggctcttaatatggcctaatataatgacatgcttccatctggcaatcattaggtacctaaaagtgatgacatataaataaaaaactttttgtcttggaataaatttaggtctacagaaaagtttcatagtatagagtgtccctgtatactcctcactcgatttcctctattgttaaaagtctttaagggttttgtaaaaacttttgtaaaaactgataagctaatattggcacaccattattaactaatttccagactttattcagatttgtctagtttttctactaatatcttttttttgtgtttcaagatctaatctaggataccacattgattgtatttagcaaatatttattttaaaagtctgtaatttaaagagtaatctaaatttcttctgkttaataagtatttccaacttttttctatttaatgatttaaaaacactattccttttttaccttttataggaaggaagaattaactcattgttaattaatgaaagcattagttaatttaaagagtattgcagggtcagcaaaatcaggatccaarccaggatcccacattgcagttagttgtcatgtttctttagtctcctttatctgtgagttgctcagtctgtctttgtctttcatgaccttgatatttttgaaaattctttttcaggtattttgtagaatgtcccttgatttggggtttgtctgatgttttctcgtgattagactgtggttacattattgagaaggactccatacattcgataagcccttctcattcattccatcacctcaggggtacatggtacatgatatcagtatgtattactggtgttaaccttgttcacttgtttaaggtggtatctgttaggatccttcactataaaattttattttatctttatgattactaagtgtcttgggagagatactttgagattgcgtgatatcttgtttgtgcttaaaattttgcccacttatttttgtttccattcttgcattttgcctggagcagttaccactgtartgttctmatggtgtttttctgtttctcttattttcttctgcatttgttaattataatttttctrtaaggaaaagttgcctttttttgtttgtttgtttgtttgttttgagacggagtttttgctctcttgcccaggttggagtgcaatggcgcgatcttggctcactgcaacctctgcctcctgggttcaagtgatttctcctgcctcagcctcctgagtagctgggattacaggcgcgtgccaccacgcccggctaattttttatttttagtagatatgaggtttcaccatgttggccaggctggttgcgaactcctgacctcaggtgatccgcctgcctctgcctccacctcccaaagtgctaggattataggcgtgagccacagcgctcagcctaccattcattcattcattcatagcactatgcttcatgaatatttattcttttggttatactattattgctcattttattgtttaaattacgccaactttggccagtgtaatttcttgtgagttgccttctatgccttctgacaagtcttcatctcttttgccatctgcttctctattttgttttatttgatttctcgcttttttcttttttttttcctgagacagagttttgctcttgtctcccaggctgcaatgcagtggcaggatcttggcttcactgcaacctccgtcttccaggttsaagcaatttttctgcctcagcttcccaagtagctggtattacaggcaccacaccagcacacccggcttattttgtatttttagtagagatgaggtttcaccatgttggccaggttggtctcaaactcttgaccttaagtgatccatctgcctcagcctcccaaagtgctgggataataggcgtgagccactgcgcctggccctgcttctttattttctgaccccacaggatgatctaggcacaccttgtattttcactgcccttatcttgggttcaaccaattttcttttttttttttttgagacagagtctcactctgtcactaggctgaccctaaaaaaccttggttccttttattgggggattgtatttagaaacctcaatctgggtgccatttgtgttcattgttactgggatgccactccttctggtccctctcagtggatagagctatgagatttgtgttgttcttttttgatgttggttttgtagccctctacagtaggtagaaactgttggccaataccttgtaaaaatctcaatatagcttttccttttctgtttttctgaggaaattttccaaaattccaatgacattataatacacagtaaatattatataatactaggctaagagctccttgaagtctgaaacaacctatactagcacctggacagtaaatcaatgcttattgaacaaaatggaattagactatttttaaaaaatacaaaaactgcgtaagtatattatttcctatagctaattaataaagtaaaacatttatccttaaactgcatagcagtttccagcatattactgmaaatttctagcatattactgaaaattgagtagatgcttaaaatgcatgagttggatttattataatacattttaaattatctcatcctgttgtaaaaataatataccttctagggacagattttaccttttagcctgcccattgaacttactgaaaatatatttggaaacagagttgaggtaaaatgtgttaccaatttaacattcccatgtaatctttctacattgttgtaactacttgttaggagaggctcagattcttttttggttcaagagtatctggaaatgattctgtacactccatagatgatagagcattctaataagctttgatataaaaaagaaatagatgtttctgctcaacattgcaaataaactttatagtattatgtgcctttggcatgacagttatttaatacaatagcatcaatagcattcctgagacatagaaaatgaggaataacaagggggacctgacaggtaatgaaagttttggaggtaagtcaagaaatgagagtagtaagactgtagaagctctagctctgtgattaactgtaatttaaagtattttagtgtgtatacatgtagagtgttgtgcttttctacatatttttgtgaggctgcctatcagattggagtgcgattagaaaaaaaaagtcacaatatcgtttgtgctggttgtgaccagagagccgtttagtgtaaacatttgtttccaagcttatgtgatggggatactttctcctccttcatgtgggtcacaggtgggattggtgagtccttagcggagtcaggagatatctgaggcagtgctggtgttcatagtcacagactcctggagctgggtctggggtttatggctgacatctagatatctcttacttaactggctttgcttctgtgttttatttttttgtcattaggtgttatgctcccatggcacacaatataacatgtctagtaacattgcttgtgagtctttttcttgtataaaagcaaatagatgttgctctggtgtggaatatatattgactcaattttcttcagacatactccccagccgcagagtcttacatcaggcggtctgtgcttgagctttggggaaggccacagcctgatccggataaggtcaatggggagatcctcaaaagaggctgctgcctgttatgactccggctgatggcaaccatagtagaggtggccacttactatggttgccatatgggaccccaggagctcgtcagataaacatccaaagaaagaaaaataattatttagctgcctggccattctaaaagattttgccaaaaagaaaaaacaaaacaaaaaacaaaacggtgagtatggggagaaaaagggactaatgatctcacagtctctggccatcccaagaaaaggctgctgcctagagataccttcctcctcccccattttctcctatcagtcagatataggaactaaaaatggtgttggcttcaagcccaagagggaaagaaaaggaactttaaaccctatagtccctattcaccaggtcccgcaagtatgccagtcctagattacttaaaatttcaaaacaaacttggccaaacttcaggcaggcccctcagcactgaatgccctggcctacaagtagtgacatcgttacatttattataaacaattggagcattgcctaaaaattgttccttgaggcctggcgcagtggctcacgcctgtaatcccagcactttgggagactaaggcaggtggctcacgaggtcaggagtttgagaccagcctggccaacatagtgaaaccccatctctgctagaaatacaaaaaattagccgggcgtggtggcgggcacctgtaatcccatctactagggaggctgaggcaggagaatcgcctgaacccgggaggcagaggttgcggtgagccgagataacgccactgcactccagcccgggcaacagtgcaagactccgtctcaaaaaaaaaaaaaaaaaaaaaaaaattgttccttcaaggtaagaaacactgagaatctcctgccttgaagatattactggtggtaaccaggaaacacatttcacttcctagaacacaatactggtttcttggaagatgctttcagtagaactttcatgtccctgacaggtgttaggtaatgatttaatcgagaggcataatgatttcctcaaacgactccttttcaaatcccagcccaacaaataaagccctaacagtttctatcttgccctaggtcatatctttatacatttgtgatcttgctgccatcccataaaggctggcagctagatcaagggcacattctttcctgggacctattaaaaatagattgtcccatgggccaggcagtttctcatttgatatgggggacctatttgagcttaaatctccaccaccaaaaaaaaaawaaaaaaataataaaaacccctatatggtacagctacatatcattttgttgaatattagtctcattgctactggtttgggtgtttaatggtttacagtccagaggcctgcatcarctcgagtgggcagtcacttaaaaagccataccccagtctcacatcccagatgatatcacccaacccaggacctctccattggagatgactttgcccctgtgattccttcccctgggacactaaaacctccactcatcaggacacaggacattttttggttttcttcctgaacccactgtttccttagcccatgatcctggtatcctccttgttctccactcaaatgtacacccctacacttccatactgcaaggaaaatccggaatgagttactacaattaatggtgactgttgctttcctcaggagacacctgcctcrtatcagtcaaccccttactccctaggggagaggaccacctacccactggtgtctttccctactaccccttccaactttccatcagaatctcctgacttgtgcctctgaatatgaccaccaaatccactttctccttacagtcagtgcatccacccctcagacttacacttatctgacatttaaaaactggtgcccaggcaccaagatgtgaattacagtgaatttttataattttatgttgcttcagcatctattctgaatctaggtgtaacttgtttcacacagaagcagggctcagtcatccttgacacactatccactccctgcctcctcccggttcctcagtgtggtcgagccagatacctgccgtgtacaaccacctccctcatggacatacagatacagcctacttgactgaccccccgtaccctgcatggactgytgcagatacgccacggtagccactctcattcacagtgtgactccacagaacttttgcctgcttgctctaaacccaccaactagaacttcccacaggaaacctgcttggttagttccctggaccccaataaaggccttggcccatagctcatttctctctggctgcccatctgctggttgagtgcatttccctgccatcttgtctttcgcccgcattggtactcctcctctcaccaatttgtcgtacgttgcttctggtatttcacatgtttgtgttgtatttcctcctctgtgtctcatcggactgacagacccagacctaattttcctcttagtcagagctctcccagagagtggctatcttgggaggaataaactggacacaggtcagacaagggccacaagggtacctgccagtataaaccagtttcctgtgagagggacacctggtcacaggtcagacacttaggcattaggctgtctgccaggatgaagaaggatctcatgaaaggtacactgtaaatatctacaactatatttcctagagccctatcagggcaagactagaatttatggctactctccagagagatacccccaaaaccaaattgtagagaaatataacagagcctcacttacagttcttaatatggtgtcttatgtgtagtggatgtttgatcatttgtattgaattgtcctataccgtggagtatgtatgtattatttacttagtcactttatagcttgtgttgcaaaatgggcaatgccataaacaggagttctaaccaaaagacaggctctgcaaactgcatgcttagtgtggagatgcgtttagtcatgtactgtgctttgtggcagtatagttagaagcagttgtggtgatggtcatagctattttagtaacttcagttactgacttctgggaacaaagtttcttgaaaataaaatcagctgcattaaaaaaccaaaaacaatamatgaactttgcttaatgacataacatggcatgctagtgaaacagcatttttaactattaaacttagggggtgtataggataaaaacacttgtactcatagatgctgtttataatgtatagttaggggcagtggttctgcaacaatagccattatcagaatcagaacaagctagactcttcccccaaagtttctgattcattaaatttggggtggggcctgagaatttgcacttccaaaggttcccaggtggtgctaatagttctggagtcacagtttgagagccactgttttaaggttaggagaacataccaacctatcaaagtgggcgggcatctgatattgctgattcatggtggcatgctgttgctgtrttaaacatctaagaaaaatctactgtggagtgaaaatatgattgctaatggaatttcagatcaggagccagatagggagacatctgttgttccacagtccstaaaacagcaccattgcagcctttcttggaggcatatcaagaatgagtattttaggttagtatttattaaaggaatacttttgaaagcttgctcttgtagtgctaggttaagtgcatgaagaggtctgtgtctcatcttcagctcagacttgggggcttttttctttttattgctccagcaaggtcaactaggctttatgcctctcctactcagggatgggcttcttctattttagaactctgtactggtaatgcaattctgaggctgctctctgctccacagagaagagtgctgtgatagattattaatgtctgctgtggctactgttgcccttctctgccttcagtatgagcacttataggtgttcctcttctaagctttacttgctgaagaggaaggagaggcagaggtgtgtgtgtgtgcatgtgtgtgcgcatatgtatgtatgtatgtgtatctgtgatgtctgtgtatctgtatgtgatgcatttaaaaaaaaatcttacatattttcttagggactatgttgtgaggctggagtacagtggctattcataggctctgtcataggccatgaaatcctgggctctagctgtcctcctgcctcagcctcccaatgtatgtgatacatttaatgatgcttcatagcataacgccttttctaccatcttataatgtaattcactgttgcttttacttctggtaatagtttgagagaaggaattgtactgtaaagattccagcttgtaactcattgtgttatacttaaaatttcttggtagattaatttttttgtgtttgaagaaaaggtattgcaattgcaattttttattatttgcatatgtttgtatttgcatatattctttccaatactgggtctgatcagtttcatttgttcttaattatttatttttttcttgaagttttttttaaattacaaaagtaatacgtttaagttttataactcagtcaccccagaaattaataagcatccttccatatgaacatgcacacacacatacaccaccactctagtattaggctctaatagacatgtttaaaatgttttaatttgttttaaattttataatattaaataataccagtcacatgattattctctgactttaatttttcacttaaacatatcttggacttattttgaggttaatagatgcagatatataattcattatttttaatggctgcataatattctatagagagaaccaaatgtgatttatttagcctttctggtattgatggcaaccacatttccaatttttgttcttttaagcagtaatggcaaagcattcttgagtacatatctttaaatgctggtgctttagttcagttgaataaacactgaaagtgggattcctagactaaaggatgtataatttaaaaaatttaaataataacattttaccaaatgctttctggaagattgtagaaactttcaaacccctctcccaagtaatgtatgaaaatgtacatttccttatagtactaccaactctgaatattaacaatcaccaagtttttgcaaaatggatcttttttttttttttttttttctgagatggagtcttgatctgtcgcccaggctggagtgcagtcatatgatcttggctcactgcaacctctgcctcctgggttcaagcgattctcctgcctcagcctcctgagtagctgggattagaggtgcactccaccacacctggctaattttgtgtatttttaatagagatgaggtttcaccatgttggccaggctgctcttgaactcctgacctcgtgatctgcccaccttggcctcccaaagtgctgggattacaggtgtgagccaccgcgcctggcggcaaaattgatcttttatttgtgtatctctgccaaccagtaaggttgagtaccttttcgcatattttaagtttattcacatttctcctattcattgctcatttttttccttcttggattctttttgcttatcaagttgttggaattctttaaagacattaactctttttcagatgtgttacacatattttcttctagtttatcatttgatagtggtggtgccttgctctttcgccaagcagaaatatttaatatttatctaatatagcctgtcagtctttccttcatggttttaaaaatagaattttagggtttataaaacattttcacatttgattcacataattcagctaaggtaatgttgatattctcatctttatgaagaacctgagcttccaggaagccaactggcctgcctaagtttgtaagtggtggatatcagatgtaaaaaaaaaaaaawaawaattgtaccctgatcattatactgtgctctgattgacagttcttttacaataaaacttagttaatcatttggcaggatataaaacaaaaatatgtggtagtaatgaaatatctgttttcaaggctatgtgtaagacaaagttcaggttacatttcgtttgttagtgaaagatgcagtgccatgtacgttacagcagtgacttgaactgtgctattaatacagtcttggcgtggtggcttatttttaacatggtatcatacagtatttcaattatttatgcttaaacaaaagccaaaacctcaagtgttgtagatattaatgcttaggagaaagaccaaggtagaagagaaacacatcttcaacaaattcaaaagggccacctcttactcaatgcctgggtgtttcaatgacttaaagccactacaagcacaactaaagagtgagawccatttttatctagagtcaaagaattataaagaaacagtaaaagcttttcccccactacatttcagctgaactttgaacagaataaatatrcctttcagtacatattttaatgagtatactgtccatggtgaacatacttaaaaaaaaggaatccaccataaaacaaaaagattgccatctttggtagacttcagtgatttgtgctaccagatgttctgggtacccagtctggactctgaatggagagagtttgaagaacccactcagaactggagttcattagatcttcatggaatgtaaacggttgtgggcattgtacatacatcatatgcaatatgaagcctaggacaatagatacctctcttgcatgaaaagaacagagaccttgtgcttctgattcccactgatgtacattgacctgtaattccttgtcatgtcttcaccacccctttccaaacacacaatcaccagactttaaaaatgaaattatttaaaatgaaatcatataccatattcttttggttatgagttccttgaggatgtagagacgacagccatatgaattagtgataccataaaatggaaatgtttttcagtattgtaaaatggggatgcttagccatattttgtttttgctggacctatggggtttatagatacttattttatacttccattagtgaacatgtcaaatctttttagccgtttgggtttaaaacttttttttatgaatttattactttttgttctgttaagtttctttaatttacgaggctagtctacttgaattgtatgaagtctgactttgtaaagcagtggtttgttcttacccatctaaatcatttcttgtgcctgaatttttaatcttttgtcttcttcattctttacctctaagatttactttcagttcctccctacagttatgactggggttttgttgactagaatttcttctgctttaggtctctagatcctgggatgatagtgttggcactgcggtagtgtcctctcctatctctttctaccatctgtaaacactttcattctccttttagtggatgggcctcctgaggatacatgatgcagagtgtttgtgaaaggaaactgataggactgaagacatttttctttataaaaggggaagggcggaatgtggggtgagaggtaagggaatggatctgttgtcatccttacttgtttcaagtgttctgtaggtttttcatttacctgcagttttgtgagaccataaataagaacattatgatgggaaagttgcagtattttaaatttagagcagtttcaaaatctgtgattctggttagtaggagacagatgctaaactattttattgtgatgcattgaaatagaacctctccttttggattaagcagcagggaatatacatttgaatatcttaatgttattgaattaatttccagatttattatggctacctctcccctcatgtaaactgcttttattctttttttaaacaaatgtgttatattttgatgtctaatcatgattttaggcatactttatttggattgttatagattcttattgtgaagagtacctttccttttccttttattctattatgattttaacattaaaatgttgagccaattgatttatctatttttctgggcttgagatttgtttttttttttttttttccattttgggaatagactacatgacattttgtgattggttaattttcttctaatattgctgctctatctttgaggaagttaataagcaaattcttgcatgcatgggcaggaagaaattgggtaatcttgagaaatcatctgctggctttgaacatgagattaattttggttttgattactttgttagaccaaagatttgggaagaaaggaggaaacctataagggtctcttttttaaaggcaagctttaagaaatgttatataaactaggacctttttatgaataygtttttgtagggttaacattctcattttaaaaaaatgaaggaagttttgagcataggctgcagtcaacttgggggaggcaattttaggcttcagaaatatttccttagctcttccccagacactgattttcttttggtgccttgtaagtaagaagtagattgccgaaagatgctcaattaacagattatatgaatttgtagattgtttgtaagcttcaaaacttaagaggtagatatcggtggaacttgatctggattcagctagtcccctttcccttcttttaaaggtcaattaactgctaaagtgatgttttaagaaacagttctctttcaaatgtagacaccgtcttgaaaatttactactcactttcgcattaagccagggcctacttgttaaaggttttagggggtgccttgcactcttcatactgccaattgaatagtaagtgttgatttggaacaaagagaattaattttacatgtttgagaaagattcgtttttaagtgatacccaccccctacttaaatagcaagtgattaactactactttaattttcaattaatcaaattaggtttctactggtagattttgattacatgcagttctaacagcttccagatacacttctctttcccatatgcttgccatatgctgactaaaatgaatgtagaataaattagtgtaaaagtaagaacactaagttcttttgtagagttcatcttgaatgacagaagacagctcagaatcattttagctatgaggcaccttttgaaaagtgatatggaaaaataacctatttatgtgtgccaaggtctgttttcataaatgtaaatttgaaagttcattaaaattttggcatgtgatttggaatgcataataactggaaatgagtcaacgccagaaatctgtatccttatactaacagcatgtttcactgaagactggctttgtatagttgtttaatatttaaaaggttaaaaaaaaaaagcatttacttgacggttatggctctggaattgtattcaggatggagaggctgcagaggaaagggagagccagcagtctaaccagtggtcccaggaagctcatcagccagttctcttgaaaaagcaggggccgggcacggtggctcacgcctgtaatcccagcacttcgggaggctgaggtgggcggatctcctgagctcagaagttcaagaccagcctggccaacatggagaaacctcgtctcaaactagctgggcgtggtggtgtgcacctgtaatcccaactacttgggggactgagacaggagaattgcttgaacctgggaggcagaggttgcagtgagccgaaatcgtgccactgcactggagactacatctcaaaaaaaaaaagagagaaaaaaagaaagagcagggctggtgacttttaaacagtgactactgtcagtgaccaactatcccttgtttttcagacatagcaagacagaaatgcatgttttctgtaccatctttgggaatgtaaagttggaccatgaaggacattttagctcacgtaacaacagctgaaaaatggctgagctgggatcacactgagggggtatctaaactagtggtagtatgaacagttaatgcttggatatattctaatgttacatgcctggcctactgcttacctgtaacataagccttccgaggtgacgcaatacaggcatagaggacgaggaaaaacctaccaactgttggagcaatcaagcccacttctttgtaacaggacaaatgtgtgtcacgatagtcctttcagacatcttcaagtgaggcataggaaacaatgccataagccaaggtaaggatgaatgaggaattactgaaatagaagagtttttattttagaacttataggctaacctcttcgaattcttatcctctgcccacttgttatttttgctgttacatatgtgtactttgtacagattccatttttattctgttattcatttttatgactttgtttttaaagtttcttgttctctgacatctcaggcactctggtttctacattccaattttgttggaggaaaaaaaagtttataatttagcaaataaggtgatcaccatgatgaaaagtcttactatttaaatttgtgattatgtgttgaggtcatattctgtcacttagtatgccatttatggatgatgttttaaaattaaccaagcttcttgcagaaagtgagtttaaaatcactgtcatcttggtttatttcctctcttagcttttgatctatttgactttgacacatgcatctcaccaacttctgtagattctcattttgacaggatgctttgattaccaccaacaccccaccagcaaccaccccctgttctggttcaagccatcagtcactaaattggatgttcttgcatctgttttgttcacttcatgtcttttgacttatggtgagcccttcttttttttcacctgaacttagtaatttttcctacttttgggctcctttccgtcaaaccatttttctcattgtggacaaatacctttctgaaaacatgggtctcatcaagtttttctacttaaaaaaataattttttaaattgaaaaataaaaattatacatatttatagtgtataacatgatgtggaaatctgtatacattgtgaaatggccaaattgagctaattaacatatgcattatctcaggtactcatcatgttttgtggtgagaagacttaaaatccccttaatgtttttcaaaataaaatacattgttatgaactgtagtcaccatattgtacaataaatctcttgaacttattcctcttatcaagtgaaattttatatcctttgaacaacatctccccaactctccacctgcccccacccaccaccattctactctttgattcaatgagttcagcttttttagattacacatacacatgaaatcatgtgattatttgtctttctgtgtctggcctatttctcttaacataatgtcttccaggttcattcatgttgttgaaaatgacaggatttccttctttttaaaggctgaatagtattcagcctttaatataattatatttgtacacacacacacacacacacacacacacmattccattggggatatatatttcacattttctttgtccattcttctcttcatggacacttaggttgattccatatcttgactattgtaactagtactgcagtgaaaatggaagtacagatatctttttgaaatactggttttgtttcctttggatgtatacacagttttggaattgctaggtcaataatttaatttttgaggaaccttaaaattttccataatggctatactagttttcattcccaccaacagtatacagtggatcctttttctctgctctctatatccttgcaaaaatctatcttcatcttttcgataatagccattctagcacgtgtgaagtgatatctcattgtggtattaatttgcatgtctctgatgattagtaatgttgggcattttttcatacacctgttgcctatttgtatgtcgtcttttgagaaatgtcttttcaagtccttcacccattttaaaatcaggttatttattttcttgctattgagttgtttgagttcctcatatattttggatattagtcttttatcagatgcatggtttgcatatatttttttccaggctgcaggttgtctttcagtgtgttgattgttttctttgctgtgcagagctctttagtttgatgtaatcccagttatctatttttttgtttttgtttttggttgcctgtgcttttggggtcatatccaaagaatcatcacccagaataatgtcatggagaatttctgctatgttttcttctagtatttttatggtttcaaggtttacatttgaatctttagtccattttgagttgatttttatatttagtatgaagtaagggtcgaatttcattcttatgtgtgtggtgtccagttttcctaacaccatttattgaagaggctgtgctttccccattgtgcattcttggcacctttgttgaaaatcaattgactgtatatgtgtagatttatttctgggccctctattccattccattgatctgtgtgtctctttttataccagcagcatgctgtattgattactgtagcttggtagtatactttgaagttagatagtgtgatgcctctagctttgttctttttgcttgagattacttcagatatttggggtctttcgtggttccatacaaattttaggattgttttttctatttctgtaaaaaatgtcattgaaattttgattggggaatctgtagatcactttgggtagtgtggacattttaacactattaatttctccacttgtgaacacagtatgtctttccacttatttgtgttgtcttcagtttttttcatcaatcttttatagtttctggtgtacaggtctttcaacttcttggtttaaattttttcctaagcattctgttctttttggttgctgtagtgaatggattgttttcttaatttatctttcagatagctcattgttagcatatacagatgctactgatgtttgaaaaatgatgttgattttgtttcctgcagcttcactgaatttatttattagttctaacagttttttgatggagatgttagggttgtttgtctacagtcattcctcagtatctgcaggggattggttccaggacctcctgtggatacccaaacccatggattctgaaatctctgatataaratagcatagtatttgcatataacctatgcacattctcctgtatactacacattatctctagattacttataataactaatacattgtaaatgttatataaatagttggtatactgtattgcttagggaataatgacaataaaaaagttcagtacagatgtaattttttctcctaatatttcaatctgtggttggttgaatccacagatgtggaacccatggatatagacaagcaactgtataagatcacgttgtctgcaagttttttcacctcttaaaaatacttggtggctagctattacctgtagaattcagctccttacagtgctatgtaaggaacatcacaggctggcatttgcctaccttgttagtctcatgatcagacacaaatatggctctttgtggctggtcatgaggctaacaaggtaggcacctggaaccacacttcaagtcaggttcatttgtggtgccctgtcaagccaggcattctgtatactctggaatttttgcttacattttaactttgtcaacaatcagtactcttcgttttattattgtcagatatttacctacttttccttaaaaggtagtcccccccccccccttttttttttttgrgatggagtttcgctcttgttgcccaggctggagtgcaatggcaccatattggcttactgcaacctccgcctcccatgttcaagtgaatctcctgccttagcctccccagtagctgggattacaggtgtgtgtcaccacccccagctaatttttrtatttttagtagagacgaggtttcaccatattggccaggctagtctcgaactcctggtctcaggtgatctgcctgctttggcttctcaaaatgctgggattacaggtctgagccacctcgcctgacctcttgggtgcggtttttttttttttttttttttttttttttgagacggagtctcgctctgtcgcccaggccggactgcggactgcagtggcgcaatctcggctcacggcaagctccgcttcccgggttcacgccattctcctgcctcagcctcccaagtagctgggactgcaggcgcccgccaccgcgcccggctaattttttgtatttttagtagagacggggtttcaccttgttagccaggatggtctcgatctcctgacctcatgatccacccgcctcgrcctcccaaaatgctgggattacaggcgtgagccaccgcgcccggccgggtgtggttttaactgagtctcctaggtcttaatgagggctcctttggatattgtaagtaataatcatggttgttggtaaatttgtcttcatagttagatgccttaactatgtgaggggaaggaaactgtcttatttgccttcgtcacctcacacatagcagaaggcctggtatgtattcagtgttccatcaatatttattgtgtggaatttattttccattacattttatggagaatgagagaatcttaaagtaaatgaggtgtcctagaaatggtatatttgaataaagatttgtgacatcatgatttatggaagtagaaagggaaatatagtaattcctaggcattttaactagtgaatggataccatgaaccataattggtaaattatccaaaaatcaatcatatttagctaaggaaagtggtgcacatgtgtgtgcatgtgtgtgtgtatctgtgtgttttataatgggaaattcactttaaactaatgaaagaatgatttgaaactctgaattataggcaattcttaataattattgggagggctagagtgtaacccaggtttctgggcattgaacttaaagaagacattgaactggagggagttgaaaatgatgcagctgtgcatcaagagattgctattagtttctctatatgacctgtgktaagtaacttctgaattcggtttttgtaacacagaacacctggaggaccaaagtcaatagggtatactcaactgtagtagacaagatggaaaacagtattgggagaaataagaatggggaaaatattgagcctgggcatgtcagtgtatagctttgccttagaatttaatttgaactgagtggtcaatagttcttgatgccccagggagaactaggatatattctggggcaaattgaattttccaaagatttccgtaaagttatctttcacccacatgctcttctcacagttgattttgctacttctgtctttgagaggtagggtctttgtcttttctttttgaagctaggttggcttttgtgcctgtttcagccaatagagtagtgcagaaatgatgctatgtgatttctgaagctagatcagaaaaggtgatgctcctttctttgttgaaatacggtgttcagttgtgaaacctgcagccttcatgtaagcagtccagctgctcagaggccattgtgttgtgaggagagaccaagggccctgagaagaccaactgtattaagcagccagacctttgccctgctagccctgcaccgctcttgcttcaggcaccatttcagtgcagccaaatgagaaactctgagctagaaccacacaatcaaacctttctgagttcctgaccctcagagaaagtaaaatggctattactgttttaaactaagcttgatggtgacttattatgtatcaatagataattggaacatgtttctttggagaagcatttttccattttctgttaggtggtattgaaggaagacagggatggaataagaggcatctctgaatgcagatttagagttgtcactgcattaacacctgttcccccacatttttttttaagagacaggttcttgctatgatgtccaggctggattcaaagccctaggctcaaataatcctctcgcctcagccttctgagtagctgggactacaggaggatgctacatttttacaccctatttggagacagaacaatagagatcttaaaagaaacagtcatacaagtttttttcttcatgtacctttacctaacagttgttaataaggggacagctcagggtagacccttaagctgagctgattgtattgcaaggaatgcatctattttggggaaataagaccatgggtaaattctgcaaatgatttcgaaggtatctctatgagaacagttattgcagcaaaaatggactgtttcaaggaggtcagagcttatgtcaaataatttattgttcagtgtgtgttttttttaaagacaatgtttttagagcagtttgaagttcacagcaaaattgagaggaagatgtagaaatatcctgtgtaccctctcccctcacacatgcatagcctccctgtatcatttacagtgggttttaaaaacatattaaacactaaatgcctgttatgggctgagttatatcctcccaaatatatgttgaatcctaaccccaggtacctttgaatgtgaccttatttggaaatagtgtcttttgtagatgtgatcaatttaggatgaggtcatcatggattactgttggcccaagtccagtgactgctgtctttatgaggagatactttatatgaagatacagaggcaggaagaagcccatgggaagatggagacagagattggagttatgctgctacaactaagaaatgcatttcaaagattgccagcaacctccagaagctaggagagtcaaggaaggattcttttctagagctttcagagggaatatggccctactgacactttgatttcagamttctagcatgaatggttaaattcctgttgtttcaagccaccctrtttgtggtattttgttacaatagccctaggaatctaatacactaatactaaggcagtatgctttagtgcttaaagttatattgaaacaataaaaacaatttgctcttcaaaagttacaaaagttaagccacagcctgggagaaaatatttgttaacatatgtctgacaagggcatgaatccagatcaggggtgtccaaycttttggcttctttgggccacattggaagaagaattgtcttgggccccacatgaaatacactactgatagctgatgagctaaaaaaaatacaaatcacacacamaaaaatctcataatgttttaagaaagtttacaaatttgtgttgggccgcattsaaagccatcttgggctgcatgtggcctgtggtcggcgggttggacaagcttgatctagattatatgaataacctacagctgaataataagatggttsagttataaaatgggcaaaagatttgaatagacacttcatcaaaggagatatacagatgtgaaagaagcacaagaaaagatactcgacatcataagtgattaggaaaatgcaaattaaaaccaatagaagagtattacattctcagtagaatggctaaaatttaaaagactgaccacaccaagtactggtaaaggtagaacagctagaagaaccttttttttttttttttttttttttttttttttttttttgagacagcgtctcgctctgtcacctaggctggagtacagtggcgccatctctgctcactgcagcctctgcctccacctcccaggttcaagtgattctctgcgtcagcctcctgagttgctgggactacaggtgcatgccaccacgcccagctaatttttatattttttagtagagacaaagtttcaccatgttaggcagactgatctcgaactcctggcctcaagtgatccactcgcctcactgtcccaaagtgttggcattacaagcatgagccactgcacccatagaagagttcttttacctagctgatggacacttaaaatggtataatcactttggaaacagtttttaaaaaattttcataaaacattaaggacatacctacccaatcattctgcttgtaggtatttacccaagagaattgaaagtatatatccatacaaagacttacacacttatacaagttcataagaacttttttttgtaattggcccaaactgaaggacacccagatgtccaccaacagggaatggataaacaaattgtggaaattccacatcataaaacactactcagcaataaagaggaatgaactattgatacccaacaccatgggtgattctcaaagtaatttaaataattacatttagtgaaagatgccaacccctgaaaaagcatacacattgtatgattccatgtatacaaaattctataaaatgcagcataattataagaacaggaagtggatcagtggttacctgaaaatggagcctagacagggcagggaggggaaaggatcatgaaggtcggggaaaacttttaggggttgatggatgttccttatcttgactatggtgatggtttcctgggtatatatttatgtcaaaacatatcaaattgtattactttaaatatgtgatttttaatgtcaattgtggttaataaagatagagcaaaaagaacattgaaaagttatagaaaaaaatgaaggtttgggaggtcagaggggtttagaccccaggccatattctactgtctgtcaactgaatatcagaaggtgaagtttgcgttgccatttactattggatactacagcatgtctttaatgacaagaaaccatttaaatctagagccaacaagtaaaccgttttgagaatcagttgtggtttgatcacggaagaagaactccaatgagttattagcataaggaatttattatagaaattaaatcttaagcatttatagtggaagcttgacaagtgaaagtccaagagggaagttggaggatcagtggtgtccccacttagtctgagaaaggctcttggggaagtgtctctgagaagctgtgcctcagtgtacctatcatctgtataggtatgttgggcctaaagcactgtttatctgtagaggaagttggacagggatttgagaagagcaaagataagcctgaatccactggcatagtggactgtcaatatagtaaccatgacgatttttggcttccaaatctgtgcaaattctactttctggttccatgtcaactttaacctagaaccatactggaagatcctaggaaaagtagtttcagcttaaccaggctaacacagcacaaaccacaacatcctgctaattaatgagctttgtaattgtagtgcttattttttttaatgtgtgtgtgtgtttttacagtgcgtgttatgaacctaacctcccctgtactcatgtgacgtgtcaattatgctaaacaaatatagaatataatttggagtgatctaattgggatagaatggagtgaaggttagtccaggcatgaattataagcctagatctttccagaaacagggctgattacaatataaacaatggggagactgcatcccctgttacatggaaggtgtttatagcaacataaacaccttttcaacacagtaacataaacagtttctcaaggaaacattctgtagcattcaggaaatgtttctttctttacaaacaaaaaagtgtgtttttctaaagatttaatttactttagggctctgtttagaacaaggcaatgattgtagagggataaagttattcccagagcacttttgtggtaggttacagttgaaatccttatagaaagcatcttgttaaaaattctgtggactaagcacaggtcagtacaagtgtgacatgttgcatattgggcaaacctatggaaagttctgcaaattgtacttttgtgactcaaactgtgttataaatttccaggagcctgttatttggtattgtcttatgaaaatccttcttgaaattatgaggaccctttgttacaggtataacattgactgtctactgtgagccgagggcctatgataggggttatgtatttgtctcaagcatatttaaattaatttgtgaagtaaatgcttcctcaaattggtcaattaggattcttacattaaggttctttaaaacattttttaacttggagcaactaaaaatagatttcatccacaagacccatcttaggcttgaaaaagaggacaattctttagtaagaatgctttgttaatagagaatggtgaacagatatacctattttcagtatgttattaaaaaatctagttccggttgtgtaatgaaaacgctgttaataggcactgagcatcagccacacacgttttctaaatctatgtggaaaggccacatttaattaaagatttaccagtaatctctaggaatgatttattcattgctgactgtagattttttgcagctttctacaacttagaacgtgcaagcaggagatagtatatcattctgccttctaccttaacctctagactagtgcttctcaaactttaatgtgcagactgataacctgggcatcttgttaaatgcaaattgtgattcagtaggtcgcagtggggagtctgagattttgtagttccaacaagctcccaggggatactgatgtcactgatttgcagagcacgctgagaagcaagggagtaggttttctgagtgtaattctgggtatggttgcccatattattaaactttttacagtaagtatgatggacagagagaaaaatgatttatataggcctagttcttctcttgagggcaaaaagataatggcagactcccattaattaagtagcttgcttgtagtttggcaggaatgaagtacagaaatttcctattcagctagctgtaaatgtattacattttttaatttatgaaagtgggccaatttaaaagccaacctctcatccagatgcaaattaccctaggaggaaaaaaaatcatcttgcatatatgtatagtacaactatgggcttactcctttcccttgggaagatccatttggtacctgtaaaattaataaaacagttgttttttcagttttaatatatatgaaattaaatgaattgctcgtgggtattcaaataacaaactcaggaccaccttgagtaattttgaacagcattccaatattgagaaaatgtccgtggtagggaaatttgtctgtttcaaggatgaaaatggggaattaatttgaaaagactttttagctgtcaccactttgttttaccttttaaagtgggcagsctgaaaacactggtaaaatgccatcacgtgctgttaaaatagataggttttgaatatttttaaagaaaacttcaggcaattagattatatttgggaaatatcattgcagtatgaatttgaggttaggaaaaaatattcccagarataaattcaaatacttcaaagaattatttgcttatttcttaaaccattatttcttaattttaagttgaccctttatagtgaaattgatgattaaaaacaaaacagagcaaatcagcatctttaaagctttctggatttgtgcataaacctcttctcccctgaagaatggtaaaagctgtagccaaatggctatgtctctcggtagagtgatatgatggaccacagaagtcatttagcaactgtgaaaattccttaggatcctgacacaggctgataaaagaattcctaggaatcatggaagccaaagtgtgtttatatgctgtaatgattgtggatagtcaaatatatttttgacaaagatattttaatagttttcagcttgactttgttatccaggataataaatgaaaacttaggaactgattgcatcttcctgaagacaagtctattgttagtttctatctgagaatttttcatctgcrtttcagatggttgagtatgttggaaatgtgcgttccagaaaagtgaggaaggaggtatgtgcttcatggggactaggtgttaaaatggttgtggtaccagcatattttaaagaatgagtagtaggaaaataactatggtgttacagatttaaaaaattatgcatgtctattgtgtaccatttgcagaaagacaataatgtgaaaaacttaacatactttatagtatttttcagttttttagaattgtaattatcctatttttcatagtttctttaacataaggtatttctcatgtaattatacatgttttggggtgaacattgtttttgatgtctcattatatttataagaggaatgccatttaggtaataatttttacttgttggatatttaagtggattctttatcttcctatgacaaataatactaatgagcatctatgtgtaatgcttttctgtggtcaagattttttctttaagatagcttgccagaacttaaatttacattcttataggaaacctttccttaaagacttgtctgtgaagttgaggaactatttataaagaaatactaacccttcctgagtgttaaaagataaggatgttatttcagggtgttaaaagctaagctggagttggataggtcagattaacctggttctatctttaacatattttaaacacctgttgaaaaggctggaaacttattttttgataaattactataggataggtaggatgctttttggagaaatatgrgttgtttatgtggcgaatgtctttaaacaatgtttttctaataacaagagtaggaagacacttgaagataaagtttctaataataagaaaaagtttataatgtttaactcctaatcctctgagctttctttactgcaaaatattgaagtaggcatgatccattaggcaaatagaaaaacaaattggaaatgggaataatacctatagtagaaaaaaaaatggaaacgggtgcacaattcagtctgtaaactgacttgtgacattcattcttggccaatatttaaaggtaagacaatcaattggataggtcatgaatctatcctaaacaactctaaacttctatttagcctgcagcattttagttgctggagagtgttatggcattaaatttatagacagagaaaaagtttttcaagatcagatctataagctatattttctatgtacttactaaaattcttagtttagcatattaatggatatttaagttagagattttagttttcaggcgaattcttttgcttagatatttagtttagagattttagttttgaagcaggtgctaatttctcttgagtaactattttgtgctcttatataaatgatttttttctattaaatctagcacattaatatatatcttaatatatgtgggaaatttaattaggtagaattaatgtgtgtgggaagtaatgaagtgatgttttcatgattttatttttatgtttataactatattttcaagaaattatatcgcctcttgagttcattttaaactgtaacacttggaacatataaatgcatgtaaagtataaactgtaaaacaaaataataaaatgaacatccttgaaatkaccatccaacctaagaactaggatatgaccaaaactatctgtaagttctttttctagcccattcagttttgcagagtttacaggttaaaaaggatcttggtaccttcattttctaagttacaactagtatgctatcagcctttgaaaaaatctaaatagatatatgcaatttactttaggaacacctgcaaataaatgatatcaatccatatgcataattaataatgacaaagatggaggttttaaaaataggacattagtacagaaaatattagctatggttagatttaagcttttaaatttattaggctagaaatcatctctttttttctaaataggttaataaatgttttattactgaacctaagagtgacatgagtacagtatctgtacacaaaacacaaataggtgttcatttaataacatacattcacattactggttggaattccagggttggtttatttgagaagaaactccatattccatatcatgctattcctcagtgcacgatcttctgtgttccccaatctttctttgtactatgctctgaaagtcaacaattcatggtgaaaagtcacacaagaaaacatcagcagtagaagaaagtgctactgatgaataaagctccaggtgtatatgtggttatttaaagatcatctccccaaatattatttctcccatttgtactttttgmcacttactgttttggaatataactgttgttgatttctcacttgagttttgactgagtctctcttaacagaaactcaaattctttttaaatttttactatctttagcagtaactctttgaggagtaggaaatgccatttattcatcttctatagccattgcatgtgattgactggctgtttatcttcctcataaaataaatattagatttcatttttggtttgtattttgcccctgatgtctttctatattattgygtttatctggatttttctgctttcttgagcagggatgtatctcctctaaatagtgtggtactgtatatagttcctcatttttctctttcttgaaaaaactctctcacatggtttttaaaaattactttcatttttttcttcatataataccatatttaaaatggttttgtggataagaattaaaaaaattaatgttaaaacgtagcctttgattgacaaagtattgctcttgatttttgagtatgcaggaagaagtacatagttacataggtttgaatttatttttagtaatattgtttttcctgttgggttgacttaaggacgttatatgatatattaacgtcacttaaggacattataaaaaagtacccctctgatttagagaaccttttcattttaaaccatttaaagttttctgatctttaaaatgaaagtatttccctgttgagtgaaatttagtcaaattccagctgcaatttttaattcatattataaccattatgggccaattagttttcttgaatatacagtaaaccactctagtcattactagatcctagattctgtgttcttaagcagattatttaaaactctctattccttagtttcctcatgkgtaaaatggaggatgataacttttcagggttsttgtgagaattaaatgggttcctgtgtccaaatacttgcatatggtaagttctcgcattaattttctgttgctgctatagcaaattaacrcaaatttagtggcttaaaacgagactgtctcatgattctctgggtcagaagctgggactgccccaacttgtttctctgctgtgggtttcctgaggctgaaatctaggtgttgccagctgggctctgggaagaatctgctcccaggttcattcaggttgttggcagaatctggttccttgtggctgtggggctgaggtctctgtttctttgccaactgttagctgggccatccctcagcaactagaggcatctctccagtccttgaatgtgggcccttaacatttcaaagccagcaatggcgtgacaaattcttctcatgctagaatctctctgacttctctcttgtacgccatctctctgactgtagctgaagaaagttcttcacttttaaagtctcatgtggttagattaggaccatctggataatcttcatatcctatggtcagttgattagtaamcttatatttgcagaatcccttcacaatagtacctagattagtgtttggttaaatagccagaagacaggaatctttggggggcagctttagaattctgcctgtcatggtacttaatcagtgatggtgaagagcagtcatggaggtgactggcagtgatgaaagaaatcacatctttatcagaggagcacagagtaaattccttgaaggtgggtaccatgtattcctttttgtatccttagcaccttacagtttgccatgtatttatttgagtacttgccattggttgttagcttgaatgtaatttctctcyttatttttttcattttctttccctgactcagaaaaagtattacaggagtttgatttggtatctctggcacctgcttggaaaattaattacaacatgtagtttccctttaacttttcccctaggtttgattgtcatcaaatcacaaaataaaatagcttgccgtttatataggaagctgctacgacagacttactgtcattggagcacagaccctgagttgttttgcattgtgctttttcaggatatgttggaattttaggtactcttagccatgtcttctgtatcttgtatttgaagataggttgtaagtacagctattgtgatggctgagtataaagttagccaattgctccagcagatagaagggttctgttaacgtcttcagggtggcagccctaaatattgaacctactggccaaagacaatagcaaggtgataatcacccacagtttctcttaccatctgtggatgttttcctgatcaacaaatctgactaaatctccctttaatgattttgttagacatattagagacctgccaagaaagagaatataaatcttcacctttaagatgccaagatctttgaaaaggtgttagaccttctaatgacattgtttataggatatttacataggcctgcctctgtagatataaaaaacctatctgactcaggaaccaattcattgaaagaattttacgaaatttatttttccaatattctttctattccattgacatgccagtcccctacctctctacccttccacccgctctcccttgttaagccaggagaaacaaggaatttgtttaatatactttgtggaatagtgttcactttgttacttctctttgttcataaatggtattaatgtcttggaatctttctgacacttagatactgtcyaaaaatatgtctatcttccccccaagaagacagataaaatgaaatacctcttttgtgctgagtagttgaaacactttttgccaaagtgctttgcttgccttgctgcctttgaattytattacagaggctggctgggcattcacatggtgagtcttttcaagaatgcctttctgtctaaatctggatcagcagtgtccactcaccatttatctgatctttaagttttacagccttatctggcagtacaatttctttcatggaaaacggggcatttgttcctttacattaaccacttttcagtgaattggagcctcccttaccaaatttcatttcaggagagcaaatctttcagaagctctttgaaagaatcagattctgtatattgctttttaaattttaactatttttggagatctattcatgttacaagaataagtttaaagtattatatttgcttcatttgttgagaaaattgtcattcttactgatgtcattagtctgtaatcagggaaatgattcgcactctttatttaaagtcttctaattactaacaaatttttaatctttttctacgagtacacattgttcaatttttcattcagtttagattatcagtttgattattagtttttttcttttttattgtggtaaaaatatataacattagatttgccattttcaccattttttaagtgtacagttcagtgtcattaagcatattcacattgttgcacagtcattatcactatccatcctcagagcttttttgttaccccaagctggaagtttctacctattaagtagtaattccctattcccccctccttctgacccctggcaaccactttgttactttctgtctctattaatgtgacttaattaatttgtttctgtaatctttacctcaaaagcacttatccttcaaggaagatttggtttatgggtatcagatttaatttatttaatttattgcacctaaggcacaataaaaaggtaagtaaccttacctgccttgtgtacttttgattatttttaatgtgcaggatttgaacatttggaatatatgaatataacttgtctttaacagaggtgctatgccattgaagaaaaaaaataaagctttgaactttgagttatgagttttactgatattcatctctctcaaatactatataatttcagtttggttttcctcagatcttttacttaccatcttgaatgtttagtctatggctactagaattcaatggaaataatcccttattttcttagaccactaatgccttgatttttgacataaatatgtctcacataccacaaggttgctttaaaattaatttggtaagaattagttattcctaaattgtgccacttggattgtggatacgttgtctgataactaaattattggtacagatggacccttctaaaatagagggaaatggccatctttcttgttgtaagaaagtgatgaatagtactgattagggagtataaaacaattttctgacgtttgacatgggaaagcatggctccggttgaaagtaggttaggttttttctcttacgagtggccataagcttctccagaggcaggtttctagctgcatttgttaatttattttgtaaataacttaatcatatgttgggcataaatagaatttcatcctagtagcaaaagtcctatgattttgctagacagcagcaagattttagccttggatagttagaattaaaggtaaacagagtccattgctttataaggagcacttttacccttttttctccttacatttagcagaccaggagaagaaatgaaagatgaggtgaggaatattttcatgttaaactagctctgcttcgcaacttttattcggcagctttaggacctttttatttagctaatgccctctctgccataattctaggtgataaacatagatgaatacatggataaataattgattttttatagtctgattaataattgcattttgttatcttaacacacaacaattgataatcacaaatgcattcctataacatttctgaagttaaggtgattttattattataaaatgtcatgagtgtgggttttcatttcctcccagattcccctagcacaattttctgttaatcaacaagtactgatataaagataataaaatttatgtcccttgcttttggagaataaacaagctgatggaggcttagacatccactgaaagagtgagcaaataaggctgtaatacagtaacgatgcaatactgcagagtaggtctgtctgacagtttaaatctcatagatattaaccaagagctggcccttggagaataagtggaaacatttgttgccacgtgtcttccaaagaggtgataccaatttgcattgtaggagtgtaaccttaccttatttaaaaactttcgctaatctttcagaaaatcgtgaggtggaatatcatttcatgtattactagctgcttttttctggaggtttgccagttagtatgctttaatgttggcctgtagaggataggatgtttgttggaattgtgttaaaggtatagaaaattagcctttttgtgatagtgtaccatttcagtctaagatcatgttatatctttttatttattcaagtcttattttatatctctcagtaaagttatataactttataggtaacctgtgtttcttgagttcattgagtttttgctgcttttataaatggggccctttgttctgttgtattttgaaaatagttattccagaaagcagttattgctgccatgtaggaaaagctatatatttttgtatattaccttatttctggttatatgtttttgtattataaccagaatctttctgggaaagtatagaatagtgctaaaagaatagaaaaaatgtttatcatgtgactgacagatacaaattttatttcaggaaatggatgacttgactataacgtgtgtgagtgaagtgttacttcatggctgaaaataatacaatacatgcatctctgtgtggaaattcttattattttatcactatttagacattattcaagaagtgctatatgtatatagtacaaggtttagaccacgtgaagtctgtttgctcaaccctgttataattaatgatactgatttatttattattttcaaagtgtaaaaatttcaccttattccccaatttgcttctggtaagaaatcactgtttgttttatagctttccagtctttatgtattaaatcacatcacacacacatgcacacacacacacacacgtgtgtatatgtgtatgtgtatattcttttattaaaattgagtgatttaaagcagaaaatgtagtgattttttaaaaaaacttgccaatgtattgtgtaccttttaaatgtgatttwaaacatcttggcttagtgtctgcrttatattattatggtggtgacatttcatggcttcttatgtttggaacgtgtgagaaataaacaagtgtagtgatattatagtaaaygaattattcgaaaataagatatattgtttaggttttcatacatagcaatcattctaggagccaattagccaaaagtggtctcaaaataatgtatgaaatttatagttccctaagagattttcaccaattaaaagaaattttaacaaaacagatattttacatgtaaaataaaactattaacggagacttgaatatgctcttgctttaaaatctggtgaagaaatataattggccgggcatggtggcttatgcctgtaatcccagtacttygggaggccaaggcgggcggatcacctgaggtcaggagctcaagaccagcgtgcctaacatggtgaaaccccgtctctactgaaaatacaaaaattagctgggcrtggtggtgggtacctgtaatcccagctactggggaggctgagggaggagaattgcttgaacctgggagatggaggttgtagtgagccaagattgcgccactgcactccagtctgggcaacagagagacactctgtctcaaaaaaaaaaataaataaaaaaaataaaaataaaattacagattttgcaataggggacttatgtaaatttgattcatattttcaaagacctttaccatacatactccttatcttttgaaaatatttaactgcgttcaaaatgtggttatgattatataattactgttctctggttcatgtgcttgtgttcatgatttattttcagtatttcattaaacattttgaatactttgggttaagcaccatattaggcactggtactgtcttgggggaagggcagttctttttacagactttacaggttacagactaatgggagagacaaagaagcaaatttcatggattccggggagaaattggtaattttgggcttaggaggaagatgcagagaaatcatggcrgtatgtggtggggcagaccagagaaaaggagtaatttttgggttaagtttacccatatagttgggtagtaggtgcatctcatagggttgagggartaaaagccaaaagtatataaatatttctggttctataaactgcacacagttgagtgtggcaattgaggaaaaattaggcgatagatagcttcctccaatacagcattactacagcagtgtagtaatgacggtagaacaattgttctgtcagaggtagggcaaagttaaaagaataagctggagagcatggtgaaggatgtattacagttttctgataatactttttcatgaaaatttttagtagacctaaatggaaaatatagtgatactagtaggaaaatttatttggtaagatttctctccattaccggcttgactggattgcctctgtgtgcacattatctttagccaaatctcttattatatgttcatgtgcccataaataattaatcacctgtagttatatcactattgtattttatatattttaagatctacattttaacctctctgaaagtggaatatatctactaatctatgctaaattaagagttttactgggccgggcacggtggctcactcctgtaatcccagcactttgggaggccaaggcgggcggatcatgaggtcaggagatygagaccatcctggctaacacggtgaaaccccatctctactaaaaatacaaaaaaaaaattagacttgcgtggtgctgggtgcttgtagtcccagctactcgggaggctgagtcaggagaatggcgtgaactcgggaggcggaccttgcagtgagccaagatggcgccactgcactctagcctgggtgacagagcgatactccatctcggaaaaaaaaaaaaaaaaaaaaaaaaagagttttactgactgtgttatctcgttagtgtaacatcaagtcatattgagtcttacattcaggggcatcttacacttaaaatatggtattaacagtttgctggtggttctctccttttaaaaaattaggtgcacatattttctccttttaaaaattgtaatcattggccaggcacagtggctcatgcctgtaatcccggcattttgggaggctgaggtgggaggatctcttgagcccaggagttcaagaccagcctgggcaacatagtgagatccttaaagttaaaaaaaaaaatagccaggtgtaatggtgcatgcctgtagtcccagctacttgcgaggctgagatgggagatcacctgagcaagcccagaagatcaaggctatagtgagccatgactgcaccactgcactccagcctgggcaacacagcaagaacctgtctyaaaawaawwaataataataataataatttgtagtaatataatgaatatccatgatggtttgtaatggagcatttctgatcattgcgttaatatggattactgggtgtgggatttctagttagcttttaagagtctgaaatgattcacagttggcctctagttgtctttttcttttccacagtttgtttttttttcacctggagaagccagaatcacttgtcatttgtcagttcagttcttagcatgtaagtagtactgtacaatcctaagatcagcaaagaaaattgaggatagactgctaggacaagagggtggaagatatgtttctaggatataaaagtcacctaacaggttatcgggtaatgtgttaaactcatgatttatgtaagaaacaacaggtataagtaaatggcaaggacagaggtgtgggtgttccctctaatgggagagattttttacctaagaaataaatatacactcatttgaactcttcttggattaaaaaagaaaygaaaacaatccgctaatgcctcttatactaattatcttagtattattcactctctcctttaggacttattggaatgttgtatttttatgataatctattattaaacctcctggctggtattaggtaggaaatcctagtagcatatgttgtgttgtataggatatcaccttttagattatcaaaagacaaaattgaaaatctagtttaaagatcttaattgattttactcgccattctagaattgggcaacacttcattttataaggtagaatgagtgttccaatgacccgagaaggggaaattgattttgtagacaagagctaaagaaagcagaaaaaaggaaaaagtggatgaccattkcaaagttactttccttgtaaggtgggaacagggaarcagaacagaagaaaaataactggctaacatcaggttacattttgttgtaaggattaaagatagagggaactttattgtcatgccgattgaaactggtctgtggasttttagaatgtgtgattccatttggtttggtctggtttgtttgggtctaatgcaggaacttagtccaaaactatggcctcctataatttttatttaacaaaattcaggagtgactaatatagggaaatacaatatgtggatgaagagtctagcttttgacaggctttcttagattgggagataatgtctaaacaagtgccttgtctctataactagacaggtaggagaggactcttgagttcgaagtacatttccttaattttttcagcatgttcttgagaccttggttctctgtatttgttactacccagctgaccactagtgtggtcttagccaaaatcagtggcaatgctggttcttgaatgctaagtaaggtattcctcttctagttgacttttttaaaaaatgtggttttagcttkttaggcacaattttgactttggtaagtaacttgtaacctctgtcaagtatatgtgagggaactgaattttctccaatgctccattcctaagaagtggaagggagttttaactggtgatatgtcattgattgaaggatctgcatggtaggcggaacggagcagagcaaggggatgtacagggtactatgggggtggaagtgggtggggagctatttgattcctaactcccagtaggttcctcagtcacagttgtctctttgtatctgagaggtgttggttctaggaacccccatcccctcattgcaaaatccacagatgctcaagtcaagtacagttggccgtccttatgttggggtgtgggacttgcgatatggagcgccaactgcatatcagataattgtagaacttgaggccatccctttaggcatctcttaaattgtttttggtctgaggtccttcaggttcctgaggaaaataggaaaatgtttgctcctgtgacagcgatcgggaaattaaatcaggatttggccaaaatcttaatgggagattaaataactcttagctgtctgcatgtaatatgtgagtccatcattaggaaaaagtatattaatattccagttcccaaacactgctctgagacaattcatcagggaaaacttggctttagtgggactggcaatagtttgcccattcttagttttctcttttacttgaggttcctgtcataaataacatttttaccaataatacttagtttttaaggctagttttagggatacctcttaaatacctcctatgaaactgatcctgactcttttttgtgtgtgtgygtgcttcgccattacttttaaaattatagttctcatgacaatttatttatttataggtttgccttttattctcctttgaataaggtccctctgacctagctatctttgtgtttgtagtgcctagcattttataggtggtcagtaaagaactgagcatctactatatacctatcattatatgaggccctctgagatattaaaataaatgggttcccagtggttggccctttctcacttccaaaagtgtacaaaggtttgttcggtgagtcagtgcattagtgctctatgaatattaattgattgtcttcatgatcccattagggtgaacagaagcatacttttgtcttgaagagcaaaattgctctgaagtgcctagctcggaagacctaggctatctctccaatacgtggaggaaaaggaatcctgaccctctttgcagatgcagttttgaaataggtcaacagcaggctggctccatctgaaactgtcagttcttcattgttgagtttgcatatggaaatttgtctttgctcatccaagctcaggaattattcaagtggatctgtttgcatgaagagaaacttccagaactggaagccttcctatgaaaggcaagaagccacgaataaggcagtggaagccttggggcccatgaaagagctatttcatgcatttatttttaggccccctgaaatgaaggaatgaaatagaaaggctcaggaagccccaacaagtttgtagtttacagtttggctctcaagaagacagcatgcgttctttctgcaaacttttgattttcagttctcatgttttacttttattttgcttacttctttgccttaaacctgctttccagaaataagtcaatggcagaaaggatatgaggtttggcaaagaaagagagcagatagaatacctctagtatttgtagaaaggactgtaccttgttataggctgtgatatggtcacattttatattgcagtaataccagaagcataactcggcatcatgggaactctctgttgcaatggttcagagcatggacattaggtaatttctacttacactttcacataactcagctgttgtatcacatataccatggcattgttatgagttatggaaaataagccattgtgatgcattatttccctgcaaaatatttcatggtctttatccaaatttggttatatatacaaatgaatgttatctgtatgatgtttcaaatgttgatttttattatgtatagaatatttttacttaaaaacaagtattattcacagcatcccaggaaggaaagctaggacagatactatcactcatgtctgattaaggaaacggagtcatgggaaatttttgactcacctgaaatctcaggccaggaaattagtggcaggctggaactagaaaccatagtacccaacttctctaggccttactcctttctcctctgaacagcttgctttgagtcaaatggaaaaggtctcagcttagaactggaccctaatttgataaactagtttttcaggatttgtttagagtaaggaaaggaaatcacccattttccctcttgctataagaaaaaaaagggttgctctagatgtgaagggaggccaacagcagttaacaatataaaaagcaaattaattmgagaaatagttctagtgcttaaaagataccccttcacagtaattgccttggggtacaagtacacagttaacaactttcctaagaaacctgaaagcataaaaagagccaggaaccccctcaacaacaaaaacaaaaacaaaccagccagcaggattatgtcatattagaaacatttaaacttgtaaaggaaaccattttaaatcgttctttccaaattacccactcctctctaattaaagagattcatcatgttgggaatcacataagagaaggaattcaggccctgccagatgagggcagaccaagatctctttaattgagagccttcaaatccaaactgtcatcagttcctgtcaatctcattctttgtaaagtctctcaagagcattcccacagctgctattgtacaccaggccctctatggaaaattccgtgttgaagtttctggagatggaacttcacctctgctgaagttccctccctttctccccttcctctccttctctccttccctccaggtgatttcttatacatggcctcttttctaaatccaactagactatgaagtagaactcccttgttaaacacgaggaaagctccgaggttaaaatgacttgccccgggtcatagctattaaggagtggatttagaatttaaaccaggtcatcttattcacggtcctgtgctcttttcaccttgccatagctatatcttccatcttaactatagtgatcatgtgcagagcaagagatatctgaggtcatctttgaacctaggcttttagggctttataagactacgatcagttggttgagttgttccttgacggggcacagtgtctcactctgcagttcaccagccatgttctatgttatatttctggcttactttcaagaggcatgttagtcagtccgtctgtggttagtgagcatctcttctgtgccaggtattgttttagtcactgagggacagtgctaaacaagacagaacaactcttttcacagaacttacatctcttctcctcactgtagctctttagtgaaagccagaaatgtttataaaggccttagtgtatgcaaagaawgccgtgttaacttcaattaacatatctgagaagagactgcagaggtagaggaataagatgcagcytctcagtgcagccactgccagtccaccgagaatctgtgatcaccaagcasttgcaaaggatctacccaagttcttgtcatgcctgaaacacagcgacactaagccccagggcagggtttaggggacttgttatttcaaggtggctttgtttctcttgatccacctctgataattattgtactttttactttggcagctgtaaatagaggatgaagttgcaaaggctggaacagcgcttcttctgcaacctaattaaaaatgaaatcctaaattgttaaatccagtattggttaatctgtgaaacatacagtcgtagaaaatatttccttctctttaggactttctttgttgcttttatagcagtgttggtcatctcattttagggtagaagtgagcttgcaaaaataactcataccattgggattaggttgataatactgtgcaccctctctgtatctccctggagtataggagaactgtagagccagaaaggtcactagctctagcctttattttatagaagaaactaagtcccagggagaagttgtgtgactcttcctgggccccagagcatataggagaggagggctatttatttatttattaatttaaaattttccctatccagttttgtcatccttctggtcattaggacagtaagctcacataaaggtgataggttgtcagcttcagttttaggtggcagagtttgttttaacttattggggtctactttcaaagatttttagttggggatgtgagagaggctgcatcagagtttgttagtcaaatgccattataaaacagagactccagttgtttcactcctctctctaaaatactactttaaaaaacaaaggrcataagcaacttgtagagtgtgttgccttacaaagaaagaaaaaagagccttgaaatttccaatcatgacaaatagagcaaaccttaaagtcaacactttttcatttttgttccagttttctcctggcaaatagaagaatttaataagaaaggaacccatggttccaaaacaaatagggtctaagtccaagacatctaaagcttgtgtggaatccctccgacattcatcccactgggccccagagaagggaggagacaaaagtccrtatccctgttctagtcagagttggttcaattaaaggtgaaactgtctgtcaaactatttatagcatgtttatagcatggtggaaaaaacaaaagaccataggttttaaagcctggcctttattcacagatggaaaagacttgtttgttttaaaggatagattccttaacgtatgctatggttattgatataaatttaaatcaggacattttagctagttgataattttctagattgtaatcattcttaacaatttctatttaatattgagaattcaatgaaaatgtcagtctttaggatgaatactccacttaagatggacttcaagggattcaagataaaatactgtcttcaaatgtaaaaagtttttcattttaaatccttagaaggttggttttcattggcatttccaaggaatctcaaccaggtaccatatgatttatagagcctctggtgtaattttataagcttttgtttggtttctgatttataattgtatgtattaccatttatttttgaattaagttgacattacttatttgttttaaggatataaattttttggcagtattttacaagtgactgatataacttaaatttacacactgtaatgaacagggaacatgtggataaggcatgctgaaatctatgagatacctttgttagacagtatatttaactcccgattaaagtgaagttgctgtctcagggtctctgtatacaagtatttctctgatttgggtcactctaacttgcttaaaaaacaaacctgctgacctgctttgagtcttgtaggaagatggcacaaaatctgaagagtgtatgcattgctcaagtactatttctcctcctgtttcattaaccatatttatcacatggcattttatctagaaatatcttcaccaaatagagtttgaggtttactgtgaacyatgattgcgtgactgcactccagcctgggtgacagaatgtgaccctatctcttaaaaaaaaatacacaaaaaaaacagcgcattaatgttgagacaataattttcctgtttttgaatcaaataaataagtttggaataactgggaaaacttttaggtagcattatcatatttgctatttagaaaaacatgtatcagtgaaacgcatagtttgtttcagtaggacaattttgttgctaactgaaataacacactgaccaatagctttactgatattctcccttcaacctattgaaatgaaatattgtgtgtattttggaggaggactcaactttggtgtgtaaaaagctcttgtatttaaattgtgccaaatcctggtatagctaggtaatgtaaatcagtgtaatggaagtcaaatgtgatttttcccataaaaccaatgtgagaatgaggagcttccattcctgacccggggacctgaaccaggttttgttttgttttaaacaaatgcaccaaataccatatttaatcagctataaataatatatttctgatcctgttgaattgtccttcatatatacatgacttatttcaatacagctgcctaatagtagacagttgtatgaaactttatatgttaacaaaattttaaatatttcttaactgaagctgatttatgccttctttttcatgcagcagatcagaatttgaaattataccattaagataaagtgcaggacagcttccaagaggggagatttgatgggtatctttgtgaaaagttgttaagagttaggggatgggataagtctttttaggtgaattattgagagatacctgtttggctaccctctttcacattgtagaaatttactgcagaaagcacagtcgttaacagtcaagtggctgacatttctgctgtatttgagtttcctactagagctgccatcccatcacaaataacttcaccttgagcctttaaagttgtataaatcacactgacctttaaaatgcatgaatcaactcttaagccaatggatttttcattcattcattcagttcccaccccccggccatttctcatgccattactttatagtgtcaagtagccttaaagctttggcttgatgggttggtgtactaggctgacagctctttgttggattcatagcattaagttactctagtttactcctggatgtggacatatgtaataaagtcctccaatatttagaacactactcccttttacctgttagctatttaaaaatattcaagtcttgatgagatttggaatagatatattaaaacatattttttgcaaaagagtgtgtttctttcaagtgctttctgtggatgctgtcttcaaaaccagcttagtagctgtgggagaaaattgccctcattacattatagtcataggatgccctttggtctgcttttttttcccctcgttggtcaaactgcttatagggcactattttcttaagcaaatagctagatcagagagggggctgtatgtgggaaaaaacaaattaggatggaatacaagggtgtctctcagggtctccgccgaatgaaggcagagtcttttggtggtagaccgagccttgtagtatatggatgaggagactcgtgtataggaacagaatgacaagatagggtaggtccatttatattaacagcaataccttgagagtaattggcttcacataatgaatattaattgtgggtcagctagtcattgaaaatgtaagtattcatagttgcatttgaacattaatatctacacaagctaatttccagggtgttctgtttagatcataacagatataaactctttcatcacttcaaatcttctccaattttctttacacatttcttattataaaaatttctatgtggttttaagccaaaattactgaagaatcttttgttcaaatcagtccaataattagagtgttatagaaatggtgtcgagggcttcagaaagataaatcataagtttaggagccaagagaccgaaaaagacactcccagccgacacttggaaatcaaaagcagctgcagcaaggtcagtgtcctgagtatcgagaggctggttatattatcatcgtttaagggaatcaactttattccaagtctgtaggcatttgatacttctattgggcatcawctctggccttctaggaacagacatgaagcaagagtgtggtagaataaattctatttgtgcagtgactagaaagtacagtagtaatttacaagttgcataataattatttatgtattgtacttcattgttgtatatgagccaggctttgagtccattattgtgaagcagtctgcagctactttgtttttttagtttattagcatagttagtttttttgttgtcttttgcttttttttaaatggttttcatagcagtgacattatgagattactatgttcttgacagttcttatgggaaawgtttgagtattatctggtggattaagcttgaatattggacccagtcctattctttaccaaccaatgaaaagcaactgttgtttagcctctgatgtttagaaaattccttccctgactgtgtctatgtcttcctggcagtgattgcttgaacagtaaacagacgtacctctagtgttgttatcacattaaggatcataattttactcttgaacattttattttgttgttgttctttgtttttaaaattacatttggtgaaactcaacattattaacaatttttgtattattaaaataatgttatacagaaaaggaaatttttaggggatgattgtacatcatgctcctttaaaaaagtgttttagaaaacgatgtaattattcagatgagagaagtaactttaaccatttggtggacgaaaaaatagcagtgtaactgaagcaataagaaaaagtgatttgcaaagagaaaacatctttgctttgactacgtgagtatatgagaagatctctagtgcagtggatgtcaaacttgagcaagcatcggaatctcctggaagatttaggagaacagattgctacggactaccccagagtttctgatttaagagatctagagtagagaccaaaaactggtatttctaaaaagtctttcaggtgatgctggtgttactgatcctgagaccactgttctaggtgtaattaaactaatggactcttagctaagaaactttcttttcttttttttttttgttagcatagtgctagtaaaaagaaataaatggaaagaatagcagttgaagtttctttgggagtgtggccaacttttgaatgactaggagaggattgaattgcaattacattgctgaactaatatgattaaagaaaggatatggtttagaagttaagatatttctaaatttggtttgcttggtatttgtattagcacttatagcttatgaaaagctttttctttggttgttaacaagaactgtttcttcaaaaacatgcaggggcttatatatatttttctttatagttggtttaagcccatctgaagtttgttcaatctagggtgttcaactactgctgctaaagacttggcaccttcacttgtttaatgcccaacccccagtggtaggggtgggcagtacttgaaattcttaactgggatctaaaatgcttggacagaaaatgcctaactatgatccttttgaggataagcccttatttcattcatgcttgcattcttagtcctggtgtataataaatgtgcsatgtttgggaaaggaataagtgaatggccggcaacacatatgttgaaaataggtgatggcagtggcattgagggttggaaccatctcagaatataaacctatcccaggaaatacatggtaacttgaaaaatttgcatactagtttattaatatagtttctgttatgtcagtaaatttaaggcaaatgaaaatcctaataggattaaataatatctgggttttaacataaaaacaaatccctaaaaacatattttgatagctataacacattatctaaatgaagctagaattaaagccatggagagataataagagcattaaactaaaacatgaagttcaagtaaaccatatttgtaaaagaacttccaaatttatgtcatttatttcaccttaacagtttaacagtattatgctattctaataatatattcttttaggatcttcattttccttgctatttcttagctaagaaacagctgtgttgctgtgttggtggtaaaagtgtattatccacatcctactagagttttctatccaaaaaaaaaaaaaatggtaggtgacatccttaggggcagaattatgtctcagtatttctaacacctatctcttggttagtcagaagttttggctcagtggcaccttctctttgtccccatttagtggaagtaagcgtaactgttggcaaaatatgttttaagacgaatgtttggcaggcatttagyatttacaaatcaagtttctcataaaataatgtgttacattgaatttgcacagccatgctttcattgttttatggataggagaatctgagatagagagaagttaaataacctacctaaagttaattactacagctaggaaatgtcagagcagcaaagaacacagtttagctggctctaaatctggtatctttataaacttgtttcttgtgtgattttcataggaaaaggtgtagaatggaaagtacgcataggtggaagacctagacctcagtcctccttgactttctgaatatttcaaattccagagaccttgcatttctccgaattcctcttaatttcactcaacaycgcattactgttttaaagatttttcttattattacaagtaataatttttgtttttgtagaaaaatgagaagatccaaataagcaaaaagaaaaaaatacttytcatataagcatccagcacaaagtgctacacagaagcctttaataaatatctattgattgaatgctaggaattaactcactgacctctgagtaaattgcttaagttgtcatattccatctttaaaaaagggtggctggcagagctcttgagctacttatttccttatgttatagatttatgtgacatcagtgatctttcagggacgtgatgaaaggtgttaaataaatcatacctttattgttatctccaaggaagaaattatttgaaattggctgtctttaaatgtctcactgctttttgttgcaagtaggaaagaaaatgacttatttgcaatgtttgatatgtgtttatttagaagggggtatgtgtgagagcaaatgcatgtatttatacataaagcatcattttaaaatattaaaattttcttcctgtggtgttaagtactattgttcagtttattactccctccctaccctcctttgtacctttggtttagggtagaagctaaacaatagtacttgacatcccaggaagaaactagagtcagatggatttggaatttatctaccagcatttcttgatgaaaacagaaaaacaaggaaaaggaattgataaggtaggtaaagcttattcagtttcttggtagtctttctggttgattgtatttactcctgggcatggcattgacataggtatactaattcacatgatttacttagttcattagctgatatcagcatcattgtccaaaaacgttgctatttaggagggaaaattaaattagatagtgggttttcaacatacgaaatgacaacacacagggagagcaattttttttaataaaacacaaatgaacctgttgtctgatgagaaatttaaataaaccaggcttctcaagatgggattataatgcctcccaaatatttgctactaacgtgataaacatttttttctattcttttagcactattctatactttccacattttcctagagccaagtttgtatttccattttgaaggtagtatgtgtacacagcgagaagtatatgttcatcttttagttaaataccctgttagaagagattgaaactggtgactggacattcaagtcaacaaaaaataatacttgggaaacaaattgctgtttttttcttcataaaatttcttttctttttatataaataaattagactataatagaattctacacaaaattaactggaaggcttttaccaaaattcatacttctgttaatatttgacattttatagttctagaatttatttttaaattacaatatgacagcaagattttaatctgtgttgtacctaagttccagtcgattcaaaataggaatggttccctgtgaatattatttgggacttagctcaccttcattcagttttataatttatcttttaaaacagactcagtgaaagttattatggtcactctttaggaagagagattttttttttttttttcctgattgcaccgaattagtgaacactagctagttcttcaagttaggctctcagttattctcttgtttgacctttgtctgtaacatttggtttgagttgtgttcttctctttgactttaagattcaactactggcagaagccttaatctttctattgagctgtttcatctccttgaatagggcataaacctattcatcaacctatctttcatatgggcacgctgttctggaatactattaagattgactgcatagtggcagggtgcattctatttaaaaagcaatgtaatatgcttcaatgtgattaagaacaagggtgttacaagtgcaatatatagaaaaatcataacattcaagagctttttacataacgtgctatgcctaatgtgcaaacagttgatttaattttctattttaccattttaaaggcatgatatttctcataaatgctgccaggtatgttctgttgtttcatttcttaatactggagttcatatgccactctaactaaattataccaagttcctgaggaatcaaattgctggtttgatttatacatgtaaaacagggttttacttgacacatttaaggtgactcccaagtaagaatggaaacaatgaaaatctaatttattttttattgcacgggggcaatatttagtattcctttatatttagtatttcctgttttatttagtattcctttatttaatggtctaataaaaaatatagttgttctctctttaagaaaaatggctttaccaaatatatttaaaacaattcaagtgtgattttaaatcccttcgtttttgttgtttgtttgcttgttttgtctcagtttcctgatcgtgttaacagcagatgtggtgtttagctgataaatgttttatgcttaaacaaagataatgaaaaaatgcatttgctttcaagttagagtagaagtaacatatatgacgtcggtcctttgaatgttaggattttagatgtggaagcagcctctgaaatggaagctggcttcttatgtgacagaggagggctagagtaagtggttaaaggacaaatggctagtttgtgatagaaatggagccagaaccaggtcccctgattccccattaatttttcttttactgcatcacaggactcaaactcagattacatttccattttctactcatttgtttattgcagtatttcagtgttcctgctttagtacataacctcggaagccttacttaaagctttttcacaatatgtgctcacttgggcttcacgagtttctaggtgggctgattagtgtggcctcactgctaatagtacctttagtggtggattgagctaaaagaactccaagtgaggaacattttcttttttcacatatccctgtcaaggagctatgacagcaaaaataaaaacaaatttaggaatatttaattatactgatggcaaatatatgtatttcactgtttgggggaagaagtccaaaaaattctctaatatttatggcttgcatttgactactattagataactgagtgatttctagttttcagaaagtgttttaaaagttaagggactatctcatgctttctagcatggataacctcttacagtttataggagctatatgaagtaggcaatagcattagcttcactttgtaaatgagggaactgaacataatatgtccaagatgggatctgaacctaaggatctttctcaaaggctctggctctcgaccactaaacttctctgtctccacgttatacatacctgcctcttccgcaaaatgctgcctgttgctaaattaaagttttcaatgagcccttgatttaagtgaggaaaacacctgccaattattacagtaagcttcagcagcatacatgataattcctacttttgtatttgaggtacagtcataatttctgacagcatcttaaccttcagcctcctttttcctcctctttcttcgtatttagtcttcattttctgtattctctgttctctttgtttatttggggcaataggcaatatgctttgcgcattatttggttacctttgcttctattctcaaaatagcgattttttattactcctaaataagattaaatctgctcatcgacttttattttttattttgttattttattttttgagatggagtgccactctgtcgccaggctggagtgcaatggcatgatctcggctcacagcagcctccgcctcccgagttcaagcgattctcctgcgtcagcctcctgagtagctgggactacaggcgcgtgccaccacacccagctaatttttgtatttttagtagagacggggtttcaccacgttggccaggatgttctccttctcttgacctcgtgatccacctacctcagcctcccaaagtgctgggattacaggcatgagtcactgagcctggcctgaacttttaaaatcttaagcagggcatggtggtgcagcctgtagtcccagctagttgataggctgaggcgagaggatcacttgacgccaggagttcaagtccaacctagacaacatagtgagagcttgtctcaattgaaaaaaaaaaactctttgccaatatccggttctctctctctttttgttttttaacctccctcttattttcatagtgtctctagtttgaaaagaactgttaagaaatacctaattcagttgctctactgtggaatgtttcatatatactctagcttgtattataacctacttataccaagcttttctagaatcattactgctcattagaattttattttcttcttccttttgacagtcatacctgcttcctttaaaacaaactaatattaagccccagtgactgactctgtctctgcttctccctggtttgttccctaagcatttcagtttgtgagcaacctcctataacactgactactagtagtttttatgtttgttttgatttctctttcatttatgtttgtgctcttatatttgtccccctacttagtaattcctgcaattcagagaccatgagagatactatgcaattagtaccacatttgataatcagaaggtattttgtaaaagttgacctgcagagttgaataaaagctgttctttatcctgttatctatttagcccaaagacatgccagagttacaaacctgagagatctgtgtgtttctcacttctatagtcagggtagggagaaaacagtaaactgatactatgtttgataggagcaagcaaaaaaaccccatactctgtaaaagtaggtttacttaaatgatatagctaaaacttcataatgtaaatgcgtttgaacagtggtttcagattttgttttagccatggctttttttcacataatgttaaggggacactaacactgtgcaggttaagtctccctaacttgaaaatcggaaatccaaaatggctcaaaaatctgaaacttttgaatgccaatatgacactcaaaggaaataatcactggagcattttggattgggatttttggatttaaaatctgaaccttaagtataggcaaatattccaaaatcctaaaaaatctaaaatccaaaatcaacctctgatcccaagcattttggataggagatattcaacctgtatctaaaactaggatgagtccttccactgttcagtttttcattgtttgggacaaataccctttttgtagaatcacttaaacagcttgcaaggatgtagggtttcctggaacacagtttggaaatccttgcttgagaaaagtggagaaactggattttccctggtttcttgaagaagattgaaagattgtcagcctaaacagaaactgtactcctatatgtaccctgtataaactgtcgtcatcatattaacatcaccctcattcagtctttgtttttaatgtttaatggagtttaaatcaattaggatatttaggataggctaccactatgccaaatgccatgcaggggggaaaaagaagtagagctcacaagatgctgaaaagaaatcttgttcttaatccttcctctgaagttaggacaattttggatcctgtcctggaaaagggaataaagcaaaaattaatattgagccatcacgttttggtgtttctgtcgagttaggttctgatggtctcctaggctattttttaaaactcagaaatgggttttaattttgatttattatatttgattattttataacacattgccatttctatcaccctactgcaattgataactgttgtgtgtaacacaattttgttgtcctctgcatttggagaaaaagggtcagaataaaaaatgaaatttcatgttaggtaagagaatatgggtgtagcgtatttaaaagtaactctcatacagtgcatttattaaaagaacaacacccatctatttcagttgaaaattatccttttaaggtgaatatacgtttgagaaaattagaactactgtatattaataatttgaacattatctctttttgtacttttcccctttctctcctgaaccatgtaatttttttcctgcaacactatttccctcccttgtgtagatagcttttcacctgttatctttccttttcttaaattgcactcaaaatctgctgcttttttatgctttggtattccttagtccacattcattgtgtttaggaactctgaaatttcaagggacagattgaaaaagaaaaaataggttatataaattcccaagaattatgtctacttataaaatctttataatgtagagtcattataagctcttgggggtttatagctttaggagaatttaagatatgagaaacgagattatcatgaaattataagagccagacctgtgtgggttattacatggtgaattcatggaagagaagcccaagtaggaaatgtttaggaaggaagaaatggctttcacctcagttatacaggaagaaatcaggtaaggggctaagtagtgctggaggtgaatataaggacaggctttagattgtttgcacatcttcctctgtaaccaatataaatgtcattttttcctgccaggccaacacataccctccccgctttttttctttctttcaggtctcaacttaaatgccacttccttaaagagggactatgattctaaaataaaaaagagctcctattctttaagtctgttttattatcataacacttttattattctatactgttatttttatgtagcacttgtcactcagtactttctcagtattttatatatgcatgttgtctttctctccacttcctccctttgtctcccaacagtggatataagtttattaagtgcaggggacctgtcaattacgtttattgctctatccacagtccctagaatagaacttntacttagcaggcaacggtctctggttagactgagcaggactcgtcttatctttgtagccttaagattttgtagtgcttgttgaatttaattaatttggctattattattgagaagaaatgcgttaatattaatgaaaagtataattttataaattaacacattaaaattctttttttttttctaaataaaaaacagttccagttttagcaatggctcggccagaagtagtacatggaagcctgggtaaaattttgatgccagagggctgtcccaaggtttgttttttctgctacctacagaaatcaaaaggcgattgttttaggaagtgatactcttcaatggttttttatatattttattttaaaaagccaccaagaagaactggggtttcagatgaccaacttttatgatgtagtagtacacactgaaatgaaaatgttcccaccaaatatgggaacagttcttagttactttcctagaagatcattttctgtgtagctagtgttgcttttccagatggactttctgaaatatgaatattttgcccaaggtttaactttaagaaaatgataataattcttggaatacaagtctcaagatttttccatttgtattattttcaataaaaaattaggtctgtttctaggttgaaccttctctgaagatacagtttttctatttcccatcatattagcctggacatctgtgtccactaggctaatcatttgaaacaattctgtatactgagttacattgaaggaacttgggggaagttgctaggagaagcactatcaattttagtgaaagatgtaagcctgagaaattatatttagtatttcctagcaattaataatattacctagttttgggaaacttctgaattttgctggcttatttgttatacgttccttgaagaaatgattgtgaaagcagtcctgttttaacatagctgttatattccctcaagatgaaatgtattgacttaacctcagctacatgggctttgctaactctaatgactaaactccttagaaagctgaaaatgttgtgcgtatgttaaagaaaatttctcctcccccccacccccttgaaagagaagccagggatatactgaatacataagtaaacattccaagttactaacaagtgaagtaatttttatgtatcatcattaagatttttgcaatatagccaatttggagtctcaaattcttattccaaatctaggggttctctgtaacatttcaaattcaataatccctcctttacgagtgcaatccatttttcccctcatggacttttgacatgaatttctgagtgtgtgtagcatgacgttctctatacaaatgtaaactttatttgtattgtctgttgtttcattgttttcagtgtttctgcttataccgactgtctcattatattgaattttactctcctgatgcctttgttcacactttctgcttgctgcccaggccttgtatactttatcctcaactgtcagtcttactctatcccttcttttaaaactcatgctaaagttatgtttcacaaatttactcaatttcataaatgatggtctgggataaggaacgagaggaggtgtgggaaacagcattagcttttggaaagctctgaattaagtagggatgaggatgggacttgatggtagcagatgtattaggattagctaatatgatgcaatgagaaaaaggtagaagagagaaatgaccattttttgttttgagtattggcagaaggctctccagaggtggtgctattgagtcaggccttgagtggtgagtccagaggaggtggacaggtggtctgcatcttctccgctaactgtatctagtttgtgtctttaaaactttatgaacgttaattagacagttatattgggtggctacagttccttattgtataggaagcaattaggtttttagaattgcatttgaattttttaaaagatccaaaaggtgagaacaactcaacatacaactcaatgtatttgttgatgttatctttaattcttgttcaaggaaatggaggaaataaaacacaaaagagggaaaactttttaaaattttgttctttaggaataatctgttttgaagtgggatgaataaaatcaatggtgaatctttttgtgtgtgcttttaaaaataaaaacaaaactcaactgttgatttttgttttcaaaatgtcttgactgtaaagccttgtagtggtaggtgcggtaagctaccctctgatgctcagactttcagacgctggctctagacttccagatgcttgtgcagaacagtttgggtgcggagagatgggctgaacaggatcttgtttgccccattcctggaggctctgatgtggtagaagtgaagcaggaagtgagggagtccaaaatactaaagctggaagggacatttggcacaaagcagtagtaataaccagtctatatatagagagagtttgatgtgtttccttcctgaagggctctctgcacagtaaataaagtaaagccaataattatcaatgggcaactgggccatgttcttaacaaaagtattcagatggccataaatcatrgcatcaaaacaaatagggtaaagggatgctctggagaggaatctaccagctgttttcctgaggtttcgggaaaaaactgttgcctaataatacttctaaagtttaaatgaaggtcttatggagttggcagcgttttttcttttggtgctaaaaaaatagttcctattaattacatttatttattgaatatatataagtaatttattatataagcacaaatatatttattcatttacagagcatttatttctctgtaccaagcatagctcttcgtcaaatcttttacttctaaacgagaatattaaaattttcagtaaggacttttaataagtaagggtttgacttatttctaactaattaaaagtccttgcttattgcaaatttgccagatcattttcttttccccctttccatgtgtttttcttccttgtgtacatgttttccaactaaaaattaaataggttattggtcaatgtatggttagcatcatactacatattatatatttgaatctatattgtgtctgttattttgaaaagacatttcagggaaaaatgcaattaaacccaattacacttctttttaaacaaacaaaaactttggtctgtttctctcaggcatgaattttcattatagtatcctaatagaccttacatggtacatgggattaattagacaaagagagttttgaaaacctctcccaattagagtcttggagtacatgggtagtaatgtgtggatggagaggagaaggggagcggttatttacggctgttgaatattagtttcaaaatggccttagagatcttctggcccagttgattaactcaattgcttaacatgtggtgctctcagaactaggaccagttccacagtactcaagaaaaatttcctctgtggcaacacttttctatcacctgtgccaattttttaaaagctttaaaagtttatgttgattgtagcgagtttggagaagaatttgatkggttactgtcaactcaccacttcttttggaaaaacaacttctttggcagtggtaaatcagtgaagggtagcatgagtcttttaaaagttaaatttgacaaacatttgttgggtacatattatttggctcaatggtagtgtcaggccttgcaaagatgaataattattgtggttgctgactttgaagggggtctgtctagtggaggagtctgagagggaaatgacttaccttctgacctgttcattgcaacaagattatggaagagagccaagggagatgttctgaaagagctaacatctgggctggatatttacagatgaaaaaagcttttaatgattttgcctgaattaatatgtgagaatgcatatgcatataatagaacatgagaatttaaaaagtaaatgttaattatcccattttattgtcacctaaagattttaatggctttctaaaggtgaatattcattcagtagcttctgaaacttggccttttatgacatagagcttaaggatgatctgattcttgaacaatcaagaggaagaattagtttcagggtttagaatgcttagctatcataaacttgatgcagtgagagaagagactctcaatgaagaagtgttgcaagtgacagaaggtgatccctcccaaacatggttctacttgtttaaaaaagaattgctttatatctaatgtagtatccctactggctaaaatgtttctaagttttaacctctgtttcttttgaactaagaaactcatactaattctgatcataaaatacccaaataaataaacaacttcccctaatttgactttcttcagattagaactgtaagttttttatttacatggctactgattttctagcctgtttattgtgtgtaaaaagttcctgttgtttgcttctaattaagaactcaggggtttacagacattgttcattgttattgatgaaattgttgcatttaaaaataattatatgaattggtaaacagtttcttataaaatcacacttctatacaatattagtacgtagcaagtcatttcctttaaagggtggggaaaaaaaaatccaaagatattcaacgataagatgtgctcattaacagctgtttctgttaataggagcaatttgcattcagaatagagaaaatgaattatactaaagggtatatagaggatcaggtataacttctctggcatgtgcagcagcccacaaaataaactaccttccaatgacattggcatgattaatcccaagcaacctgacactgaaattgctgttctgaaaaggggctttgcagcctggaagtgtcataagcgtaacactagccttcttgctaaggtggggtgggggctgctcaatgcgtttagtgagactctctcacttgtctccagtgttcacaatatttgaatattcatgatcggttgacaggtggtcagtgaatgcaagactgaagccactctggatcttttcacgttttcgtttttctattagagaaacttataaggtcatgtgagatgtctcattcttgatttacttcttcggatgtcagtttggggcaattttcctaaggtgggcttcagtttacctttttgtaaccatatttctgcttgtggaatgtctaaccaatttccaggtacattatcaacatcatttctgtaataaaaatgcctcgcgcttctgtttccttacatatagtctccttgtatgtcgatggctgtgccttcagttgtgtagatggtgtttcctcttctttaaagggagagaaaatgtaggctgtctagagaatattcaatccagggctgtggacctgagtcttctgacccaaatctagggctcttgcttgctgcatcctgtttattttcatccaaaaggctacatggcaattgggtgttttatgtttagatttcctccctggcttcagtcacttactgagaacttatgcgccaggccstgtgctgcatcttttacacacatcactgtgcttacccattcaggatgctttaacaaagtaccatccactggatggcttataaacaacacaaatggatttctcacagttctggagactgaaagtcccagatcagagtgccagcatggtgggattctggtgggggccctcctcagagttgcagactgctatcttctcaccatgtcctcacatagaggaaggggcaagagagctctctagggtgctaatcccattcatgaggtttccaccttcatgacctaatcaccttcaaaagttcctacctcctgataggatttcagtttacgaggtttaggggaatacaaacattcagttcgtaacggtcaccttgtttagtcttcagattgtctagaagaggaacccagagatctaagatgaaataattttgcagaggtagctcgcctagtctgaggaggatcatggattggtacccaagtattctgggctgctgtcgcctgagcccttgacactctatcttcttgaggtgaatgtgcttcctgtccttgagaagtgaaaggaaattagcagacaagatccttcaaaatatggtcataaggaactctgttcagtgtcaaggtactgattcaggcagttaactttttgggaggataaaaggaaaagagatggtaatgctttgtggtctagaaagatcttgtgaagaaagtagaatttgaacttgcagaggatactaagagtagcttcaaggtgtggtggaagggatagaaggaggaccaggcactggtgggaaatgctgggcacatttgggggaaatgcattggaatgaagcagaggggttttggtaggtgacaaaaggacaggtaaactggggctgctgaagaggactcagggcatcagtgtgtgtggccttgatatttggcatgtacatgtttactttgtgataccaccaaaatgcagtcttaactagaatggtttcagttggcttgtgactgattttcgtttaattgaaattttagtggaatgaaatcctgtttggcttcttagggtctctcattccccaagagcttgcctaatagtcttgcttccttttaactccatgagaaataaaagccttattgtttcttatgtattcttatgatgtgattagatcttaagtgtttacatgtatattggtattttagtaaacattccttttgggtgggtgaaggagggaggttatgcatcattgagaaactctgggtttgggattttctaaggaaagaggatggcatagaagtcaggacatctctaggccaggcatggtgggtcatgcctgtaatccctacactttgggaggctgaggcggacagatcacctgaggtcgggagttcaagaccagcatgaccaacatggagaaaccccatctctactaaaaatacaaaattagcctggtgtggtgacgcatgcctgtaatcccagctaactcgggaggctgaggcaggagaattgcttgaaccagggaggcggaggttgtggtgagccaagatcacaccattgcactccagcctgggcaacaagagtgaaactccgtctcaaaaaaaaaaaaaaaaaaaaaaaaaaagatgtccttgtcaggacatctcagacaagtcagaagttaaggtggggagtgatttgcatcaaagactagatgcagataatactcttgttaggaagcttacagttcttttcaaactttgggtcatagggagcaatcatcagtttccctaaagcttttgggcagggtaataacaagtgaagttcactcattaataatcatggttgactgtgatgagctattctccaccaagatttgaataaatgacttacatatctgctttacataagagcaattattgttatagtttctggagaagaaataaaggatagatcggagactcaactgggagtttggcaaggggctatgaaaattgcgtgtgatctagatggtagartgggatttttttttttaaaagaagaatgtctttttgtctattattctcatcttacctattttcttttttaatgttgcagtgtgcaaagatccaccttacaaagtagaagaatctgggtatgctggtttcattttgccaattgaagtttattttaaaaacaaggtatgtaatctttacccattaatctttcagtagacgatccaccattagccaaatgatgtttaaaataattttgactcataagcacttctgtcactagatgattttaaaataaaagttaaatttgtcttctaggaattttggctatcattacccttaattatcaaggaagtggctagaagaagataattttaattatatgaagtcagattatgtgaaattcattaagtgttcctttaaagagaggagtgattaccattttggaaaagataaatatgtttgtaaaatagaaaagaagaattatagtttttcagtaaaatgcttcttttctcattttcatgtctgtagaatttttttgaggcttgcaaagaatactctcattttatctttagctggtacccacaccatacatgtatatagttatttcaacttcagatatatggattttactggatttaaaagttttcaggcctggcgcggtggctcacacctgtaatcccagcactttgggaggccgaggcgggcggatcacttgaggtcaggagttcgagaccagcctggccaacatggtgaaacctcgtctctactaaaaatacaaaaattagccgagtatggtggtggatgcctgtaattacagctacataggaggctgaggcaagagaatcacttgaacctgggagacggagatggcagtgagccgagatcgcactactgcattccagcctgggtgacagagtgaggctccattatttttctcaaaaaaaaaaaaaaaaaaaaaagtttttagcagtacatatgtggcataacacacagactgtataataccagacaaattggtcaacctctgtggggcttactttccttatttatgaaatgaggagataagagtacttacctcataaggtggttagtaggattagataaaataaacttatgcaaagtacttagaatagtaacttatagataagcacttcaaaatgctaattattatatcatattccttatttttcctccagagatatcataatttctaaaacctgctgaaaagtcaggtaattggctttttttttcttttaaggaactacgcaaatagaatgtcatgttatccaaaccagtgctcagtaaaatatggttctttggatagcattagcattaccctaagggcaggttagaaatgagattctcaaattctacccagatgtatcaaatcagaatctctggaggcagggcctaggaatctgcatatttgctagtccttctgatgctcagtaagtaagagaaccactgataagccactccttaatgtgcaatcccttccactggaacagtgtcacactggcctttttaacttatagcagtctcagtcctcaattcagcagttagaaagtgttaaaaccagattcgtgatctaggtctttctctccattggctatgctcctaatttctgtgccttctagcaacaactctttgctagaataatgattatctttcttagtggtgataccactgaatcgttgacatatttgtcatcaaatcaaatttgtcgagatgtatttatgtctgttgacgtgatatactttcatattgaagtgctcatttttctcatttcaagttcaatttcccttaagaaaatggtttttggctttcttttatttcttctgtttttccttcactaccaatttctccaatacttgttacttgttattttctattatagtcatcctagtagatgtgaagtatacctcattttggttttatgtgcatttctttgatgatttatgagtttgaacatcttttcatgtgctcgttgttcatttgtattttttttggagaagtgactgttcatatctcattttgctcacttttcagtgtatttttaatttaagtggtatgtttgtgggaaggaatttagagcctgtctctatctcccatattccccactacccttttaatatcttagaagtttaagtgatgaagatcatatggtgcttttcttccctcttgtcacatcctcatagccagtgttttaatttcatctagggatcgggctacaccataggaataatctagcccttcaagccagcaaagttcttaactcaaagaaattaaagaataggcaattatgatctcttatgagaagaccataatggttatgattatatcactgtcttcccaccagcaaagttagtttgacattgcattgacttcagttttgaaataatgatgcaatgaagtatcttctctcttttcttgtttttaactcttctggtcatttgtacaagctcggagttgaacagaggaatctgttttatgaattgctcagtttcctgctttacaaaaataactggaatttccccatatgccagatttaagaagaaaacaagtaaaggatgaagaggcagcaagtatcactccctaccatacgcgcacgcacacacacgcatgcgtgtgcacacacacacacacacacacacttcagtcttcttgaaattcatggaacagagtaaaagcaagatataatgaaggcacattgggtagtcattatgactgtaaaacatatattcattttgtgagggattttattttcttaaaatataaaggaagaaagcagcatatgagatgaaaaacatctcttcctttgtggccattataaaatagacacatttggaacatcgtagattttctgtttagtatatagattagcttatttctattttctagttttaggctttctttaaaatttcatacataataatgattgctgttttcacatgtacacaataatacatatatatttcagtgtttgtaatatagaaaagtaggatacacctaattggccctatgtagagatgtggattaataaatggtaattatgtaatccatagaattctgtacagtacttaatgtggcaacatgagtaaatctcaaaaaatgatgacttaaaagttgcagaaatatatgtgcatggttatatcatttgtgtattttttaaagaaattattgaaatgagtaatggtgttctggagaggtatgtatttagtataagagcatatgttggaatgacaacacaggaacttaagggcattagttactggaggagaggaatgaagaagcttacatatataaagttggttttgttttgttttggtggggtttcactctgtcacccaggctggagtacagtggcgcagtctcagctcactgcagcctccacttcctgagatcaagtgatccttccacctcagcttcccaagtagctgggaccacaggcatgcaccaccacggacccggctaatttttgtaatttttgtagagacagggtttcaccatgttgcccaggatgatttcgagctcctgggctcaagtgatctgcccacctctgcctcccaaagtgctaggattacaggtgtgagccaccccaactggccaaattttatttctttaaaagataaagcatatctctggaagtgttatctgtttaatctcagtagaaggcacatggatatagcatttttaagtacttttctatatgttactaatttcttaattaaaaaaggaattattgctttgccacttttttgttttcttaggatgtcttagaaaccaaatatttgctatagtctgatctaggtctctgagctaggtatatttgtttctttattttttctaatttaacttgtaagagcacctaatgtgagatatagtttcttaacaaattttaagtgtattaagtgtacaataccttattgttgactatagttgcaatgcacagcagatctctagagcttattcatcttacttaattgaaacttaatgcctattgattgacaattcattttcctctctccccagcccatggtaaccaccgttccagtctctgattttatgaatttaaaatcttacatgatatctgttttagatatctcatgtaagtggacttagacagtactcatctttctgagtctggcttattccccaaggtccagctggatatattttttatttttcatgttactgaaatgatccattggtaaaaatttaataggtctaggctcttgcttcagagtgttcatttctttcttttgcgtatttattattttatttatccctggagtttatacaactctgtcttgaagaataaacatccattatagtaatggcatattagtcccttctcacattgttattaatacccgagactgggtaatttataaaggaaataggtttaattgactcacagttctgcatggctgggaaggcctcaagaaacttacagtcatagcagaaggggaagcaaacacgtctttcttcacaaggtggcaggagagaaaaatgcaggcaaagtggggaaaagccccttataaaaccatcagatcttgtgagaactcacttactatcatgagaacagcatgagggaacacccccataatctaattacctcccaagacacgtggggattatgggaaccacaattcaagatgagatttgggtggaggcacagccaaaccatatcaaatggtttatgaaaaagtgttgttcagagttttcacaggaatgagggaaagcagaaaaaataattccaggtaatgatggaagagtcttaattccacgtattaaagatatcctgtccttggtcacatccccatcctgtgtttttcctgcttctctaatgagctcgtcttcagttctgctcatttatttgagctgtcagggtcaagaggggtggtagagtgtcagtacttctcttgagtttgtatatgttaatgctgtcttattttgtatttgtgctcaacaaaacaaccctatttgtgagaattgtgtgtttcagaaactctaaaccaacagggacactgaaacataatcaatttatgtttgaaaggatcgcaggcttctttctttcagtctgatctcagaaaagagagagtaaatgtcaagtactgaagcttctgcagagtgagagagggtaacttgatattgccaaaaacaaatttccacctctaggaaatgtattatttatatatagagagcaagcacatgctttctcatttgaactttgaagaagaatgttttctaaggagcacagactgacataatgtcgatgtctgccttctaagagaagatattcagttggccagagcacaagttgatgagtacttttttcttacttaaaaaaaatctttaaaaaaatcatactcaggattcagagagtcattttctgtggtgcttaccattggttttattgaaaagtgatgttttttgttctgttttagactgttgtagactataaagtgatgttgatattacctcattctttttatgctggtaattaatgtgtattcttcaatatgtttttctctttaagaaagtgtataggagtatatattttcctagtaaaagtatatggaatagaacttaggagttttagtcttttgactacatttaatgattgttgactatttggtacagtcttcccagatttccctccatgtatttgcatagataaaatgtgtgtcagcgtagagattggcaggggcatgatttaatatttttctgtgacttgcctttaattcagttagcaatatgcctttcaaagtcagtatttttaaacacctgaatggtgttatgtggtaatgatgatcattcttagtttcttgctattctaagcaatgctaccatgaacatttaatagtatatttttgtacttatatctgaatatttctatggaagagattcttagaggtagaattactgggtcaaacattatatatatttggtatgttgatagatattgccaagatgtctaccaaaaaggctttaccagtttatgctcccagttacatggcagaaaactgccctccttttaaaattaattctaaagttacatcttctgttttataacttagaggatagacagataaataaaaaatcataactaaatgtgataattacattaatagaggaatgccatgagggacatctaattcagattatattgggagagtaagaaagactttcagaggaattaatgctttagctgggtcttgaataatgagtttgcattaactaggcaatagaggggaagctatgctgggagggaggacatttcaggtgtggggagcactacttgtgaaaggccaaatgaatgagttaatgtgaagtattggggaactgcagatgcttcaaagttgtggaaaaacagtatagtaagaaatcaaaagaaatataggaaaggtagtaagagactgcaatggttattccaaggaagtgggattttactgcagaaaatgatgaaccattaaaggcttttatatcagtggaaagctgtaatctgatttttgtgttagaaagatcactctctggtcactgtgggaagtagaatgaggtaagttcaaaatcagggaggacatcaaatgaagaatggtggtggtctaagctaggacagtaggccttagaggaaaggataggtagatctgaaagttcataaggacgaatactaaatagaacttagagaaaatttgactgtagtgagtgaggaagaagtaacagttgggaatgatttttgtgtaatttaaccttggcaagcagttagaattgctgtattccaagataacagaggataggacaaaagacacatatgaaggtaactttagtttaacataatgcatgaattggatgctgccgtaagtcaacctgtggacacatgtatatggcagtcagtgagagctgggttggagatacacttgggggagtcactgtcacacaggtggaactgactccttgtgaatgggtgtcatctccttgggaaactttgcagaaaggtaaaggacatttaaggtcagtgaagaaagagaagaaagtccttgaagaagattgagaaggaatagccagtaaactatgaggaaaaccaggagagaatggcatcctgataagagagaggaaaagtagatttcatgtcagattgtagtggaagtgaaggggtactgaggaaatgagtggagattatgatttgggaagtttggtgaggaggtggaaaccatgaattttgagtagttaattcctatattcggagagtttcaggtgcaaagacccttgagtcaaaagaaatggattcaaattattttgtttcatcatttattagtaatataacaataaaacaaggctcacacctgccccaaagagagcagcgagaattaaatgagatgtcattattatcttgagtctgtattttcaccttgcgtggctaaagatcaatgtgtagagagggataaatgttcagtcaacttaagtaacagcttgagagttgaacctgggtatcggaaattctaattattgtattcttttgcataggatgctattttgtcctagttatttattcagaaaaattccattcttattaatctcacagatactcactgcatttctactgtgtataggcataaactagtctttgagggcacaatgatgattcaaacattgatcctactttcaacagtcttctgatccagcagggtaaatggtgataataagaaggcaattattctaagacgtggcaagggtgagagaaagatgcatacatagtagaggagaggcagtggggagtcgggagttaaggggaggttttccaaaagtgaaatcttgagttaggaatggtgagaagttatctaggtaaagcagtaggtagagaaatggaggtaggcagtgaaggtagtaatgcaaagcaagaatgaaaccagaggtaacctagaacacagtaggtactgggaagcaaccagtaatgggatgttgctaggccatcagatggacagaaggggaatggtggaatatgaagccaagagccagattatgaaggcccttatgtgacattcaagtgagattaggatttttagcccaatggctattggaagctgttgaaattttaactaggaagtgaaaatggctagatttttatttcatatagataatcttaaggcctgaatggaggaggaattgaagagaatatatcccaaagtagagagtttatagtttgggccatgagtaaaagcctagtagtaagagttagagggcttgttgaagaaatatttatggagaaaatggcagcctttgatggtgagtgtactggggtggggaagaggaaggaatgtgcttggtttctagttgggtggctatgttgctggtatcctgtcacctgaaagatcatggggaagaagagaagtttttcttatttcatttcccctaacacaagaaactaatttgtcagacatttctattttgtttcactgatgattccatgatacttttttttttcccagtactactttgacagtttagctgttagatgtcttagttcttttctatttcttatgaggagtaaatttttrcttttaaaatttcacttatgcctcactctcttttttctttcataatttttgttaacctccaggaagaacctaggaaagtccgctttgattatgacttattcctgcatcttgaaggccatccaccagtgaatcacctccgctgtgaaaagctaactttcaacaaccccacagaggactttaggagaaagttgctgaaggcaggaggggtaagtggcactctcttgtgaaaagcattcctattaaaaaacaacaacaacaaaaaaaaaaacaaacaaactagttcctcatgtgttaaaaagtataaggttttgggagaggtaaaagaaatgatgtaccttaatggcttagctgtggattcatgtgttgagatgaacaggtagacaataatattttagataggcttaagtttgaaattacactatttattaaaacagccttaagatctatgcagctcaaatttaattatgacaaaaccccaaaacaaacaagcaataaactctcatttaagaaaagaataatatttgaactgtgttatatcagttatagaaacttttgggttaagttgcaagtcacattaaaaattatataaaaagaaatccaaattttcttgatcacaattattaaaaaaggtatcttcactcatactacatgtttgggtcatttaaatagacatttttgtttgtttgaattttatgttgataaaagatggattttcctttttaaagtaatggtagcaaaagtgttgtaaacttttgcccttgtgatttgactagtatgggaaagaattttaagtggtacctcttggaaacataaacatttggtgtgtttgcttctgaagctgggtcagctgtacaaacactattgattggtcaaaatctatttgacaatgagtgtcactgggatcatcagctcctactgcacatgaacttatgtgtcatattatgtgggcacttcacaccccatctattttgagatgtgttcttttctccaggatcatcttcacttagtttctctggaaggtttttgtgcagttttctatttatgaagttattttctatatgcatttgtagaccataacccatcaagatgccttatatcactgataaactctacctgagggctttgtaggaagcaggtggtttttttgtggcacagttttctttattggatacatgaacaaccactttgagaacctaagaaaagctattgttcctattatgagaaagttgcccatgtatataattgtgtgactattctgggtgatgtggaccccattttttgagttctgttttgctaggctgctgtccttttacttgaattatgaatatgcatttgaagcattgcaagtacttttaccatatttcattccttatcatatatatgtcaatagattatggtttaagtgggtattgagccagctttggaaatgaaatgccacttagagtattctatgggagaaatacagcttcatgaagaaatgtatttatttttgtaacacaacttattttaaaattaggaacttattataattttattaaagaagttgtttggaaaagtaactctgttttactccttttatagttatcaggagtatagttttgatgccatttacctatggctatgccattaacaatcaactaactggtccatttaaaatcctaatcaatctcatttttttaatgaattcggcattttacatttctgattatctctcttgggttgtgtagttgggtgggtaaattggagagtgcaaattatgtaactttagtacgtcatgcttctgataagggtcgtaggaaaacgtaaatatgacacaagaactttttaaagcaaccacttagtcccagagaagtcgagggttgcctgtgagctggaagagaggttacagtcagtgataatgcagcaaagtgcagcactgcatcctgataaggtctctagttgatttctcatcttgtgctctactcagcctttatctcagaatgattcttcttgacttctaactttccttctttgtgtttaagtgctgtttgaagccagcagatattttcctattagaattagattgtgtcttgacaactctaaaataataagttgaaatgtgaactattccaggcatatgctgtttgaaatattacaagttacttaagggactaatcacagtgaattttgtagtaaaataagcatttaaaaattcattaaaaatcataataattccacagattctgtctatttcatatgggaagattaaaataaacttctatagaaatgtaaaaaaaatcagtagactaataaacatcttttggcttacctagatttttgactgccttatattattgatacctggctttaaccatttgtcttatcttagtattaatgcagcctatcatggtgttactaacttatgagccattctgatttaatgagaaatgagttcacgattatgtcttcagataaacttcttcttcttcttattttttggcctgggttttgtggtgggagagaggatactttcctcctcatacttaaaaattatgtgttgacatagatgtatatattctaccttaaaaggaaaaaataattgaacctctcttctcatcttaatatataagttaaggcatgggtggagtaaacttagtgtttggctatggttccttctcttttattattttcttttaaactaaaagtacatagagctactaaaagttgagtgttgcttttcaagagatcagaaaggttgtttttagagctgggagcatcttggaaaaaatgtttttcagctcttagaagaaaataattccaaagaactttttgccagagaatcttgaaaaactgcagattttttctacttcataatctataagcctataacaacttttttgggagaggggtcaataacattctgtttttttcactggattttgtttttaatttcaatgtcatactatttcctaaatagtctcaaaacttggtgtatgtccctcttggaagaaatataccctgtgtttttctgtgacatggctccctaatattaagtatattcttgttataaaagaagaagtattgtgggcagggcacatttagattcaaacattattttctgagagtattgaatacagagtgatttactttataggaccgtgaaagtagtttcctctaaattagacagctcatgggagcttgctggggaaattgtggatttgatttaagatctagcccgacgaactttttttttttaattgagatggagtctcactctgttgcccaggctggagtgcagtggcttgatttttgtacactgcagccttgacttgccaggctgaaatgaacgtcccacttgagcttcccaaatagctgtgactacagatgcacgccaccacatttactaattaaaaaaaaaaatgtagagacagggtcttactgtgttgcctaggctggtagatttttatttttattttttgagatagggtcttactctgtcacccaggctggagtgcagtggtgcagtcatggctcactgcagcctcaacctcctgggctcaagtgatcctcccacctcagcctcctgagtagctgggactacaggcacagactaccacacctgactaatttttgtattttttgtagagacaggttttcccatgttgccaaggctgatcttgaactcctgagctgaaatgatcagcccccctcggcctcctaaagtgctctaactacaggtgtgagtcactgcgtccagccccttgtaaggctttaagtaagagaaagagggtaggggttatgaaatgagaaagaacaacttgagaacttactttaaaaattattattcatatttattatataaatttttgtatgttattatattaagggaggatatttcctttgagatctttattctttgattggtagagggaagagagcagtgagcagtaaacttttgagggcaagaacaaacataatatgtcttttaattttaagcaaaaggaccaagtgtactctgtggagaagcacctccctatttgctgagatatttctatttatttcccatttttaaagaatgaactgattgatcacttttggatcagtgattctcaaattgtgctcattaggatgttaagattaaaaggcttatgatcacgacagataattttctctctattcccttatcactttttagtagttggaattcagtcatactgaaaacattgcagaagagtttgtcatctattactataagatagatgaaagaagatgagcttttctttggggtgttggcaaagtaaacatatactgtatattagatattgtatattggggaactaaaatttattattctactaacttgtttttctgaatttctggttggaaagaagtgtgatacaattggaaaagttttaaattcaagctggtttagataaaacctttatcatcttcaagctgggtaaccctgggaaaaaccattgcatctttttgcatctcagtttattagctgtgaaacggatatggcagtgttttcctcatagggaacgtgtaaccatggtgtatggcacatagtagatacccagtaccttagttcttttcccctcagttactagtttagaatatcagcagatgcttaaccatctttatatcagacacttaaaggtatggtgaaaaagatttgctattcagtgtaagctactcaatatttattcacaggaaaacatgtttaccaccaagttagtgtaaccagcgcattgatagatctgtgttgtgtttaaagattagcccgtggtttcttccttcaaggtgttggcactctgtttgtattttgcttgtatgaagtgcttgtttgtattttgcttgtgtaaagggctcggaatattattttgtaagatgtaacttttcattagaaaaatggattcttaacattgttcttaattctgaatttttagcggattaaaggcttctcaaggctgtgtgtttccttagaagagttcacatatatgaccagcaaggtagttggatccttgtgcttctacgaagaaagcacaaaataggcaagcatctttggaaaatcaagtttattttgcagtttcttttttctttttttggcctggaaaccaaatggcctgctttggttctgttgttttttatgggatggtggtagggtgttgggtgtttgtttgttcctgctgcctttctttcttccttccctccctctttccttctctccctccctccttccttccttcctttcctcaattaaacagggcaaagtctaaacatgttgttcagtcctatttctgaatcactggcaagcagttaattttgaggactgaaaattaaaactaaccacagcagttgttaaaactagggtttctataggcagaaatccaattctgttcagacaccacctgtttcagtaggacatttcagacgcccatttggcaagatttgctggagaagacatggggaacatgcttccagtctgtattaaatctgcagcataatgcagtcctgtttctgagagtgacagttacatttatatatgatctgttttcacaaggaataaattggaatctttctgaaatgctgcttattgtcaagtgaaattcaggtccacagtggacctccagcgaggggttttgcttattaaagggccaaaaggatcttaggataaggagctttcagtaatgcagctgtgtcaagccatctgaacacagcattttattacaaggatttggaatgaatcttgtgtagggtggtttagtgtttcctttgtaggggagttgagaacacttctaatttctcaactgtatggatcacaatctcttctcttcaaattttaatttttttgaataggtaaatatacacacagtgcatcatgacatacagttaggttttcctctaggacaccagtaatactgtagtaaataaactcatacatagttctttgtgcacatggatatgtccgtaggataaattccttagagtagaattgtgggtccaaggcaaagtgaaatttaaattttggtagacatctacacatttcctgccaaagaggttatactactctatgcctgcaccaaatagtacgtgagtgcctttttctccacaggatgatttattaaactaccctctcccccaatctgatggatgaaaaatggcatctcatttgtaattcacatttctctcatgagtgatggtgagcaacttttcatatgcttaaaaagccattttcatttcctttcaaagaccacattttaatgtattttaaattggaaatattctaagtgtttcagtttcaacttaaatttatgggtactcttcccacatacttacatttggaaaggttacaaaaagatacggaagcctctttaaccaaggtctgtgttttcaggctttcttcgatgtgtaacaaattatgttcttaggaactgatttgtcaagactttggcttctaaaaatataagtggcttttgtggcaaactcatctagacagtgcctagagatggatagctggctgcttattttaaaaatgactcaaagaaaataatacagagaagattattttagtggctgtcactgggcagcttcattggatttttggatatttgttttggaataagtacctttttgattattttctgatatatataattctgtaattgtcacttcaaacgataaaagaatgctgctgcttttttactggcactgataaaaggtggtttatttaaataaatgtaagacgaagcaggctgcttcatttgtgtggttatttcttagaagctaattttctgtcatatttggcattttctccttctttctataaccttgtcggccacctccccccacaaactctggaaaattaagttatgaaagtggaacatacatataaatgttaagtagaaagtcaaaattgtgagccttaattccaaatgtaatgtcgatctcataaattatttcagggaaagcatggtcatgacagtacaaagttatttatgtcactcaacctatttagtggttttatgatttaatgtcttcttaaagtcacacacgttgattgcagggcagttacagacttttgaaaataggtaccagaaaaatctgtgtgataaaacaactttcgtgtcttcatttgttccttccttcccaactacctgtttaccttttaagtgacaaggaaaaaaacaggagcaaactttccactctgctgaaagctcaaacgccattactgcataaactaagcaaagactgaaagaaaaacagaggagagagggagatgttcctagaatgtgtactaagaaaagttgttttgagtgtttagttgtcagtattggaaggtgtgccccatttctttctgcagacctccccgaagtagcagtttagctgactgtatgtacgaaactcttaatatagtaaccgtaatttagttttgaaaggaaatgctgtgatatcttaaagttgtcacttaatcctgctactacctcctgtccccaattgcacaaaaagccaagaaaataagaaatgaacagaaaaggaaaaatatgaaaggatgtgaatgttgggagaagtttcagattaagaaataattgtttctctgtttaaatacaaaaatattgcagttgaaaactgttgattctgtttctctatttcgtctttgcttaggtactagctctttatgtacttgtttcaaggatgcatacaaagtgtatctaatactttgtctgagttcattctcttctaggatggtaagggagttgtctgtgagtgcagatgcctattttgactgtccccaccagatatttttgagtttcatactctataatattaagtgaaaacaattttaggggaaattgaggaggagaacgggggctatgattaacattttgttttctgcctgttttcttgttccatgagttgtaagaaaacctgacaataatcaggatctgaaggtaacactttaagaaacaaatgtctgagactcgaagtaggcatatgtggttcattttcaggggttgaggatagatggtaggtggcttaatataaaaaccttcattaccacaggggatatagccatggtataacagaaagaatgtttgatttgatatctgaaggcacaaattcaattgtaggatctgctgctaatttaccttgggcttaggtttgtataaatctaaaataagcataatatctcctttctcccatttgagattattaaatgctatctggtacatagttaagtagtcagcagataattagtttatttattgacatgactttttttctgcagatttattatatttttggttaaaccataattttctgttatctggaatggtgaaagtaaaaggtttccattacaaggatttgacataataataatgttctaccagaaagaacatattttagtttcaagaaggaatctaacattttccctgattttgaaataagtatgtgttaattttagaaagtgtggacatctagaaaagcaaaaaagaagaaaataagtcattgtaatctttctggtgactataacctctgtcagtatttcacattatatttttatgtagatgagatcccactgaaaatctatattttgcatttaatatattaaacataacgcatagattttaaacatatatgactttattctatgtcctcacacttcagaggattgatataaactttctggttgttgagaacttaccattaatgtgttctattgctttctttctccgccatccccccactccccttcctggtgctctgcttctcaaaattaaacttactggcttaagacccagaarttttaacattgagaacaaaagaactgttttgcacaaatttgaaattttctcttcatggttttgacaatacagaagtatgatgtactagcttttttttttttttttcctgatgactgtttagtccatagatcagttatttggaaagatctgtaaatattttgtttctgtttttgtttttgtttttgagatggagtcttgctctgtcacccaagctggaatatagtggtgccatcgcggataactgcagcctctgcctcctgggttcaagggattctcctgcctcagtctcctgagtagctgggactacagatgtacgccaccacgtccagctgatttttgtatttttttggtagagtcggggtttcaccgtgttggtcaggttggtcttgaactcctgacctcaaatgatctgcccacctcagctccgaaagtgctgggattacagatgtgagccaccgcacctggcctaagatttgtaatttaatatagattattgcaggtgtagattttgcagcttgtctttgcaaatatgattcacaccttccctttcactatagggtacattgtgggcctgtgggtagtgtgaaatggtaaaataatggacagattgagtgagataaggatccctattcatgaaacaaactggtccaatcaactacagttagagtaaaatgaagtaaaataaaaatttagttggccttacaaatatcagcctttacatgaacttgtggtgacttaagataggaatttatatgggtaatatagacagaagtccatgcgtatggtgaccattgtgtctttgggcaaattaaaaataaatgtcatgcttataatcccagcattttgggagactggggcaggaggatcacttgaggccaggagtttgagaccaacctgggccacagagtgagacctgtctctacaaaaaataaaataaagtaaaataaaataaaattagcttggtgtagtgacaaacctctatagtcctagctgctcaggaggctgaagtaggaggatcgcttgagcccaggaatttgaggctccagtgagttataatttctgttactgcactacagccccagccttggtgacagagcaagaccctgtctctaaataaataagtaaagtgctgctacctctccccactctataacaccccagcccaaggagcatggcatggctagcatagtgtagctgaatttcagctaatcctcatcccattggccacacttcctatgcagggtaccatctggacaaccatttgcagtggcactatttataggttcataaaaaaggtgattttgatgttaaagctatcttgtttgatatagtctagacagagttatctggagaaataataaatacatctttcttgaaaatttgttatcagagtgttctggttttgaatagtcatgttctttcaaaggtttagcttgacctctcattctgccactctgctttgtgcttttagcttataacactattgtccagcattcatagatatctataaaggtctggtttaagcatagggagcaaaaacttttgataagactgttttgctaaaccaggggtttcaaatgccagtgactatgagaccaagctaatcctttgaaagaacatggctacaaaaactagaggaccagctgaataatgtagcccttgctgtagggaatttcacacaaaagatagttatttattgtttttttaaagtaaagattaagtgaagtggaattttcctttctgatgattttgagctctgaatactttggcaaagagatcatcagtgagctctaaatcaggaatattctagatcagcattaataaaaataccttctactatgttccagttttaagatgtactttatctgatttggctcttcatatgggtctcagggccagggctagaactacttctagttgagtcatttctcttacgtcccctttgtattttttcttcctagatttctgttcctactcttgagagaagggattggcttctttcgtccactacaccctctcccagggtcaggtttcttgagcttctttacttctctatacacaccaacccctgggatcattttatctgaaatctcttcttttttatttttttctggaagatatttttgtggcttatatacgtacacttaattttggcttcagtttatttttcttttttaattaaaaaaagctgtaattaaacctttattctgatttacctttttaaaatgaaaatagcttgacatcagatgtatgtgcctctgtactgcagagcaacatagaatgtgaatgtctcacaggtcttaggttaaactactttggattgatcagccttaaagataatagtgacacctatagaaattgagatgtgtagtaactttctcactgctcaattttctgcatactgatcttgatttttttttaatgcaatggatacagcataacagttagaaaggcagactcatagcacagccctttttttcaaatgctggtattggtgcttagtagctgtgtgtctttgggcacattactaatctctatcagtctgtttgctcatttgtaaaatgaggtgttggtaccatctaccaggatatagtagttgtgaggatgacttgagataatgcatgagaaatgattagcacagtgactgctgtttaggaaaaacccatgaacactttcattatttttaatacatttagattctgggcatgtggatcagggtgtatttttatggctataaaatgagtaaatcatacagttttgtagctgatgaaattctttgatataataggtcaaggtcaccattttacagatgagtaaactaaggcatcaaatactgaaatcagtcaagcaagagatagctgagtcagggtttttgttcattgttcttgcatattctttctacggttacacatagtgatattagctttctttttggaaatgcaatgaaaagaagacaaagaattaaaaaataaaaatccccagggccacttctcttagttgcattaggaccaatggagcaatcttgcatgagtctcctttctgaagacaacttgggtaaactgccagtgaagcagttcactggttggcagcaacggacttcatatttttgtttattgctttgtagactaaagtttcctgtatttctcttgcttctgaaaatacaatttatgtggagaatatgataattagaaatccctttcccctaaactttttaaagccagcatcaacctatctgtggggattggttaagtttgcattttctgtaagttaagaggcaatcataatttttggagtttttcttttactcagttgaacagcaaggttatgcatgactttatatgtggtctaaaaatggttaatgcaacattaatcagcatatgaaaaagcctatcataaagtcaagaaataactgtaatctaccagggttttgaaagtagagatacaagtaagccatggggtattgtgattctttgagtgcttagatattaaaagattttccgctcagggtaggaaagtaggatggtagtaccctttaatagaattagtttaccgtggctgactttgctaccttttctctgggggagctactttggcctctttatagtcatattccactaccccgccatgcgtgtacagtccttagcatttatgatctaaaaatggttgagaatatttgaatctaggaccgataagacaggctcaggaaatccaagatgcttttcaagtcctggaagacttctggcagaagatttttattcttttgtttctgcttcatagattgaagttccctatacaaaactaatttcttttgcttctgaaaatcaagttcgagaggaccttcctaagtcttcccgtactcctttttccttcagataccatccttacacctcccactttctgcctacatagctcggagtgtataaataaacaaaaataaaaatgtccttccaagaggcattttttagcttagtgcttgccttatctggaggacatataaatacttttcattttgaagtatttgagtacctactgtgggccacacttaatgccagattttgggtatatagtsaaagatcactgagttgttttgctttctatcaagccttaacccttggtcaacttttaagggataataaattctcatcttttaataggattggaataatctacctcagtttcttcttttttttaaaaaacactgggtgtggtggtgagcacctgtagtcccagctactaaggaggctgaggcaggaggattgctggagcccaggagttcgagtctagcctgggtaacatactgagaccctgtctctaaaaaagaaagaaagaaggaaaacaaaacaaattcacagccaccagtccaggccgccctcatgtgctttcaggagaaaaagctgtggtactcagacatctgcttcttttagtggggtgccagaagcttttttattggactccattccccatcccactccaggcaggctctgagtctctaaagactaaggatggcaaaaacaacatttttttttaagaatgctgatcttttgtgtaaatcatcagatgatcaaagtgcatgtgtgtaaaattgtcttgtttctacaacaaatcctaagtgaagctgattttcccaacaagatgtggaaatgtttttcccaaatacacctttgaatttatattacaagtttattgtcttttttctgcaaccgagacaatatattttagttgagaggagatgaactgaaggcttcagattatgcttgttttttgtttgctctgtttttgtgtgtgatatagatagaagaacaacctcatttggcatttttgagagaaaaccactgcctttccttttattagaaaaggcttgatttagctaacagatcaactaatttgtataaggaagcctttgttcctttcaggatggcatttcgattcctcttaggataatatggtgcaatttaggtctgcacagtatgttatgggtccttgaagagacagccaagtggagcaaattgaaacagactgaaggccccttgaagacatcctctgatttcagtgcccttcccagagtcccttagtccactgtgcatagattgagatgtggggcttccccaaatactatttacttactttataatttaaaaaaaattggaaataatctcacatttacacttgtaatacaagtatggtacaaaaaacttttctttctttgagagtaagttgccaatattgatgctccgttgtccctgaatactttagaatttatttcttgcaaacaagggcattctcttatataactacagtacaaccatccaagtcaggaattagcactgatacattattaacttgttatcctcagatcctactccagttttgttgcagattgttccagtaatgtcctttatttttttattttttatttttttgagatgaagtctcactctgtcaccaggctggagtgcagtggcaccgtcttggctcactgcaacctccgcttcccagattcaagcgattctgctgcctcatcctcctgagtagctgggactacaggtgcgtgccaccatacccagctaatttttttttttttgtatttttagtagagacagggtttcatcatgttggccagtatggtctcgatctcttgacctcatgatctgctcacctcggccttccaaagtgctgggattacaggtgtgagccaccatgcctggccctgtcctttattttgatagcaaaaggatccagtctacaatcatacgtagcatttagttgtcatgtcttagcctccatcaactggaaagagttccttggtctttccttgactttcatgaacttgaagattttaaagacttcaggccagttatttagtagatatacatacttggttatgtatatttccctgcaactagattcatgttatgcatctttggtaggaatatctgcactcttctcattgaaccacatcacatgatcctgatttccactgagacattactgttgatgttaacacccattacttgattcgaatggcatcctccaggcttctccactgtacagtttctctctgtaattaataagtgttttattggaaggtactttgagaagatgtaaatatcccatttttcctcagacttaagtttattcttatgtttattttatcatcatggactcatgggtatatattttttcaatgggttataacctattactatcattatttattttgataatttaattttcctgacttggccagtgggagcccctttaacctggtttctttgcatactttttaacctttttctataaaaagatatgtcaagttcattttgtacttcttgtccctgctctgaattcagcatttctccgaagagcaggcccttttggtggctcccagcccctgtacgggtgtctctccacctgtagccgttcctcctcaccgttgcctactttgcttggcccgacataagagcttttggactgaattgttaagggggcaaaaaggcataatttcatcacttgcgttagctccaagtggatggggactataatatatttgatgtggtatccccaggtgcctactgtatagtaaatactcaataaatgtatacattcattcaaaggcacatacttattatgtgccttttagggtcagccattagtccaggtgctggagagatacaacagtgaatcaaaatttaaaaacaaaagcatacatatgtaggagctctgtgaagggaaatagttttttgtgaaggatggaaataattttgtaaggcagccgtttcccaagtgtgtttgtttacgccgatatgtattcaatgaacaaaaagattttgattttgcacttttaaactgttgttcttattaaagtgcatagactgaaaaaaaaagcgattttttttccagccttggtgacttctttttctatattaggacagctctgctttttccccccaccctgtatgtgccgcacatagagctaactccacgtattaggacaaaggggtattgctgaagttacgtatcagctaattctgccctacggtttgttagtttgtacacctttgaccagcaatataatacttccatagaaaaaagtgatttgacttgaatatttttctcattatacttttggtaataagtaatataaggtaaaaaaaggtaagaatatattagtaactctttaaagttatgttatttcatttaactcctgtcagtagaactataatactatataatcaaactctgtctcttttaatattataaaattattcaagcatttattcactgagcacatacttgattgcctattctttatcaagtacttaccgcacaggactctttaagaagattaaatgagacactgtgtttgtgttttgctcatagcagctaataaataagtrtctgctgaatttgaatgtgaatttctcttcctagactagaagattttgacatcaggaattttgaatttttcttataataaaaatgttatattacaaaccactctaactatctgtatatgcctctcactcgattcctttgccttctctcgatataattaccttcctaaagtttcttgagcttttaaacatggttttaccataaatgtatgtttgtttgctcatctttgcttattttttattgttatgaaaatggtataatagtatatgtattttttatgactttgacttgctttatttattcagcattataagatttgtctttattattgtctatttcactgctgtgcatagtccaaagagtgattatatcatgagttgtgtattcattgtcttgttatctagatatctagattacccctttttatttggttttgcaattatgaacctttttgtgcatatgtctagtatacccatgcaagagtttctgtagggcattagatttcagacttttatgaccgtgacccatagtaagaaaccggttttccataatgatcaagtacccatatacataaataaatatgcatggacaaatgagacaaaagtttcataaaccatgcttaacctttactacatggaattcagtctatttaattttgtactggttgacttataaacaattatggagtctactatattgctttccagccttacctaaaccagttctgtttgaataatactgctgtaactcagtggttcccaaactctagggtacatgagaattacctggagaattaagaaacatgaggactcctgggcccagctgcagagattcttatttagtaggtctagggtggggcctaaaaatataaatttctaataagcatctaggtaatactaatattgctggtctgccgactacattcagagaaatgctgtcttatattgtatacctatgaataaaattgctgggtcatagagcagtcacctatttagccttggtttattttatataatagttatagcaatttagagtctcatgtcagcatgtaaaagagatctcattgttctattttcttgtcagacttgttcatctatgcacatttagtaagcacataaagttgtatcattattctcttattttgcattgcagtgattatatgttcattaatgaagctgaacatatatttcattggccattcatgtttcttattctgtraaatgtttgttcatgtcttccacttatttttctatttacttattagaggtcttttaatatcctggagataggagttcattgttgtttctatttactattgacatattttcctagttttctcagttagtggcttttttactttatggtatcttttgataaacaaattcttaatgtgatcagatttttaaaatagttagttctttttaatgtcccatttagtatattctcctataccaaggtcatatagatattctcctgaattttctgaaaagttttagaagttttgtctaacattgaaatattttcaaatatctggaattgattttatgtatgtatgaggtaagagtctaatttaaatgttttcctatataggaaaccagctccagcatgttttattgcgttgtctatgcttttatcaatgatccgccatgtcaagcatcagcttttaaaatatttrtgagtctgtttggaagggtgtacatttctgttccattgatcagtttgttgatctctgtagcaatactacaatgttgtaattactatcatttcataaagaggttggctatataatgtaacaagttctagtagatcatttttttcttcatatacattttagactcagtgtaagttctctgaaaaactgttgagatttgaattgaaattacattgaatctgtggttgaagaatattctcatctatgaacctagtttctcaatgagtttatttaaatgttatttaatgtctttaaagtatctgtgtagttttatgctttatttattcctagctactttatattttgttttgctattattaatattaaatgtttcctgtttgttcctgatgtgtaaatatgcagtctaccttaggatattgatatgacttctaacatcttactaaacttattaattctttacagatccttttgtatttctgtgtggacaattaaatgtgaataatgacacatacctgtcttatttccaattttcctatccttttccccccagtgcattttgcagtcctgagttagtaggaataccagtaaaaactgattacaaagggactgattctaataatttgctatttagaaggttgtctccatgggactttggtagctactctttttcaagttaaggaatttatctcctagtcatgtttgtaaggaattttgtttgttttcattttttgaaaaaccatggatgaatttttgattttatcagaaaacgtttcagtatctattgagatgaacagatggttttgttctcctttaatctgttaatgtagtgcttgacaagcatttttgtcacgccaaagtactcttgaattttgggattaaacccaatgtggttttggtctattagatttttttcctttttttcccccctacaattggattagttatgctaatattctattcaaaaatttttgcatttatattcttgagttagattaggccatatgcttctttttcttactcttcttggtaggatttgttgctttgataatattaaccacaggaaataaaatatgtttccttttctctattattattagttttttaagagacagggtgtcaccctgttgcccaggctggagtgcagtggtgcagtcatggctcacttcagcctccaactcctgggctcaagggattctcctgcctcagcctgctgattagctaggactataggtgtgtgccaccatgcctggctaatttttaaatcttttttagcagtggggtcttgctatattgcccaggctggtcttgaacttctggcctcaagagagcactcttcccactttggcctcctaaaaccacagggattacaggcatgaactaccatacctgcctgtcttttctattctttagaagagtttctttaacgttaaaattatcttttcctagaacttgcttctaaaaccctgtgggcttgatgttttctttgtaggaagatttcaaactacttatctgatattaatacaggattcttcctaatttttatttttttgggggagtcagctttggtaagttacatttttcccaaggtttgctttcacatttgttgcaataaaattatttatgatatattcttatctgttttatctgtgctatacttgtagatgttttcttatttttttcttcctatgctgtatttacgctttctctcctttgttttaattcagtctttcagtgaggactgtgaattttattagttcttttcaaagttctttccttaggctttgttgactgttttattagggttacaaaaatctttgtagtctttcttttgcttgagtttattattcttctgtgcatttatcatccatcattttcttcacagacgaggattggtggctaaaattttttcaagtcctattttaattccacaaaattaatgtagcattttctttatcattcaatgtgatgaagttgaaaatttttattttaatttcttctttaacctgaaaattattgaagtatatttttataattccaaatatatacagtttttttaaaaacattaaaacgtttttaaattttagcataattatattaccataatgtcttcttaaactagttttccttattcctgatataaatcctgtggatgttcttttactaaaaggctcctgttagtaaacactcagtttgtgttaatctataaagttttgattattgcccctattttgaaagtgttttttctggttttacaattctaggtttttacttacttcctttcaatatttgaaaatatttttctattgtttttgtgaagtctggtgtaagtctgatttagggtttttctgatgtttagcaactatctttctgagggaaaaagtcatgatttttagtgtttacttatttgtgtggtggaaatactctcaccgtattatatcagttattgcaaagttggaaagaacatacagttatgaattatttctgccatcctatgcaacagagagaattacctcaagaaaacagcaaataataatatgtagtaaactaattagaaagtgctgagttttgattattaattaccactgcttttaatatttctctgcttgcaattttatattatataaaataatagtcttgtttaatttatacagtgcatttactgtttaaaaactggctgaaaaaaattcctaaaaatttaacagctggctcccagtcaagcctctattagctggcaccagtgtaccactagctctttttttaatacatgatctcttgtttcttactgtctttatagtttttttgttttggtgttcttcatttttagtacaatgtgtctaggattaaattccttttaatttatgtatattatttttatactatacttggtttatctgtagattcatgactttgatcatatttggaaaatttccaccattgtgtccctatgttctttattctttctgggtctctaatttgatatttgttatttttattctgttctccatgtatcttaatagcttttatatttcccattttcttgtgtctttgtattatggcagtttattcatatttatcttccagttcactaattcttttcagctgtgttcagtccgctgtttaactagtccattgagatattgattccaacagtgttttttttttttcatttcttaaagtcgtatttgtttcttttcagtggcccagtcattcttattaatttcttattgcttggtcgctttttggattccagtgtttttcctttttatacttcatatatagttatttatagtctgcatttgatgatttccctatagtaagtctttaaggtccttttacctcacatcatggtggcttgtttctttgtgttcaggaatatttttaaatcgcgaattcgtatttgatttaggtgaacattgggaatcctgagacctgaattcagagtatttttccccaacagcagatttgtaaaggcttcttcttggtttctgttgagactctgaggtttaggtctccaaatgtgctatagggcccaggtttggtctttagagacccaggagaacacagtcatgcgtgtgtccttagggcaaccccatctttcatgagtgattgtagttcacattttatggcctgccttttatstttctatttctctttcatatactcttgattcttgaactttttctttatttttttaacggcccagcaatgaagttttgttgtaattatctaatatctagttgtatcatagtaagaactcccaaagagtccaccatattgcccaaattagacgagttgttttctgcaaagccatagtatttaacagtttcagcatattcctttgcgtatgctggagacctcataaatatgtataaaataactactgagagaaggtaacaagatagcataaacctgattatattttcccattgttcagttgcatctctttgggcttttatttatgcagtatatttattaaatttgtgtgtgtcaggtactgtttttcattttatacttccagccattatttgtgattagtaatataatctgaagattggctattctctgttatttaacrattatttatcaaggctaattatcagaaatcaagctagtactaagagagaaggctggaatgatctggccaatgtgtttttaagctggtttaataaagcaggaactgtacaaagctaaatatacaaaaacctagaaagagaagtgatataaatattacttcaaatttttagtttcaaaccacaaagataggcagaagtttacttgaaactacagtcttctaaatataacttacagtcagtagtacttaactatgatttagaacttaagccatagcaagtcagggagtatatataaataggagaattttaaatgaaattggattctgaaacaaaaggattttatagcacgtacaacatagctgaaacaagtcatagtcatttgaggaaaaaagggcattatatattttgtctatttaaaatattattttgtaaaatattaaatatttttgccaatcagtactttacacttaagcttcatttaagtgcaaatacagtacttcaggatatttttaatattaaaaaatatttattgggtttaccttaaattctttagaacaaaaggctgggcaaatgaaaatttactacttattcttttckcttcatagttgaaataaattttttcatgtgtttctatttctcaattataaatataatttgtagatttttttcatcttattaatgatgtaagctaaatgtatataactcaaagtgcaatcttagtaagaagctacgtctgtagattgatgcttgattgtagtttgctcgaaaacagtaagataacaaatgacatcagaaggaaaattgaagtgtttttaaaacatagaatgatactagtcacattgttgaatcatttatctttttatttttctaatgcaaaatgtatttcacaaagtctctaaagtgcaaatgagtgcatgaaaaggaagaggataaagtacatttgtgaagtcgaagatatttacatggctgaaaaaaatagcgaagtgtttaacaaaaagtagaagtcctatgttctaatcttcctgaacctccttccgactttctggaaggaaccactttaactgtttctatatttaaattctaaggtgaatgtccagagtttcctaactatatgctatgctgctatttttacatgagaatctaacccatttgctccatattataccattttaatgacacctaatatgacaccattttaaattgatctcttggatacctttataactttctagatgtttaatgtagaactatattagttggctcaccaactatggacaatgtcccttgattctcaagttcaggttatcctaaagttatttcccttctcttctgttcagacacttacgttgtaagggttgataacattgtgctatgtaataaaatgttaagtcttctgtgcttgtctgcactagtggtggtggtagtaatagaaagcactcacatagttcctgctttgtgcccggccacattgcatatacatgttatttataaagcacacacatatacagacataggtactttacatatattaagcttttgtaatcattaggctcactttgtggtataggtaatattgtggtaatattatggtcctcattttactgacaagaaaatttaaggcacttagcaagtggtggagctgagtagattagtttccaaaagttgaaaatcagtgaatattgtttattgttatcactaggtagaatgtttatttgcagctaaaatgttagattttctttcttgcacagccatatatttttgtagcttttggttttctttattgctgcctgtttttgtgtaaaatatttcaaattctctctcttcctaatgacagcctataggggcccttataagattctccagttttcttaaaacagtgacctctcccscctcatcctttttggaggtgattatttatgtgatttgagcactataaatttttatgacttcaaaatttgaaaacatttaatgtgagatgagaagtatcttgcagttttctgaaaccctttgaaataattggaagcatcatgtgctctgccagggcattataggagagggtgatttttctcagtatcacaagagccctctgaacacaactctactaataagtttatcaacttaaaaatatttatttagtaccaaaagactcaaagtttaacccacttgaaatgtatacaagaagagcctctgattttaaaataaattacagttgcctctcagtattcataggggattgatgggttccaggaccttctcagttgccaaaatctatgaatcctcaaatcccttgtacaaaatggcatagtatttgcatataatttatgcacatcctcctgtatgccttaaattatttctagatttgttatactactcaacacaatgtaagtgctatgtaaatagttgttatactgtattttaaaattgtgcattattttgagttttcccccaaatattttcttttctttggagatggtcttgctctgttgctcaggctggagtgcagtgacttcctaggcacaagtgatcctcctgcctcacccctcgcgagtagctgtggaactacaggcatgcaccaccaccacactcagctagttttttttttttaattttattttagtagagatgaagtctcactatattgcccaggctggtctcaaactcctgagctcaatatccacccgccttagcctcctgagtagctgggactacaggcacatgccactacgcctggctaattttttttttttaatgtagagatagggtctcactgtgttgcccaggctggtctcgaacccctgggctcaagtgatcctccttccttggcctccctaaatgcagggattacaggtatgagccactgtacctggccttttcctgaatattcttggtccgtggttggttgaatctgtggatacagaacccttggatatggggggccaggggggcccattgcattttttaatcacctgccaaaaaataatattttaccccctctactggaaataaatagaacttcatttgtatagttctgcctagacaacaggcatatttttgatgatgttcttttacagtcattgagcctctcccccattctatatcttctttcatttctggcccaggttatattggcaagattgacagctgattttgaaacccactgactttacaagtgtaaataaaaatgtagtggttaagactataaaaatatagtggtggtgcatgcccttagtcccacagctacttgcaaggggtgaggaaggaggatcacttgagcctagaaggtcactgcactccagcctgagcaacagagcaagaccatctccaaagaaaagaagtcagactaactgggggcttgagtgtcagttttatcactaattatatatgtgtctttgggcacattgatattcgtacctcagtttcctcacttataaattggggctaataatagctatttcacaagattgttgagttaataatgataaaacttctacatcagtctggattagtaagcattcattaagctattaccgctgccaccactgtcaccatcattgtcaccatcactgtcccacattgctaccagatgaccttcctaaagtgattagttaatattgatctcctctttaaagttttcaggtgggtttcttttgtttcccagatgtcactactcccagatgtcactactctttgcggctgctattaaggcctgtctttcctaataaataattgtcagaattcatagtcaggtatggctgaggggaatctttcattattctctcgaatctctccttgaacggtcagcatcatcttttgctctttcatgttatgtgttggttcttgcttaactgttaggatgattgctgtatctttcgtcattagtgcaaaatccagacttatttgtatttctgtaagtgtggttatatctatattggttattttacagatctgggtaaattgaggaatttaaggatgtaattctttagttttgtaaaactgctgctcttccctggtcaggtctagaaatggctttattattttggatctgcgaggatatattgtagagttccctctaactttytggttgaatgtcaccttaaaaaatgggagattattcaaaagtcgaaacaagtaaaaccttccaaagcattgtatttcataacaggagacctttctttttcttgagtgtgtataaatattttttgtcctttttgtgcactggccacatatattgttttgaacgaaagactcttgggcttctcaagtgccatttctcttccacttgtggcatgttcttttagtcttctgcccattgactgagacatgttagattttgggtctcagtggctctgtttagactcggtgtttaaataggttttgattctttaaaacacattaatcctaccaattgttaaggtgttttctgttttataattttattataacattaatttttaataaaacatttacaatatgaactcatatcttgctaaaaatcctataaaaagcatcagcagtccattttgcttcactctttcccttagtacattctctctctctttctctgccaattgatgggttgattcttttggtatttaagtacctattttgacatgtttctaaattgctgtctcctcattaatcttattccttttatggaaaatctgagtttttaattcaagaaattttacatgcaagaaatttcacttctttcagttaatgtagagaagtagattgtaaattttctttaagtcagaattaacttggcaaatttctccttaggattggaacactaaacatatatgtcaggacattatacaattatataattaaagcactgatgttggtgaaacttgtttcttttactttcttcattatgttgggtattataatgtttgcatgttttgtggatcttttcccagtttctcaaagtgaatactaagtttagctttgtacttggtttctctcttctccttgtacctcttcttttttgtttaaaaaacaaacgcaataaaggctatgaattttccctggagcatgtttttctgtgcctccagagttttttttatatgaagtgctattttcattgttttcttttgatttatttgtctttaatttatttattttatttatttatttgagacagagtcttgctctattgcccaggctggagtgcagtggcgcaatcttggctcactgaaacctccacctcccaggtttaagtgattttcctgcctcagcctcccaaatagcttggattacaggccctcgccacctggcccggctaatttttgtatttttagtagagacagggtttcaccatgttggctaagctggtcttgaactcctgacctcaagtgatccacctgcctcagcctcccaaagtgctgggattacaggtgtgagccactgtgcctggcctaattttctaattttcttggagtagggtagccaatgtaatctatacaaacattttaaaaggggtgttttaaagcttatgttaccttatgattgatttttatcagtgttctatggatacatataaaacttctgaactttattcaaggatagcattaggagatacacctaatgtaaatgacaagttaatgggtgcagcacaccaacatggcgcatgtatacatatgtaacaaacctgcgcgttgtgcacatgtaccctagaacttcaagtataaaaaaaaacgagatagaaaaattctacgtataattattaaatgagcgtgtgggttgttttggtcaattatactgtgtctgtactcattgtgttttatgaggtctgtcaatttatgacaaagatatattgatttctcatttaactaagtatttttaaatcttcttattaaataccttttgctttatataatttagatttttacattttttatcctatttggtactctcaacgttgaattccacatgatctgatattaatctagcactcatactttcttttgggggcatttagctgatatttctttgcccattccattattttaaacttttttcaatcaattgatttaaagtatttcttgtaacagcctttatctgatctttgtctttttagcccagtctgacagtttattttccagagggagaattcagttcttccatttttattctaagttatacttgatcttattactgtcttttcaccttgttcattattcatatttgtgacttttttcacttttcttaattttgcctatattttcaagttgatattcattttccattttccctttatgtgacagttctgcacttttccatttaataaatgaccaccttcctttctaattgctcataatccaatttttattccactttaacataaaaaaagataccagcactttctttcaccttgacaccctaatcctctttcattcctaaatttctgtggaaataatttagttgtttaggtccagattgttagacttttctgtgtcaggaattcatgttgaggacttatattacagtttttttttcatttagatttaaatctgtatattgtgcaagatacattttacccctcatttcttcccttcccacacataaaacgtttctggttcagttattgtttgactagactcttttctcaagtcctttcctttggcggggacagtggttgatgtgctatttgaattcttaaattttggcaaatacttctttcgcaacagactgtgtgtgtgggatatttgggttctacttctttttctcccagctgtctggatgttactgttctttcttctagatttcagtattacaaatgagaagcacaatgtgagtttaattattattcaattttaagtaattattctttctggatacttgtcaggtttttttttttctttccctttttttttaagtatagtgagctctgtgagattgtaattcagccctctctttagtttatgaaaatttttttccatattactttaattattacctcttctgtcttttctctttcttccttctggaactcttcttatggctgtatgttaggtttccttgatccattcaaggctcttctcttttcccattatgactttcatcgctttgtatttttactttgtgctttgaaatttcattcatttgatcttttatactgccagttagcatcgatcttctactttatctactgaattattcagcttgagaatataaatatttaaattttagtttttaattaaacatttttttccagaagttattttttatacttcacttgattctccttaagtagtcatactgcttttgacctcaatatttcatctttctcctccagaaaatctgttagatctgcttcctcctatttcctcccacccttaagtatgtcacttatatgtgcattgggattgaggttgagctgttaggggactttaggctgttgtaattctataagtgatgaaaggtacaggcatctcaacctgcacagtagcagcaagcatattatctatttcttgtttatacacctagaggattctgtgccttccttctgatctccttacattctgcagccctaagagcagactctcctcctgtatcaagtgccttctgagtgctgggaaggctggccatacctgtgtgcgtgaaactctcctggaagctgggtatggtggcacgtgcacctgtcgtcccagtttgttgggagtccaaggcaggaggatcacttgagcccaggaattccaggctgtagcatgtagtgatcatgcctgtgaatagccactgcattccagcctgggcaacacagcaagaccccatctctaaaaaaaacaaataaactcttttgggtcaagcagagcaaatcctgcaccaattatttttctcaagacgcccgttagctcgtggccacattcttcaggccactgcctgctgcccccagagctaactagttcaagagacgtaaatggggttagatttgggattgaagtgggaaaagtaaatcaaattcaaggcctcccctgaccccagaattctgaattttaatactccattcgtagtttcagttagcagtaattgtgcctcgcataaacctcattggctatgatcctgccactgcacaragctatttgtagtttcagatggcttgtcatccctctgtgttattcattgtgtgtttattgacattttagaggagacttgtattttggaaccttacctttgactgtcacggtttttcctacccctacatatgcataacctcttggaccacastacaatttttaggaagtgtccttgtaaaaatgcagtttgaacaaataaacttctaggagagtttgttggttttgataagtaaaactcttctgggagagtttatttgtctatatgcaaatttcattgaacaaaatatgattgatctgaaaatctttcacaagacagaagccagttaaagtagaacagagaccaaaaataagagggatagccagcgggaakaaacggaagccaagaatcagctatgagttgtcagtggttcttaaaagtagacttggagataacatggaaactgaaagccacatataatcagaaaaccttattctggccagtagttctgatttttttcttaagtcctccactkgagttgctgacaagtagtattagaagagattaaacattaaagatacccattctgttccaaaaaattaaaacaaggaagcattcagtgcaatctgaatagatgagagaaaatattgtatcctatagtcacaggttgtaaagttagtgcaaatatatgtatatttatgtttaaacaatcatttgccttaaatatttgagatttgaattatgcacacgtgctctctgtgttagattgcttgatattcagtttgtcctaatcagcctcaggcgaagagaatttgaattatacatgtgtaaactttacattgaatgctaattagtctgtgctgctcagtggtacttaacgttgaggttaatggttaattgaaaaatttaaaaagccagtgacaagacccccatgtatattatatatatatatcagatatacatatttatatataatatatatatttttatataatatatgtaaatatcagataggctgaaaatcagcgaaagcttttaatctgtgtcagtgacagtttaatgtctggctgtgtatctgagccactgttttacatttattacatgtacaaacatggagactggtgacaagacccccatatatatataatatataatatatatatataaatatcagataggctgaaaatcagygaaagcttttattctgtgtcagtgacaatttaatgtctggctgtgtatctgagctactgttttacatttattacatgtacaaacatggagactggtgacaagacccccatatgtatataagtatcagatagataggctgaaaatcggtgaaagcttttattctgtgtcagtgacaatttaatgtctggctgtgtatctgagccactgttttacatgtattacatgaacaaacatggagactggtgacaatatatttgaactttgacattggtcatgggcccaggacaaagaaaatgctgccttaaaaactgctctctctccttttattttttaaattttatttaagacattgttatggaatgtgtttgtcctcttttgttctcttagcttaaagatttttgaggtggtaattacaaaaaaggaaagaacaagaatgtctgggtcacttgcttgtaccaagatttattgagtggataaaaaggtaacagtagacattcaatacccagaccaacatgagaagtaaaacattataaaaagacatatttctagagttttgtacctagcattatatgcatgtaattaaaaaaggaacttaacttttttatgacacaagaagctgtgtcagataccaatgtgtaccctgaattaaagaattccagtttgttctaaagaaggattttaaaaatatatcatggaaggatctatacagaagttttattttccttcctggtgctggagtgttgctgttttttaatacttaacattagaaatatgttggtaggttaaaaattgtatgcttttaaaacttatttacaaaatatgtgtataatacttcatataggttgaatattaaacagtgatacttgagtattctagagccataattagaatactgattgcaaattttcaaaaatcagtaagtcaacaagcctattgaaaaaaactcaaggatattagatttcaaaatgttgttccttaatttggtttgtccattatactttattttaattattcatagtattgcttaacatgacaggaaatgtaatagaatttataaaataatgaaattttagtaatatgaatcctatctttagaattttccttttaaatctcagattatgatgttttctaaggaattatctaatttagtgcataaaaacaagtctttgcttagtaacttcattcagtttagaattttgaaaccactccagaaaataaatggaataattttgttatatgtcattttgttgttgagcaaatgagacaaaaaaaaatttattaagaaaccaaaaaatatatttctactaatatagaacaataagttttcatttggatattactttgtgatgcttatacatgtacctatatatatattttttgttgttttgtttttgcatatacccaataagtagattgttcattttagtgaaaagcatagcccctgcttgcttactgtcctgtgtcatgctagatatttaaggaatataggattggtttacatatcattggcttaaatgggtgagttagggtgaaagataataagcaagcctgaagatgtaaattctagttgaaaatctggacatttatttgtctttggttccattaggaagtggaagtaagcaagaaagagctcttcttttagtattgatgtggatttttgcatgtccaggatcttctctgtttcttrttcttactattaatggtagaggttcacaaatatggtaagtatggacttagattttgttcctaaacagaaagattatatataggttatatattctgatatgtttatatgagtggaaaaattgatcatatttaaaatgaaataggcagcaattacgtcttttctcatgatcaaaatacagtaattgctaaagactttctagtccatttgatggttaggtgaaatctttgttctattaacttccttttatttttcctagtgggtgagagatacagttcttaactgatgaaattttatacagcataaaaataattgctttttatctcaaattgagaattactttatttcttttgggggggttttatgattccttatattgcaaagccatttgaaatttaatgtaatctgaccttactatgtgaagctgggctatttttctgcctccttctcaatcttgttctatagctgggtgttccccaaatacaatctgtgctttgctccctgttgttttagtttattctggtccttggtctcttaagtacctttccattcttttcattctagtaactacctgtttatcctccaggacctaattcagatgttacttctttatgaatttttgaattattcttcgccccatgctcccaacagaattaatagttcccgtcttttggttgtcaacatctatcaatcatagatacgtcatagttattaagggtggggtccatgtgttattcatccttgtatcttctaggacaagcagtagttaacatttgttgaattgaaatgttttaaaactccatgcttcagatgattaagaaaacagctttcctcattaaattatttgataataacctactctcacctgtttctcacatacactattctcacctgttatattgtggtttttggtttatattaaaatatttttggtattttaatgatagcttgagaggaatcaaagaaggatcattttatgtagatctcttttgactcttcattgctatttagttttgggagtttcattttcttctcccctttttgcaggaccctaataggagtattcataccagcagcagcagcagcagcagcagyagcagcagcagcagcagcagcagcagcagcagtagcagcagcagcagcagcagcagcagyagcagtagcagcagcagtagyagcagcagcagcagcagtagtaccagtttttcaaagcctcacaaattaatgaaggagcacaaggaaaaaccttctaaagactccagagaacataaaagtgccttcaaagaaccttccagggatcacaacaaatcttccaaagaatcctctaagaaacccaaagaaaataaaccactgaaagaagagaaaatagttcctaagatggccttcaaggaacctaaacccatgtcaaaagagccaaaaccagatagtaacttactcaccatcaccagtggacaagataagaaggctcctagtaaaaggccgcccatttcagattctgaagaactctcagccaaaaaaaggaaaaagagtagctcagaggctttatttaaaagtttttctagcgcaccaccactgatactcacttgttctgctgacaaaaaacagataaaagataaatctcatgtcaagatgggaaaggtcaaaattgaaagtgagacatcagagaagaagaaatcaacgttaccgccatttgatgatattgtggatcccaatgattcagatgtggaggagaatatatcctctaaatctgatgtgagtagttcttactggctttcttcctttcccttattttcagattttattttggatagctttgtaataaagaatgagggaagaaaatgaatgctgagccataaaatggtagcacagaggtagatctggcctagaaatgcatttccttaactaatgagaaggaagaaatgaagtcattaaggaatctgcagaattttaggctgttatttaagttgttaaaggaaagatatttccatagcattataatgggtcatttgaatagcagcagaaaattttgttgctcatcaaagcttggtatctatgctttccaatgagtgatgacttaggaaagtgagaagaatataataaaacttgaatacaagggaaaataaatttaaaagagaaacttagaaaatattagggctataatgttgatgttttgatcattggaatgaagtaacatgtttatgttgatagaaggctggtgatagtatttttttaaccagttttattgaggcaaaatgatgtaacaatatactacacatatgtaaaatgtataatttgataaattttaacatttgtgtatacctgtaaaaccaggcagtagcattttgaaagagaatatttaatatttttcttcattgtttagccactgatttggaaggggtggggtatgtgatcttcattcactacaagtttttgctaatgggtaggattatcctttgtggatgcctaagagagcatctgaccatctaattcccctaaaaggtgttttttgatattggggtttaaacttataattacagattttcagcagtggaagggattttcagattatctattttaacctctgtagtaaaccttacacttctagtgacagggttgttactaattcaaaagtatttgataacgtttttgaagaataaacattactttgaagttatctccttacttcactattttttctaattttggccttttttcagttacttattagtaatgatcagtcccaataatctccttacattggcttgaccgtatttctaggcaatggtcaaggaagctatctggctaaaaataactggcaatcttagaacacttttctttctgtcccttgggctgcccacagatgtctctagtttaaatgctggcaaaggctaggagggcatagtagcagatttgctgtgccgggtttgtactgttctgggtagaaagccagtcagggtcaggacatggtgctgacactgatccccagtggtccacagatctccctactctctatagctaatctcgaaattttggtagaagatcagattaggacagtagcatataaaatactggacattgggaaaatttgttccagtatttggtaaaggctttatagtcataatttatgaaatggagatgagagttgaatgtgtttgttccaataactcaagtatttatttttccttctttgcttcttacctttcctcttaacttgaagcttattcttaatgcagatgttacttggaccttttttgtgtgtgtttgacttttgtttccaatcaccctgaaatgctgttgggttgtgattattcaatcaaaattgtcaaattttgcaactttgccattttatattctaacacattgcaattcttctagtatagaggttttcaaatcatgggttgtgattcactagtgagctgtgaaataaatttaacgtatcactagcattaaaaaaatcagaaaactataattagtatgggtaagtaatggcttatgaaaattttatttcagagaaggtgtgtgtgtttcttatagtggtcaaaattttgaaaggcacctttttagaatgtttgccgatttatgagaagaccaaatggcgttcataaagcatcattgaaagctctttctacatgaaacacagatggtcttcctctttaggtaattttgtttattctccttttgtctgcctcttgctccctcccatttatatatgatttataaagtatgtcttccttttaataaaattcttgttcaatttgatgtatttattcaaagtataccttgaaaagtcttctggaatgaagagttagaattggaaaactttacagtaggtagtaaattttcaaaatggtatatgacatattagagccacaaatccaatgattacaatagtagtttttgtaatgtactctgcatagcattgctgagaaagcctgtaaagactttcaggtactatttgtgtataaaacccaacagccgtactttccttattagtcttctggtactagtaatggctttattgttgttgctattggttcaatacttgaaaagtaggtagcgtaacagaagagaattaacaaaagtgatgtcatgtaaaccatgaacccaaaggcctttctatgagcaaaggaaggtgagagagaattgaaattccatttatccagtagaaaagacaggctttgtttggactgtctcctacctgtcctacctggcatccctcctgccagcaagacaaaaggaacaggggacacttgtaatggagaacactaagctatggactgctatggactgctagtgctctccgttacaagtatcccctgttaccttggctagtaattgacttggtggcttggggcaggcccaacttcaggggtgactgtgcacattgtcctagttgtgtgtctgcctctgagtaagtgtgattagatgacctgatctctctaargtcctttccagctttattagttgaatatgagccagattcgtattcatttgtgggacatggggtgatgggtgattttagacataatgggcagagatcatggactttggaaacagaaaaaagacacaaataaatcagaagaatttgaagtataargaargctggggaaaatgattatttgtctagtatgtctataaagaaaacatctcgcctcagtataggtcttatagtttaaaaagatgaacattttaaagaaccttttctagaatcaaattctactcargttttatataaaaatgtcagtagtattaagatgggttaggaagcttagattattaattgatatggtcctttttggtaggattttcrtatcctttgtatgtgagaagagagaaagaagttggacatccatggtttgtatgtctggctggtgtttgagggatcgatcacttatttgttgataagtgaaaggtaggtagataggtaattagaattctgctgtctggtgtcagacaggctgtgtcttaaatttcagtgccactagggatcttgggcaaataatttaactttctctgtttcttagtttcctcttttataaaatggagatcataatagtatcttctttgtaggattattgttgaaaatttaataaatcaatgtgggtgaaacgttaacacactaataaaaaaaatgtaagttagctattgctatgtatgacttgacttctgggtacctatataacctgtagctttgaaagagattttttctctttcaaactcaagattttttctcttgcagaactctggtgtcctttttcaaggttgtgggtttatatgctgcaatatttggtactctaagccactttgttttgagttttgtcttttgtcactttgctctgaattttgtcgtcacaaggtgtatggtcttgatgttgatatggttctgctacatgatcaatgtaaaaatacaagataaaaagtcttaagttttaagctgaaagataagccaaagtgtctcagatctttcagctttttaattaaatgagataaaggacaagaacataccaagtactgcactgggtaggcacttggtagatttttgttttttcatttttgttttctgctgttgctgttaaaatatcctaagaaatgatttatctttgagttactgttaatataactgaaagaataatttttaaatacattttgtgattattgaaatgtttctcmtaaagagatgtaatactgtcacatgaaagtttgtcaacaaatttcccctacagaagaatttggtaggggcttggataaggtagacaggcagaaggactgtgttatagtgggtgagcatttagcaaatacagaaagcatgataggggaatgtttttgttaagaatattttacattcaagaactgaggctattcccattagagtacagtggttcctggtttaggagttcatctctttggggtacatgatattccactgtacttactgtttagtaggtaagtgactggtgactgacactaacagctgcaaagggagtgtatcagtgtcaactaaaggtttataattgtattttttattaacctgcttaaactttaattgataatagggaaaaaaccaaatatctttcacctcttctgtaattcctgtttttgtttttcatataattttgctcctgaagagaagtgtatagagttgatcttgtcttctgatatgaagaagtttggtattcacagcagaggaggaaaaaaacagtaaatgaaaattgagataaccacgtatgatcagattcagttatggtggtagttttcttatcattgccttcctctttcttgccttactttgaggatttaatcataattttaaagtgaagaagtaaaaagttttaatgatctttccctgaaaatggacaaattacatttggcaaaatgttacatccttcagcctgcagcatgagaagagagatttcagtcatgtcttttgatagttggagcttaccaaggggttttcttggagaaaaccttcttgaaggagaaaaacaaaatctcatcagttggcagcatttttcccaagggtggatggtgattccgatgcaggataaatgctttaaatcaccttaccagaaatttctttcaaaaagaaagaaggaaaaaaaaaacttcccttcttttgttgtttctcatttcctcccgccccaccctgttcattgccctgcttaaactgtctggagctggtagtaaacgtcctgctgttgaagcattggccttaggtttttatgtgatggaaggttgttgcagtcagagaagaaggtctttattgtgttttcaaagtggctttttaatgacttgtaattccagcacatgcaagagctgtaaagtctgtaagtatggtgagggagcagctggagaggccattcattaaagggctgccctggctctccagggggcaggttctcatcggaggctcctgttttctgtgttttataactggaggtaaaaatacctgaacggttacagttcttcctctggtaaattctgctcaatgtggaacattaattgaaattaccagacaaaagttaactttgttgggtgcatggagatgtttcacctgtccctattttctaacgcattttttttttctgtgttgggtgtgatcacactgaggaggaggcagccttgccaaccagctgttcatttattcatccatattcctggtttatttgaaaaaagcagttaaaaaggagattaaaaaaaaaaacagttggaggcctttttgtttccgtgtttcagtacatactagggccagtgtggtatctcagttcttaaattaaggaattccttagaagcccttgggtagcagaaggttgtgaatacacaggggctctatctttgcaaagctggttgtcatcaacaattggcaaaactcagcatttccactgacatgtattgagccagaatctctcttccaataaattctgtgagccttctttaagagagctacatcacctattcaatgcattattgtttcttgctttatgacctatgcatttgatggaattatcccatttgtcatctttagacataaagccaacaatgggactcaacatgggctttgcaagactagcattaccataccacagagatgccttatagccatagctaaacttgagtgtttagtctgttagtcacccttctatgtacttaacatgatttaactcattcacccctcgagacagctctgtgaaataggtattattattattattgccattttatggatgaaaaagctgaggctccaagatgaagaatcttccccaaggttgccatctttagaagtgatggagctaggatttgaacccacttgrtaggtagtgtacctacctaagaggaggttggtggtaaaacaaatcttattcttccttggattcatactaaaattgtagaggtgtgctacatgaagttggcagtgctgctgggaaagccttgaatatctcatgttgtcccccatatgaatcctgtttctttgacctattggtttgggctttaccagtggccttcaggaggtgacaggttgtcctcataggtggatttggcatgcagagccaggattgagggaagagctgtgaaacatccaggagcctctagcttcttacacatcctcacttaaaataaaactgactctcttgggtctagattgcaccttattatactatatcatcaggattatttttctgtttccagagtttttcccatgtgcttttgcaagagaatttatgtttcacagagctgagctgcaatatcaacctttcccagaagatgccaccaaataacaaatggtgtcytccagtttggagactcctttctgaatttcctagttacattttgtaaattcatgttataacctctctaagttattcaaaatgtaggctgtgctttctttgaattaggagacaagataatgcaatggtaggagtagacagagggttgttttcttttggtgtctatgtaattatttaaccaagtttgagaaattgttctcagagggttacaatttatgactgtaaactttgcaagcagtgtcaaggtccacaaggaaaaatcacccctaagcagcttccttaggtcaccaaaggtgattgtgcagtgatatattcccagataaagtcaaagatcctgctattaagcaggataatatggagaagcatttactaaaatgtttgaagacaacacttttatctttgaattctgaaaatatagaggttagggatgtgggagtacagggataggaagaaatattcagaatctgtgacacagaaaaggtaattttcttgcctttcacggtcatagaaggaaaatacatatatgggtccctcaggtattactttaaataaatagagaaagaaagaaattactagagtggccctggtttgagacctcagtgcttagaatcacggtactggtttttaaacaataaattgctgacctttgctttattatgtgacactcctatttttttaagtatgataaactatcatgtcactttaagttattaaaaacattttcttctagatgtgtttaatggtttgtaatattctttcattactctaataatgttcagtaacgcttaaaaatatgtatgtggtaggtacttcctatgtacggtcactgcatgaggtggtccagatagtacaaagttagaatttgagctggtctttgaaggaaagaggcatgaattagtagagatgagggtgtggggtcagtggragaagactttctatttatttttgagacagggtctcgctatatggcccagactggtctcaagctcctgggctctagtgatcctcctgcctcagcctcccaagaagctgctgggggtacaggagaaggcttttttttctttttttcttttttgttttaggtggagtctcactctgttatccaggctggagtgtagtggtgcaatctcggctcactgcagcctctgcctcctaggttcaagcgattctgctgcctcagcctcccgagaagctggaatcacaggcgcataccaccatgccctgctaatttttgtacttttagtagaggcgggatttcaccatgttggccaggctggtctcaaactcctgacatcaggtgatccaccctccttggcctcccaacgtgctgggattacagacatgagccaccacacccggccagaaggcattcttgataagaggaaacaacttggaaaaaaacacaaacaattgatgacaaattgtgtaaatagtttgtgttatcctctctgagaatgaagaagaatctcataaataaattcctgcagttaatttatcaaactggtttactgggaatgaaagaaaccttattgaactctactccctccatggtagacctgtgtgggactcttttattttatatcttcttacttaatctatacaataggtaagatagcttttgttctcatcttacaggtggaagtgacagagcaagaattcgaatccaggtctgaataatgccaaaattcatgcttcttgtattgtaccactgatgattaaaccttgttcagagggaagtcatgtcgaattaaaaccactgtgatattgactaaacacttttgagaaaataaaatttagtactgttaaccttcccatcatctgacatcctctgaccatctggtagtggtgccacattctggtgaaaagggaagagtaagaaataaaatgtagccacagtacttggaaacttgggtgtgagtaatggactctggcatgatttctaaaatgctgattgagtcttgctttatgtaacctaatatcattttctgagaagcagaattgcagaaagtactgaaaagctgtggtaccttagagtctatctgagggaacttttccctaatgttattaggttgtttcatatatctcatttctagggccaaggacatggccagtgttactacgagggctccaacctattgtattgatattatattgtattatctaaaggttgcactcatgcatctccgggtggattatgtcagaaaaaaattataataaaataaataaaggttgcgctcatggaggatctgaggaaggaaggtagggcttccttccttcctcaggaacatagccatacctggccagtcaattatctttgtgggctcaggaggagtggtccaggaagtgtggtacaagagtctacacttggaataaaaagactagacaggctgggcacagtggctgaagcctataatcccagtgctttgggaggccaaggtaggaggattgcttgaagccaggagttcaagaccggcctgggcaacatagtgagatcatgtctccacaaaaatatttaaaaattatctgggcgtggtagtgcacgcctgtactcctagccacttgagacgctgaggcagaaggactgcttgaactcaggagctctaggctgcagtgagctatgatcacatcactgcactccagcataagcaatgtagtgagaccgtttcaaaatcaaaaactaaaactaaacaggtttagctttgtagtagagagccrtaaaatgtggatttaataattagtaatgctcaccttattatagatgcaaattgccattcaggtattagttcaagcaaaatattaatgatgtcatagatgaagacagcttttgttaggtaattttatcaattgcattatgtgaagacctgatgttggcaggggttcttgtaaagattgggaggcaaaactgcagtctaggaacctagtgatttataatccatgatcacagaatgtgtttttattcttgcatatatttctaaaacgtcatttcctatttggcctaacgcttcattttattgggaataaaagcagaatctttctcaaagtccaccttagtttaaaatgtttagtatctgactgggcgcggtggttcacacctgtagtcccggcactttgggaggccaaggtgagtggataacttgagtctaggagttcaagaccagtctgggcaacatggagaaatctcatctctacaaaaaaatacaaaaattagctgggtgtgatggttctcacctgtagtcccaagctacttgggaggctgaggtgggacaatcatctgagcccagtaagttgaggctgcagtgagccatgattgtgctactgtactccagcctgggcaatgtgagtgagacactgtttctgaaaaacaaaaaaaagtttagtatctgatcaattctactcaagataacctaatttctagggcatttttagtaatataaagtattcactctattttcacgtgtcctagttcacattattttgcagcgttattttaatttaaagtgagcctcagacttgttgatcttgtggtgggttattttaaagtgctaagttatctgatgatcttagttaagaatcagacagggctagcacatttactgttgtttaccaagcctcctgtcattgtctatcaactttcagagacttgtaacaagtcacttcctcccctttaaagataagtcatgcatagtcctctgtgttttgtataataaaccaataagcctaatagtttacctcctccaaaaaacaagatttgaaggagggaggttgtgtgttatatgccacccatctctttatcttcattgggcctgtagatacattaacagctctgtggtctctcttctgtatttagaaaacctctcaaggcttaggtactctttttgaaggtttaagaccaaatttagaaatcacatacagttttatacagcatttatttcatgagttagataatcacagagtttttagaacaagaaacttcagaaatctcattcaacaacttgaattttgcagaagagaactggaagccaagtttaataacttgcccaagatcctaggggtctcattgtttttttttttttaaaagggggccctcggatgcaggcccccagttggcatgccattatcgatcatttccagtttgcagtgattcgcacatccttcactcactttcccaaactctcctcctctagaacattttaaagtggttcctagtgagttgttaccatttaaaaactagcccttacacacttatttaagcctgtcaggcgtacggccaatgtgacctcttggtccagcatctcagcctgtgcccctatgttgaatgaatgaacctcatatcccatatccccagctgaattccacctgcagtgcttcatgtcttgtctaaaaaagggtagggtgcaaatcccaaaggatgtcatgtaagttaattggtgagaattttgatagactttgtgtcctggtcatcctttattgtctctgggatattgccaaccagaataatcatgacttgatgtatttcaggggggaaaaaaatcactaggcaaaacggaaaatgacacatttaggtatctggcaaatcaaaagtctcagtattgtttcataataaaaacatggaaagaggttttaaaaactccagtgtaaatgaagcctttacttggacaaactgctgttctcagcggacgaaacccagatcctcctccgttccaccctccaggttcttcagtatctgactctgtcctggattgttcttcttagtctatctacaaatataatgagtcatccttcagaccaaacatacctccctgcaactttccagtgaactctggtgctttttagactatggcaccttcatatcctttctttctctgatggacatctcaaaagctcccttattcctcaacccattgtggtctggcttttgctcttgaaactgttcttaaaactaccgctggaaaagttcactagtgccttccagatcctaatgtagaaaccatgtcctaagcattgactttgactttactggcacttttgacttactttttgcttgattccttgactctgttatacctaccttgatctcactctgtgtgagtctcctttacctgctgaccttcctctaccaccattaagttagccattctcagtttctccttttctattatatagtcggtccctggacaatcacctgttaccaatatattttttacatcttcttcaacgccaactattctcaaaagctaccaactggacaattctgatcaacaggtacttgaaacagaacagatacccaggtacaacatattctaaagtatctcttgcagacactgctagttatctattcaatatccattatcctcttattcttctaacagaatgtttattttattataacagtaacatgcctaacaaaaaagtttccccagccttccttgcagttagacattattctgtgactgaatctggctaatgagatataaatggcagttattaggtgggaattacagggaagttcattaaaaagaagctgactcactggtaggtaccattttgtctttccctcttctgcttcttgcctggaactggaacttggaagtgatgaccggtgctctagctgccacgttgttagaagcatatggaaagtatggaggaacacaaagacaggaaggggctggattcctgattcttgaccttgtagagctgccatgctgatcctgtctgtcatactgggtttctcatttaatgaaaaaaacaatgttagttcatgatgtatacattagtgccaggtgggcatactccctaactgatttagctgtacccattatcccaaaacaccttcctgtgttttctaattaggtaaatatatattccatctatttttattaacctaaattagaaaatcagttattaacatattttttcaaaaaatacttactgtctattatgggttattgggcactggggataatacaatgcttaagataggagcagagctttaccttcatgtaaaaggaaatctataattttaggtagtgattggtgctgtgaaaattatttcttttccctcagatcttatttcatttgcttatgattccttatcaggtttgctccaaaaatgtctgtgactctccctttttctcctcctcctgcttcttctattcagcgcttagtttggattcttatcacattaactcaattgaggttggagattttgagttgttcttcctatctcctgtctctttcctttctcaggttcttctctacaaaactttctaaaatacaaattctagaagaaaatatgcaaaaggatataaatcaactagttaaaattatggtgttatgggtcactttcaaaatattatcttcacaattggcagtttaatgaaacattccatagtttcaaaactgcagcacttgtatggactaagtaccaaattctctttaacatgttttttttttctttttgtaatccttcattatgaagattttcaagtatacatgaaatacacaaaatagtaaacccttcatggaccatcactcagcttcaacaattattaatggatggtcagttttgtttcatgtgtagtgccatcttctcctagcctggtatgatttttaataagatccaagatacattatttcatttatagatattttaatatgagtctctaaaagataaggacttttttaaaaaacagaactaaataccatgatcacatctaaagtaattagttaagtcttaatatcatcaaatatctagccactggacaaatttccaatggaatcaaaatatcgtaagtttttttctctacattttgtttgaattgaaatctaaataaagttcacatcttgcaatttgtaaaagtattacatttctttaatctataggttctccctcatctctcttttttcacatgaagatgcaagaggagaaaaacttggttgtcatagaatttctggttttggattttgttgacagtatcttcatggtgtattttctgtaagtcaatagtcaaagttagaatcatggtcagagtcatgttaggtttttttgtttgttttagttttgtttttctgggccagaccatctcatgggtagattatattcttttattaggaggcctataatgtaagattatctctttttttttaatgatgttagcaaccattgatgctcattgctgtataagcattaattcattagggattgtgaaatgctgatatttttgttccatcgttctttcttcatttatctgtcagagttcacctataaagaaaaactgccccttatctactttctccccccaaaccagcagtagtttgtatagaaaagtaaaacacagtgcttgattctttccatttatttgttttcaaaagaatgactttggtaccctagcagcctcgaacagtttcacatgcctcaaattatattttaagtactgcttttaagccttctccagtctgaccgtttcatccttatctttctttcttctcccctatactttagtcatcgtaaaatattagcaatccatgattccttgactattccatgctgtctcatgtcccagtatattaccctgagtcctttatgacctggttaactttcacttattctttgaaacttttctaaataatctgccacaccccaactaacccctccctcctttgtgcatctaccatgtatacagtttatgtatacttggatgatgattgtttttccgtcatattaaagtgtttttctcctgaccagtggactattttgagggcagaccctgtctcttaattttctaatctcacagctctttgcatggtccctggctcttaattggcactcaacaaatattgagtttaatagtgcaaagatgtgttaatatatgcgtatgtatttatagttaagactcctcttaagtaattgatgcatgtctagtcgaggagtcttaactataaatatgtctgtgtaatctggagatggaatttttggtctgtcttctttatggaggtggactagacaggtcacatgagtgagagaactccctgtacaaataagacaagtcttggccctctcagaggtacacagtacagggtgtaagccacccttatgcaaataagtttatataacaaaatcctaggataaattggaggtcacagtaagcaagttgcataaattggatttcactcttacctgcccgggcagccccttgcctttgtgttggagtacataagccagccaaggagtgtgtagctcttgaaaactccaacagaaagagaagagagttgttttttttgtttgtttgttttttagctgatttcaccgtgaagggtattaaaccacaaaaataacacaggggcagcaaggaccacaaactaatcttttattgagacagcagagggatgtcagagtctaaaattccgagacatttgcttctctattttaaaaaagcaaatagttttcagagaaatttcaataacaggatgttgcagtgaaagaaatttctgcctccctatttcctataggggctgtgcaggggcatgataacatgaaagttatatggccaccttgtttttgctgtctttgtgatcgtgaaatatgattatattccctctaatgtttacagtgctcttgaaattattggaacgggtaaaatgccccttgtataccgtgtaaaagggacttgcttyccccacycccccmatttctgtgtcctcaggttgcataattgtcaagacagaatagctttaaattaataagcttaatttggctgttaaatatttattaaaccatcacatctgagtaactacaaccgtataattaaatgtttattgtagccatgtagctcatgcctgtaatcccaacatttgggaagctgaggcaggaggactgcttgaagccagccgtttgacaccagcctggacaacaaagggagactctaaaaaaactaaaaaataagctgagtgtggtggcacacaccagctgctcgagagactgaggtgagggattacttgagcctaggagttcaagactgcatgagctgtccttgtaacactgcactccagcctgagtgagaccctgtctaaaaataaaaaaaaattaaaaattaaaaatattcattgtatatgcagaagaatgaatgaaaaaatgcaaaagatataagtttctaactaaaaggggcaagtattgtgaaagagagttatattgaacactagcatagtgacagaaacaagatgtggaagatgaagttagttcccctaaaaattagggtcttagttgtgtctttgttggcacttgtatttggaaatacatatatatttaattatattcattggatacactgtagcatttctaagagtggttttaaaagagccattacatctatgagacaaaaattatacccaaatataatttatcactgtgggatgctgagattattaagagaaaaaaaatgaactctaaagacagcagtcatcattttagaaaggaagatgttatcacaaccttctgttttcttaaggaaaggcatagcctcagcacatgtactttgaaaccttattaagacaccctaaaacttaggtaaatatagattgatgggttgcctcctgtattcacttctggagatcccctaagttgtaatttgcatgctgatgggtcctgcagagctgcctttctacccagcttttatagggccctacatgttccgcagtcaaaagaagctcaagtaatgagcctgcactgataacaattctctccaatcgcctgaaaagcatactcactcttgccaatcgctggtgggtgctagcttatactgtgtacttctgctcccaaaagttgaacgttatactcactgagaagccaatgtagttgttcccaaagatatgtatcagttgttcttctaattatgttaattaaatgttttagaaaccaataatgtacaaaaagcaattgtttctatgaaaactaagttgaaacctgatggggaatcccttgaaaaaatatgctttcaaataaggtataaaacaccaaggcagaaaaaattatcagactctagaaggactcctgcgttctaacagctatacaagtctctggcttcttgctcataaatgatgatcgtagataatgcattgagtgtgatttatctaagaaagatttttcagaccccactgaaaactgcttgattctgcatcaaaggattggttgattaatgtgtatttataaattttcagttaaagcaaaatatttaaagtgtgtgtatgtgtttaactagttctagcatctttcacctgacagatctccactagccagaaatcttgattgtgcctcaccttggattgtggttcttttttccttgatttttgagttaggataagccttactccagcaacaacaccctttgttgccttttctttcttccattattccattttatcaatgacagtgtcatacatacctcacttcctgcatgcatttctttctagatgagtttgtagattctgtcagctttgacggcatctacgcccaccaacatttcccttctgaacttgtgtgctcctgtaaatatatgccaggtggtgcaggaatctgcttggaaccatagcactttgggcccaggcaagcagattgtccatattttggtgaggaacacaaactgtgttttataaaccaattgaaaaactaacaccccagaaagactcttgagacctgggaaagggccccaggtctgacagtttaactagctctgtgatctggggcaaaatacttattaacaactttgaatcttaattttataatctctgatatgtgaataatagctcacaaaattgtgtgaatcaaagggtagtaaaaagtacctggcacatagttggtagtctgtaaattccagtagaacctgaatatttctagtttccttctgtcttccctctttccttctttccatgccttacttcacatattgttagggggactatatgtgtaaaagagttcccaaagtttaaagtgctactcacaagatgttaaaagagatgactttctcttaaaaaaaaaaccctgaaaatatggtttatagtaggcattttatccttttagttgatagtttctgttcatgaggtgacattgccattatagatgctgtattcgtatgtattagttaacttttgcctttatgcttcatcttgtctactgaatagaactgggaatttaaaggtagggattctgctttctccaagaacaagcctatgctgtcctgaacacaggatcctgcattcagaaaattctacagtacagttgttaccgatggtttccttcatcctgtttacctgatgctctgccatcagtacttttgttggctcttcaacagcttaaagcctataaaagtgcagacttggctggcatgttttaatctatcggagggcatgtaatgtaccacacaggaaagatttatgttgctttcattatatgtggttgtgaaccatgtcactaagtcaaaggaaaagcttttaattattactgaaaggacagctaaaaggtgtttaacctaaatttctttcctgaatgccaaatatctatccagggagaaagatgccaagttttttctgatgagtttattacagagcagtaaacacatagccaacatgaaaggcaaaaacagttttgcattagattcatagctgcatgttttaaagtagctttaaaagttaccccattagtaccttttaaagctacacataaaatgccactttacatctggcatcagatctattaatttgactattatgaatatgtaggaatatttttgaaaactcctgtggtcttgtaaagcctccaggcccttattagctaaaaaatcttgccttctgccagggcatgaagccaaagtaagatcctaagtagataacatttagcgtttgaaataataataatgaaagagaagtccacatggagctttcaagttgttacccatttgaaatacccagtatggagttggaggccaggggagaagattaagcagatgtcaggtttgtttcagcaggatgcrctgcttaaccaccttccctccaaagtgctttgtgcctagcatcctgggaagggcagtgactaattcatttgctccatctgttgccttgggagacgctatggtttagttcctctgacgcttagcttcacaggtggtgaccattgaacataggggagattacgccctttccttactcttgtgggacctttctttcacctgctcttctctcacatgggtcaccttggacggaaacctcttcccacacctccctccatcaaaaaagaagttggtgggggagggtgggcacagctttttaaatgggcccattttaaaaagttgaaataagccaagatttcctgtttactgscatgtcattcttttgtggaagccttatttctccatactgtttctccagcattttattccttattttcttttctgagaaagagtttaaaaatacgttccatgtttgttacaaagtgtatcttacagccagtgtctaacactttgtgactaaaggtaacccccagaaaaggtgatatctctgtggtggaagttacaactagttccatattctgagtagatcagttcttgcctccagatagtaaagttgtacacccagacatgatgtctcctttgtggaccccaaatttacctagtgggaatattgagttaagttaccttatcaccatccctaatgccccctccttactgcactatcagaactaagacactgtagtagccttaaacagttaattctctaactcagggccaggtcactaattggctcagtgtctaggtaggaagaatcatagctgggtttcttaaagctgcggctcatcttctttttgcacagctagtgtcttattttgtgttcagatcggaagaactgctctgcctccctgcctccgtaagtggcaaatacccgaaagcttcattctaattctggaggaggtacctgtccctcaatgctccccccaaccctggacctttttctttgggtgtctgtgtttggtgtctcagcctgcatccagaagcctatatgagaatccagccagctccttgctgtgttgtacaggtgaaaattctataaactgcatatgagtcattttcctcatatggaaagaatcagaatcagggatggtggcattgaatgatttgaaagagttgttgtgaaggataattaaaatgactgtaaatcttttttagatatgaagctttacaagaatgataaatcttatcaatgatgaagtacttttaagacaagtatcaaataatcagaaccaatttattatatatgtttaaaaattggtaatgctagttataaatatatctcaagttacagttatcactttctcttgttactcttagttttctatgctcttaaaatagttttacctgttcttgttagattggcacttaaaaaatgcatgactaattactacataattgaaaaaatccaataatgacttttctcctctgtcaactagcattacttttatcacgcaataaaaagtggttatgtaaggcatagctgttggagtaaagaagagaggcattgcacatatttacagtcttcaggcactgaccttttcatagcatgtaacctaaaacattcagacctgtatttaattatatcagtgaatatttttgaaatcgaagggaaatctttatagcaaggtctactgtagatgatatagtgctacagttaaagatagcgttctaagtgagtaatgtgagcatttagcctttgaaatgcaacaatcagcatccagtgataaagtgagcataatcttctatgagtagtcctgacaaatcctcagattccagaaattgccgattggtaagtcctatagtgtttcccagtaaactctggaattgaatttgaaatacgtagttaaggaacatttggaaaagactgtggctgtcactaggtcctacctggttattatacctaacaatcctaatttctttattttttataaggttgactagagaatgcaatggctcatcctcatcagcatttttttttaattgagatggagttttgctcttgttgcccaggctggagtgcaatggcatgatctcagctcactgcaatctcagcctcctgggttcaatcaattctcctgcctcagcctcctaagtagctgggattacaggcatgtgccaccatgcccagctaattttgtatttttagtagagacagggttttatcatgttggtcaggctggtctcaaactcctgacctcaggtgatccacccrctttggcctcccaaagtgctgggattacaggtcatcagtcttttaatgataccttaggataaggtagaagaggacctggtgattcttgagatggatggatttgtactcactctacaaatgcatttaaagagtccatgtcagcctgtaaagagatctcttgcagagggttacagggctttgccttttgtcctgtcctatttgttatgtttattgcaaatttcataaagatatggaagctgtgttcaccagtaacccaaagctgggagggataatgtattcattaaccccagaattataagaaaaaaattctcatcgagtagaaatgctagggtaaacccaagaaagtgaaatttaacaaagataaatataagtttcttcatttaaaattaagtaattattttgattagtaaaggaaaagggagatgggccttagagacagtttatatggagatgaggaggatcttggggattttagtagattgtcagctctatataagctacttcaatctaagattgtattaatagaaaaattgtatgtcagtcatatcaaattacagttctatcatcttctcccgtcagactgcatctgggccttatgtttggtgtcacattttaaagagctgacaaaatagaaatatagttcagagggcaatctctggaccctgaaggttcttacaattaccaggtatggtttgaggaagtgagattgggaagacacatagtaattatctttattttggaagtagtgctcttagaagtttcttagagtgttctgattaacagtagatttggcttcttggtaactcagggagctcaggaggcctcggataagcaaattgaaggatatttttccggtgaagttcccgcttaccgacaaggtgagctgattcttgtggcaagccgccagtgatacgacgctccttagaaagcctattgacttccatatagttttgtctttttctttagttgttttctgtctttaaccttatgtagcacctgggctttattatattaatagtaaaataaaattagagaaatcatagatacatactaaaaccttaactttcacaaacttgcataatttctagctgctagttcgacatttatcacatacacatcttccttctactaacttaagcttgagagaagtacatttgatagtgacaaagaattgtgtatttttaaaacctgtcttgttttaggaaaaacatggtagttgatggaagtaatattaaatgcaataacattagatttacaagaggtaaatacggaaagtggatcaggaacagataaacataggctggcatattttctcatgaaaatattcagtaaataaatagatggataggtgagatgagatgatgattccctgtgtttcaggctgctctttgatccgcctaggctcactttatgttgcctattagatctagcttgagggctttctggtttcatgccttaaagtaataattccctcatactgtcagccttccttacaaaataaatatgggaagaatgagtacagttccccctgggttactaccttgtttaccttatcttgtttaccttgttgatcacaatcttcaggcacctgttccatttccttctcttctttttccctctgcttttccctgtcctagaaattagcaaggattttctaaacacagataatcagtcacttagatgtgattttattcctacaaaatgattgattgatgtcaattgagttgccttaaaatttttttctacccaattccccaggggagttggtaggaccaagcaagaaatccagcaaatcacctagcaaaccrttgtccaaaattgccaacaggtgaactgttctgtatcttgatctggtggcagtaacatgggtgtagaaatatataaaattaattgagctgtatgcctagattgtgcattttactacatgcaagcatgtaaatcacaccccaatttgcttacttaaccttttttcaaaaaatgagatgggatttcactatgttgcctaggcaagtcttgaactcctggattcaagtgatattttcacttccgcctcccgagtagctggggttacaggcttgcaccaccatgcctggcacacctcaatttaatctataagatatctgatttgtcttactattatagaaggaaattgtttctccaaatgttaatttgtacttctaactcagcttttgaaaaagaaactttaatgctccctcttatgtaagtattttggagaagttgtagttttcatatttgaagagtgttagtcaatttgccagagttcttggtatatgtgaaatattgaagcaaaggcagttaaactttaaacaataaaatacactccaaagtctctaaggtcaggaatcatatctgggttgttgagcactgtttgtccagtgtgctaagacatttctagacacatagtaggcattcaataacatacaatttttgtatgtacaaaatttgctgatgttttacacaaaggaattaatttatgattattttgggatcagtgcttttatctgatctttatacaattgtagatccatcttcattttacattagtgctactttctctttttcggtagtagatctcattctatgtaacaaagttttaagttttgcttttaaagccctaactatatttacaatctcggggaaaattagtatcctacttttaagatctctatttaaacttaccactttttcctccaaatatctcaacatatttttctaatttatgtccttcttaatgtaacactatcaaatctactactattttctttggctaatgtttcatattttatcttcagttcattggaaagattgccgccatactcatcattaacttcccttggttgcttctcataacgtttccattttaggaacttccataataatctgatgggccaaatgtactacacaatgccctaaagtatacataacttaattacattttaaccttttaaaatataggagctgaatcaagttgccttactggacaaaataagaaaagaaaaaatttaatgagcaattgtcaatatatgttcaatgtaacttttaaaatgcaactttgtttaaatacagttcacccatttaaagtggttttctttcccttcctttttcatttccctttccttcccttaccggacggggtctcactgtgttgcccaggctggagtcagcggtgtggtcgtagcacactgtaaccttgaactcttgggttcaagtgatcctcctgccttagcctcttgagtagctgagacaacaagtacatgccaccacatgtggcttttttttttgttttaatttttgtagagatggggttctactgtgttacccaggctggtcttgacctcctggcctcaagcagtcctcccaccttggcctcccaaagcactgagattacaagcatgagccaccatgcctggtctaaagtggtttttagtatattccagaattgtgcagctatccccacaatacatactggaacaatttcactggccccaaaataaacccataccctttagctatcaactctcaattctcttatctcccctagccctaggcaatcacaggcaaccagtaatctactttctatctgtacagttgcctgttctagacaattgatatgaatggaatcatataatatgtgatgttttgtgcttggcatctttcacttagtattgtatttccaggacttacttatgttgtaccatgtaccagaacttcattagtttttatgtctgagtaatattccattgtgtggatataccacaatttgcctttctgttcattggctgatggacacttggattgttttcaccttttggctgctgtgaataatgctgccgtgaatggctgaaaacaggtttttgtggattcagtgtttttttacataatatgttactgatgaaacattactttctgatcctactgcagcatttgcagtttctgacattcttgttcatgtaattttctatttctcttcagagcatcttgagaaggctgaaagaattctgatatatgttgagggagatggttgtttttctccccactggaatgtcacgttaggtcagttattaccaatattttcaccacacacaaaaaaacaagataaactatatggtctcacccacattcttattcttggtgacatcactctttttcccaatatgctggcatataactttcgtgagaaactgtcttgaaggatcccatcttttggaatcatggtggtttttttttcctttcttcctgtttattctttgtttttgacaattaccttattattgttttttaatgggagattcttttggagaatagttttgtttttttgagaccgagtctcactctgtcacccaggccatagtgcagtggcacgatctcggctcactgcaagctccgtctcccaggttcactccattctcctgcctcagcctcccgagtagctgggactataggcgcccaccaccacgcctgtctaatttttggtatttttagtagagacggggtttcaccatgttagccagggtggtcttgatctcctgacctcgtgatctgcacgcctcagcctcctaaagttctgggactacaggcctgagccaccgcacccggccagagaatagctttctttataaacaaaaaaggacaaattctactgtcatcttcaaatttcttcaacctttgattttactttttagctaatggtttagttttgttgtttattagaataagtgttcaaaagaaacaagtacatattttctaaatcaatacttgatcttcctttttgttttgaggtctatgcaagaatcaatttggttacagagtctagtgtgaaaaatttcatctaggtaataatcaaaatactgatcttcataaacatcaaattggccataaagcacaggtgattgtttcatttgattaggtatttttggggggcaattgtgatgttaacccccactctccgctgccctcctgaatgagccagtcctgcctgtatttctgtttatagaactggaacttccagatatttaaaacttatccatttaaaatacctgaatttttgaaacaatgagttgcatttgctaaacgagtgacctttagatagccttcctgtggtggcttgagaattctgtttgtaacttttctcaaactgccttttctaagatgttgccatatcaaaggaactatctggtagagagtaatttattatattttattgatgagactttcatttgtatacattcaacaatataattggcatgaaaactcactcttcaggataatatatcacaattgtgtcttccacagtaactctgagaaacttggacaacaaggtcagaacactgctattttgcaggataaaattgtttagctgccataggacagagtgtctttaaggaatggaaaactgcatagctagtgaaggagttaagcttcccctccacgaccgcaaaaacaaaaaagccaaaattgtgttttcaaacaaaaatagaccagtaataggataaactaaatcagagaaatctgatgtaacaaagttcaccaaatccctaacatctttaagtgtgatattgctgtactaagtacccatggagcagggatcagcaaaaacagcctgtgaaccaaatctggtacactgcttgtttttgtaaataaagttttattgaacacagccatgccacttgtttacatactgtctgcgactgctttcatgctacaagagtagagttgaggagctctggaatagctctgacagagactgaacagcctgtgaaggctaaaacatttactattcagtcttttataggaaaagcctgccaactcttgctatagaggatccgaagtaagaaagacgtattttctgtcctcatctttatctttggctagtgtgactgcagggaaaagtggctaatacaaacatttagataacttacacacaaagcaaaaagtagaatagtagaattttaccaggtatgaaaaggatatgaaaagtcaacttaatacattaagacaattagaataataatttctatattggagagcagtggatatctggataaaatagtaatagcaggcctataacttattattatctaggtttagttcagaatgttatatatatatccagaaaatagcctggtttttaccataggagcagactggccaatactaatggccataaaatccggttagcatttcttactgagaattttttggggtctagaatatttgatgtagtcacatattcacttggctgtctcattccagcacatctttagaataggagtttggggcatccatgggatggagtctgtcacttccagtgatgactgtgacagctgaaagcttctgtcaataggctttatccaattctgcaatgttcattactccagcgactgggcctccaaacaaagcttgatgacaggagccagatcaactccttgttggtctttctttagcaaagctayagccacgaaggaaaagccacacataattcagaggctaacttgtcagactttgggtttattggcttctgaggtagtaggcttgggactgctgaccagagaggtatttgaatgaatgacccttctccttactcttcaacatgctgtgccttggaaactctccttgaaacattattttgtgccacttcaggcacagaacaacacttgccctaaacataaactgactggtaacaccattcttgtatttacttactctaattgcaaactctttttcatttcagataacattatgtaaagtatgtgctttcacatggtactttttggaccctgttaaccaaatggcacggcatctctacatgttctgtatatgaaatacagaaatggcagtgcccattggaaatgggaattcagtttcaacctaagggacaacagggctgtctcaccagaaccagagtggagtgattgtcctcttcactaaagggagagatgcaacacaaatatctcagaaggcagattgcagtttacttcagaatacaccttagcatcaatgctagagagagaccattgaaatggatcttatcagaccaaaagtatcatttcataatggtcttaagattagaacattattaaaatggaatcatctgtcaattagtggtatataattatatgagactcttgtaggtaacttcttgagaaaacattatcctaggatagtgtctcccctaccccaccccattgggcactatctggagacatttttaaatgttgtgacttgggagtgggagtggtgtcagccaaaattttcagctgagatkttaacattttaggacaaattattaagtctttctaaaatctttttggacttggaaaagtatttcttattgctttaggatgttctcgattgaaccaaaaacagacattttgttatttttattcatatatttcaaacataattattgtaaaaatttttgaaaggtacagaattgttttataaagaagaaaataaaaagcaccataatcctaccattcatttgtacattttcttcgagattcaaaatatcatggaacagatggtttatcagagtagtctccttaagtaaatcaactggaagtgggattttttcctgggatattgcttacattatctttccgtagccccttctctttcaaataatactactgtcacacaaagtttagggtcagtttatcagaacgtgactaattatactataaatacctgagtagaatttccagctttaggagttcttaccgatatttaaatagactcaggaaaaagtattgtagacccctttattattttcagtgtgtatgttaatcggttagagatttttattaagtacctttacttatggtaggatttattaataaataaaaatattttgtaacttttcagtctgagtctagaggtaactttttacttttctgcaagaatttttagttgattatgagatctaaaaaggcaaagaagagggaaagaccagataatctagaccaccacataacagtgtctctggacttcagaagccccaggagggtgcggctggggagtgctatattttctgtacacttagtgagtcaaatttggtttggcagagaatttttagaagtagatcagtctctgtaagtaaaactttgcagttttagccaaagaaaacagactgtagatttgatgactctatttgatttattagtgccatatgcagggccttttgatcttcaggattcagtaaaccaatgaattgatatttatcagaactccatcacatgggaagaaatcttaatttgactgtcgtgttgatactaatataattatccaacacctgcatcccattgatgataattgtgttagattatattaaattttaatgataggtacaaactgagcattaagaacacgtttttggataacattaacattgacaattctcttatttcttaggaaatgagtacattaaacttgcttacttctatgtataacaaaacctcttacttaggagtgcaggaactgtgtatatgtagtgattgtagtttttaaagaaaaaagaaataattggcattgatgatataccacatgaccagacgctatataataaagtgacttacaatcttaatttgtcagacaacactagagagtttcaattaagtttgaggttttggcccacctctgtattcctttgtaatattttataaagtagcaaaaactacagacaaatatttctgccattaagcaatcagcatccatctgtttttgtctttttactaccaagacaagttaacatgtggcagaagcatataagtctacaaaattgagatgaactgttaagaacagtatcatgatattattattttctttaagtggatcattttcttgagagtcttagggcccactttttctgcaaaaggaaaaacttctcaaacaatgtgatgccctaaataagtttcactttcttttttctatgaattctcaaatattacttgaccaggcagttcttacctatagatcatttgtgcttagattaacaatcactttttaattctcatctttgtttattctgtttgtatagaagtccttgctagaatgtcttatatattgggcattgaactaggtactttatcagctgccttctccaggagaagtttcagagaaaataaattttggattagtctaaaggaagttaccttatttcttgaagtgtcaagtgtttttcagggaagactatcatgggggagagggtggacaagccaaatggactcagacataactttttaatatcataattttatatttattcctattgatgataatagtaactaatatttagtcatcatttattcagtgttctgtcctaactgctttgcgttgtcaacattctaacattagcgatatgaattggtaccactattacttatgtttccccattagaaatgaaggaactgaggcctggagagatgatgttatgtgctaaggtcacatagctagaaagtggtggaactgagattcaaaccaggtttgatgttttcagaacctgagcaccaaattattatagtgtttcattcttttcaccctcatactaatctagatttttcaaaatatttgacattaagattaaaatgcaaagttcatgtcaaaagtaaaatataattatgttaaaattgtttgacattttaaaataacgtaccccccatcatagagctgatagctgcatttgttttctgctcctcaccaacacatcttaatatatataaatctcaatgtgtatgcatatatacaacacaatagtgttgtaggtgtagttaatagctgccagcaaacagtgccatctgtgttttctcttgtttctcacttactggaaaatgttactgaagctcaaattatgagtaggggcttaaagttcatgttcagtatctccaccttttaactctaccaccttttatttgcacaagaaaatgtgatcctctatagtgactttaccctgtttacagaataggagtgtgtgctattactgataggatgggcaggtcttacagtttaaaaatacccataagacaaatagatcctgcaatctttacatagtcatttctttactttgtacttcataaaaccctgcaggctagagcaaggaattgatgtaagttgatgtcaaactgactttacaaaaacattctggaattctaaatcagtgtgatttaagatcctgttatactaagagaggtagttaagcatttgacatccgatctctctagaagaatgtctgcttaccacacatacagtagtatcagatgggagaagctagtttctaaaacagttcggggtggatgtttgcctctgattagcctgtgtatgtgttagatgaatgagcaattgggaagtcatgaccatgtgtttgctgtcatttaaactgccagtctaatctaaatatacatgtgggtgcctaaggagacttctttcttttcaagaagatcattcttaacagctctccattccttgctgacacacatgaacttaggggcacttctgttttcctgagggctacaccgttttcttttgaaagaggtgagaacaatttctttgcttgctgtgtttctaatttttaaagataaactatatgtaaagtttatttactatgagtagtaatttcataggcaagatagcttctgggatattatgtaaggtaatgaaaaatggggtgagagggatggaacaaggaaaagccacaggaggttttgatgtatagaaaaattcaggaaaatcttacaattttagatgattaatgtgcatataacatgcattcatctaattaagaaaaaaatagagaaaaagttttaaaataggagccccagtgtgcatttgttctccagagtgatttaaagtaggaaaaaagatacccttctcctctgacttcagcacatttacaagtattttatctaccagtgaatttttaagtgcatgttaaagaaatagaagcattttttaactcatgattatcgtattaaataatttctcttattttctgagagaagctaaggattagacctctaattattttactaatctgaaatgaatcttctttcagaataatattgttcttacatttttcttaattatatagcttatcatacattgaaagtcgttcatccaaaatgattttctccattcacatatttttaaatataaaagtaaacactgcaagatttaacttaccagaaaaataacagagtatcccttgttatctaaccactagggtatttggtaaaaattagcccttaattatacattaaaatgttgttttattaaattaaaaatataactatgtaaattctcatgcaagtacatgtatttcatttttaacttgtttaatagttatatgactgaatggcatttagattggtttacaggttaatatacatggcaaatataatctaatataagtagttacaaaatttaaagaacacagcatttgttcagagttaggtgcttttttacacataggcaataagttctgccattttcttcctagagaaatataacagttatggagttttatatttggaatatcggaaagcgtgcacattcttcagcagaaataaattttcctggaactacattcaaggagaatttgtcatgtggatgtctataaattaaatgcaatcacatgatgtccaaatagttaatattatatgtaaatgttgtatatgaatgctaatcccgataaaattgtttttctgatgcactaaaacatgttgcttctacccaaatgtggaaatatctaaaggtttaaaatactttgttggagcattttcttttgagatttcatttcagcacaatttcagagaaaacagaagctgatcataataagttccttttattctaggaagagtcatatttagtatattatattttagagcaataagtggagccttagtgtttctttaaagctagtctctccccttcctcctgccattgctcagcccattctcagagaattctgcagtttgctcagttcatcaggaagatcatgagactaataacatcagtatttctggctttctttcgcatttttagtttataagaaaacagcactttccagtctaatttgactttcaagtttccagcagccagctagaaaagagaatgtactctgttacgcatttcacattgttcctaagataaaaaccaatctcttaggagatgtttaagtcagatgaaattaagtgaaaagaacggtctgtgttttctccttgcttttcggtctatggtgtttaagtgtagtggataaaaggtaataagcagcctttactacataggaagaaattggaatggcaggttacaactaaatgtgttgaagttttaaaagcatccatatttgaattgtacgtgcaattgtgtgtggatagtaaggtttgtagaactgaataataattcctgaataatgattccacaagtaggaattgctcctgttttatgaagattaaaaacaagttaggcctttaaatcattcttgagatatttgaaattgaatgagtttctgaggatcaattcagaaacgatccctaaccatcccctaagaatgctgtaaatcatgtgtgctgttgttctaattgaacagtgtggatctggaccctcactaacttgtctgtaggaagagaaaattgaagagagagaggaagaggctgaggagaagacctttaccggtgctgtcctgagctgccattgttgaaggacatcctgtgagctaatttcagtcccattttaaaaaaaatctgtttagtgattagtaaccagtggataagagtagaaagcccaagtgaataaaggccgtaaatactgaagtctttgggataacagcctgtaaaactgtcaaaaaccattgcttaagtgacaaaagatagcctgaagtaacaagaatgttagctcactgggcaatactacatattcatgaacgaggagatgtaatttagttttcttcaaaaatagagattcttcttgaatccagtacctgcctcacttcatttatttatttgttttggatggtgtctatttgttttaagtttatggttaactgcttttgctagtaggagtcatggtgcctgtttaaagatagctttgtttccaaaagtgggactctgattactgaaacttctgtttagatccatcaagatctacttacttgttaagaatgttaagcctaactggagtgaatgggtgagtatgtgtgtgtgtatatttttaaaaggcagatggttaggaattagatgctgaaaagtaccttcttattgtttttaaattaaaacctaaagtttgtaattcttaaatatttctccctaaggggaaaaattaagtaaataaaaacagaggaatgttaagtctatattgcaaactgttttgttattcctgcacaatattgagactcaaatgattaaagtcttactagccagtaatttagatttgtttttagggctagagaaaattcaagatgatgaatccagtgtctttattctaaattccaattgttctcactatgatgatgatttgggggcttttgggggacaatctaaattctgtgttctttagttttgtggtataacctctaaatcccaaatgtatgttttagagatgggacttcagtgtatttaaagtgttgtgcttcttcaagttagagaattttatcaagttagagtatttgcttttcaacgtccaggctgtgagaactagaggtgtcattcatttcaagggagcagatgttaaaggttcttgcccctgcctccctaatcccaaatacccttgaagaagagaaacgttctgttacccaaataggcatctttctgatggtgagaaaaggcggtaaaaggcagtaaatctgccttctcattatgaagtgcaacaatagattgatttatgaagaaaagcaactgttaggcttatataagatgtgtgcatggaaatgcaggttcctttagagccttataagcagcagcattcctcctattctggacagaaatctaatattactaatcaggaatatgtgattctgaataccacatttttaaaggggctacattgagaacacaacagaagaatctacctcctaagttttcacatgagggctgtcttgtaaatgtagcatgtttttgctactttagttcattttcactaagatagagggacttcttaaaatagatatatttttacaaactttttattaggacttaacattttaaatagaagtgaatgtaagtatagcacatttagactgattataaacaatttcacttaatattgtataattttctgtaaacactataaaagcaaactctaaaatagagccacagataatttcaaacttctagggggattatgtaaagtattttgtgttgggtttttaagaaaagctatgtgcacttcaaaatcttttaaataagtttgtgttacctcttcttcaataaggaactctgtgtacagtataaatataaaaagtaaacttttaagctctgagtttgattgttataaaatactgtaaaatgacaaaaatctggatgctctctgtgtgagttataatgagactgtcctgtttatttagcatgtatcactccagagcttgaaatcatgtgatataattaagatttgagcaggtaaattacagaattaaaacttacagagttggtattacaactcatctctccctgtaaacctgtatccccaatgtatgtacatttccaaattatagtaagccaacatattatgtacaagaataagttatgctgtactttcatattatgtacaagaaaacacatacaaaaaattgaaaatttaaaagtaaaagactaatatgaaaagaggtcttgttattttcttttactactatgtattatcttacacacatctatgtaaacatatacattcatacccacacccaaagaactttggagttccttgatctagatagaggaaagagctccagtattctaattctattgaggaagatataaggcttgtagagaaataacccttgcaactatcagtagtccttgtttcataagctgataatgagaaaatgttgcatttttgacctggtgaagatgaggtagtcttaagtcaacactttttccccagtggattttggttatattaaaagtcaaactaccatggacataagttcttagcaaataaaataaactcttaatgccactgccatgatagtaaatccaggtttcacatttaatcgggaaaattctgtaagatagtccaaagattaaaattaatacttcttgacatctgtgtaaatctgtaaagattatattggtgtcaatcaaatgctttatgaacattttaaagtgacacattttttaaaaggttaaagttaataaggaaatgtagttaaatgtcttgtcaaaataatctcttcagatatatatcttttagttatttcatttcattatcacctttatttcctgaattcattctatttaatttactttatacttttttataatcccaaatatactttaatatttataatccagtactgagccctgtagccataatgtactttttatgactttgttcaattcagtgttcagttcaatgttgccgttataaatgttgagaagacaaaagtgattttccactattttaaatttcttatgctctgcacaggagggttacttcacaagtaactgaatagttctgacaataatctcaagatctcattgtaaactgacaagtagtggtgtttcgatgttcattggtcaactccaataacacttaattatgggccagttctatcaggaaactttttttccttcctgtttctcttctgtgaggaattacagctctgagccctctcacttgtaacatttttctttctctacccgtcactctcaaaacacacaaaagagaaagagaaaacacagctaaaacatatgtctttggcatcacaactaagtggtgtagttaaaggtcagttgtgaaattcaacttctrtacatgtgaactttgctcaaaaatagtactgtgtttataggtggtgtgactgtaagtggtctgttttcagatgatttctcattctcaaagctcttaacaaggatccttcagccagtgatcttagaacacatcttgcaacaactggattttttgaaagagcacatgttctggctacaatcgtagcagcctttaaagtacaaatggtgatgagagataaaagacttgaggctcttctgcttaaaagggaggaagctgaaagaaaatgatagccatccctaagtgtggaaaagggtcttatggagagatttatagacccctgctccccgaggccattttatttcctaatgacattttctattctcagacaagtagtgataagtccaaatgacagcatttaataataatagtaaaggtaatgataataatgaagaaagtgaatgtaattgtaaaaacaggcacctcaatgcaagccaattatcttggcttccaggatgattttatatctgtaagttgaaaatataacagaaataaggacgtttcctgttttgctaacagttgagagggtaattctcaggatcttgctctatcatcagaaaatgatgggtataacaatagcttttgataacataagaactcaagaggctaaatatgattctaatctaacatcaaattcattcaagttgtcgtaatacaaatggagagcatctactaaaaagagatgtagagtcttctctgtggttacagacttgagtaggtgtctagcaataaaggttgcactctagtgtcctttccccggttccaccttgttttgaaagaaagagctgttaacagcttatttaaagcattaaatggtatttttttcttggatattatgggatttatattgaagagttaggaaaagaacgtagatcacttgaaggtaaataaaatatatgattttactgtgttgcctgatgtgctcattggtcctattaatgccagtctcaagaggattagggcagttcagagaagaaacttccctgttttcctttataaaacttactgaagtccgggcgcggtggctcaggcctgtaatcccagcactttgggaggctgaggcgggcggatcacgaggtcaggagatggagaccatcctggctaacactgtgaaaccccgtctctactaaaaatacaaaaacctagccgggcgtggtggcaggtgcctgtggtcccagctactcaggaggctgaggcgggagaatggcgtgaacccaggaggcggagctttcagtgagctgagaaccgcgccactgcactccagcctgggtgacagagcaagactctgtctcaaaaaaaaaaaaaaagaaaagaaaaaaaaaaaaattactgaaataacaaggttcctagccaggattcattgtaatattgattggacaaatgttagaagcaatggatcagacacattaactccgctgggatgaagtgttttgttttaccactggtttgctttgggtgtggatcagaagatgtaccttggggacaaaggatattccttacatcttctgcagtgacaaaactttcttccctgtccctaatttataaaagggtgttagtatgttcagaacactgctttaaattaattgccctttttcaaagttaatagttgcagtacaaatagcattggattagaagtcagaaaatccggttctaattcacctaaatattacccccggtcacttaatcttactgtgtgcttcagttttatcatctgaaaaatattgatctaaaatgcaccctgctatcttagtcagcttgggctgccataacaaaatacagtagactgagtgtcttaagcaacagcaatttatttctcgcagttttaaaggctgggaagtccaacaaggaatctggtaaggtctctcttcctggcttgcagatggctgcgttcttgctgtgtcctcacatagtaagaaagaaaagaagcaagctctttggtgtctgttcttacaaggataccaattccatcaagagggccctacgttcatgacctcattttaaacctaattaccttgcaaaggtcccatcttcaaatactatcgtattgggacactgggggttaaggcttcaacatgtgaattttagggtagagggggcataattcctatcactcaccttactagtggtagtgcaaatgaaataaggaatatgatagagctacacaaaaatacattatgaggttagagttactgatgtttgttcaatctcatttttatatatctttttatataacaaagttttgttcttttagcatgtttttgaagcagttactaatgtaaaaccaaatgataataaaatttctcttgattctggcttttaataattcgctagtgcatagattgttaggttaacataagtagaatattgttttatcacttttcaatacttctttgtttaaatttggccttaccttttattggcatagctatctcaatattttacccattaatgggaattggtaacatagatttcactcatctaatggaaagcatttttccacaattgtttggcatggatgttatgtattttattttgagacagagacttgtcttgtcacccaaactggagtgcagtggcatagccgtagctcactgcagcctcaaactcctgggctcaggggatcctcctgcctcagcctcccaagtagttgggactacagggacacttcaccaagcctggctaatatttttattttttgtagagatggggatctcactgtgttgcccaggctggtcttgaactcctggcttcaaacaatcttcctgccttggcctcccaaagtgctgggattacaggcatgtgccgctgcacctagcttgttatgttatttttttaaatgtacatttaaaaattgagtggattattttcagtttcctacagaggagaaactaaatgaggtggacttttaagtggtttttttttttatgttaagcaaaaagaaaagctatataatgtgtaaggtgatttttttttttaatgaaagaaggaccaaaactgtgagaagaacctaatacttcagtcaggcataatgaaaattgaacagagaagtaaataaagtgtcctatatttgtgttttcttctttcattagtattcatccacagtctttctggatatttgtgaaagaagagataatctttatagcaggctctaggtgttctttttctaggtgaggtttacattttatgaaaagttacattttcgtaatgtaactaatgaggttacattttatgaaaagtgtagcaatgtgtctgaaatcatttctgtttaactagttatactgtactctttcccttttcactatttttattttgattgctttaaagatcaagtcaccaaaattctgttcataaatatagttgccaattagaaaagacagaactacttttgacatctgttacctaaagaggaagtatgctcttagtacaggatcagtgccagcttatgcaggcctcccctgtgatctaccttgacaggtgctcgcttttgaaacacttctagttgtaaacatgtggtttttcttacttgtcttggacaaaagtaatactctgtagaaaatccattacaaaatgattttgcatagccatttaatgttgaagattgtattgcaaatcctggtaggcccattgttttggtagtaaagatatatcttgtattaggcagtagaggagtatgtgacctattgtaaatgatagtagcaatcaaatgttgattagctgccattagaacagcagtgtgctaggtgtttttactttattatatcaatttaaggtaatcacttctgtatgaggttcagtgccctcactctatgagcaaactaatgtttaagcaatcttcaccaaaatatactatcaagcagtagaattaagatacttcagcatatgtaggcataccttcgagacactgcaggttaggttccagacaattgtaataaagcaaatagcacaataaaattaggcatgtgaagtttttggtttcccagtgcatataaaagttatatttatgctatatggtaatctattaagtgtgacagtatatattaccttattaaaatataccttgttgccagaaatgcttacaattttcttggccttcagctagtcatagtctttttgctggtagaagttctcgcccagatgctgatgactacttatcgattggagtgctgaagatatgagtggctgtggcaatttttgaaaataagacaatgcaggccaggcgtggtggctcatgcctgtaatcccagcactttgggaggccaaggcgggtggatcacgaggtcaggagatcgagaccatcctggctaacacagtgaaaccccgtctctactaaaaatacaaaaaaaaaaaaaaaaaaaaaaaaaaattagccgggcgtggtggcgggtgcctgtagtcccagctactcaggaggctgaggcaggagaatggcgtgaacgaacttgcagtgagccgagatggtgccactgcactccagcctttgtgacagagtgagactccgtctaaaagagaaaagaaagaaagaaaataagacaatgcagtttgctgcatggactgactgacttttgcaaaagatttatctgtagcatgtgaggttgtttgatagtgcagtagatcttttagaattggactcaattctttcaaaccctgccactgctttatcgactaaatttatataatattctaaattctttattgtcgtttcaacaatgttcctagcattttcaccaggagtagattccatctgaagaaaccagtttctttgctcatccataagcagcaactcctcatccattcaaattttatgagattgcaaaaattcagtcacatcttcagactccacttctaattctagttatcttgctgtttccaccacatctgcagtgacttcctccactaaagtcttgaacccctcgaagtcatccatgaaggttgaaatcagctttttccaaactccttttaatgttcatattttgatcttctcttgtgaatcatgaatgttcataatggcatctagaatggtgaatccttttccagaaggttttttatttactttgctcagatatatcagaggaatcactatctatggcacctatagccttacaaaatgtatttcttaaataataaaacttgaaagccaaaactacttcttgattcatgagctacagaatagatgtrttagcaggcatgaaaacaacattaatctccttgtgcatctcctgcagagctttcaggtgaccaggtacattgtcaatgagcaataatattttgaaacggatcttttattgtgagtagtaggtctcaacagtgggctcaaactattcagtaaaccatgctgtaggcagatgtgctgtcatccaggttttgttgttccattcctatagcgcaggcaaagtagatttagcataattcttaagggccctaggatattttcagaatactaaatgagcattagcttcaacttaaattcaccagttgcattagcctctaaaaagagtgtcagcctatcctttgaaactttgaagccaggccttgacttctctctagctatgaaagctctagatggcatcttgttccagtagaaggctgtttcgtctacatagaaaatttgtgtagtgtagccaccttcatcaatgttgttagctagatcttctggataacttcctgcagcttctgtatcagctcttgctgcttcaacttgcacttttatgttacagagatggcttatttccctaaaccttatgaaccaacctctgctagcatcaaactttttgtctgcagcttcctcatctctcagattttataaaattaaagagaattagggctttgctcttgattaggctttggtttaaggaagtgttgtggctggtgtgatcttatatccagaccactacaactttctccatatcagcaataaggctgttttgcttccttatcattcatgagttcactggagtagcacttttaattccattcaagaacttttcctttgcattcacaacttggctaaatatttggtgcaagaggcctagcatttggcctgtcacctcttgacatgcctttctcactaagcctaatcatttatagctttgatttaaagtgagagatgtgtcttggtgcagtggctcacacttgtaatcccagcagtttgggaggccaaggcaggtggatcacctgaggtcaagagttcgagatcagcctggctaacatggcgaaaccccatctctaccaaaaatatacaaattagctaggcgtgttggtgcacacctgtaatcccagctactcgggaggctgaggcaggagaatggcttgaacccggaaggcagaggttgcagtgagctgagatcctgccattgtactgcagcctaggcaacaagagcgaaactctgtctcaaaaaaaaaaagatttgtggctcttcctttcatttgaacatttagaggccattgtaggattattaattggcctaatttcagtattgttgtatctcagggaatagggagacccaaggagaagaagggagttggtgattgacaggttggtggagcagttagagatacacaacattgattaagtttgctatcttacatgggtgcggtttgtggtgtccccaaagcaattacaatagtagcatcaaagatcactgatctcagatcaccataacaggtataataataatgaaaaagtttgaaatgttgcaaggatttccaatatgtgatgcagagacatgaagtgaacacaaattgttggaaaaatggcatgatgaagcaaaggatgtctatacttttatcactgtagaacataccattgaaagaaactacatgcatagcatttcattacccagtaggtcaggtaagcatgtggttagaggatcagcaagaagtagtaaaacatttttttggtggtgagaattttgatattttacaaacaggtgttatattaagaaggggaaaaaatcagaacctcattggacttctctgaatttttggtttagcattcacacatgtgcacgccctacatgtatacagacacaagcacatatttaaaatgtttcttagggggtagggtggggaaaggagattattatatcttgcaatccttagggcctgtaaagatcttcatataaagatcttcatataaccctgttgatgatgatttttttgtgtgtgtagagcaagtgaccttctttagtttatataatcatccttggtttgtttttggaagataaatgtgacattttaaaaataaaatacataactcacagtgaactgcaattctgttggttgggcttgatgaaatgtaagacagtgtcagcctcctctagtggcagagtggctctttgagcagttaacaggtgaattctgtactaggcagattaagttagtttaaggtgtctcccccacaacatggttgtacatgcttcataaatgttttcattaagtggcaattgcgttctttcaagctgcctctggataagtcaatttttttctaatttttctcatgatatatatagtcatgctttcttaaatttaaaattctttcaaaartgtgtttttgtgtgtgtgtttaaggaagaaaggcagactaatatagaatcagtggcctcatcctgtagttttcaccagtatctcttgtgagctttttataaaaatgcctggatctccactatcaacctattaaatcagaatctcctcatatataggcttctcccagctaattctgttgagtttctgtgattatcggtctctgggtcctcgatcagtggttctcatcagcatggttggtccctggacctgcagcatcatcattacctgtgatgctttataaattccagggtcctgtcccactcacccatgtccctcaacctactgaatctgtaactcctgggtggggctgtaggctgtgttttaacaagtcctcctgtcattctgttgtccaccaaagtgtgagattcactgccttagatcattttaaaggtctcatcttccacaaatgcttgttctgtcctgactactaaaagctttcaggacattgccttgttgcccactcttcagcattttatccttttttatccagctcttttgctttaaactttctactttaatgtccttgtagaattaatgtcttttgttgtaaaacttctcaaatactttgtggcagaggcaaggtcttaatcataaatgatgaataaaaagccctttttcctgttgtgttatgttcctatttgtgggttttttggtgatcagcaactgtggaattattaaccttatttatgggtaagaagctaaaagaagcctgcctcctggtttggttctgagattgacatgatgcttgagacaaatgagtaatgtttcatgtggggtagttggagagatgaccaccatcttctcttgtcatccttgctaatatcattctcagcaaatagctctggcagagtggctcctttaagtccaatacaatgtgaactggccaggcaagatgaggaattagagctctctctgctcactgtaaggaaacctccttttcggctcccagatggtttccagagctatcaaaataatatcatttgcaggcacttttcatggctgaaaagagcaacttggagaggaagaggagtactctgcaaaccctgggagaaatgttttacagctgggcagtgcacataaatgccaactgaatgctctttcagttgtgtaactcgccattggggctcaacagtagaagagccactcaacagaaatgaagagtaccttatagagcatttgtacgtgtaaaccaacttttctttgtgacccacaaacagcaatgtgtaagacattgtgctacagtactcaagtaaatgttacagtgctgaagggttggtaggccgcctgctgctcattagagatcctgtctggctcttttcctgcagaatgagtgctagattgctggcacctgctttcccatcaagcctgaggatgtgaattgtgcattaggaataaagtgtttccttgtgtccaagttggtagagcctggtgctaccttgggagaagggggtgagaattcagtgctggaaagggagatgaacaaagcattggtgagaaacaaatataaactgactgagattctcatcctcatttagtgatttctggttgtgctcttagtttgtcctcaaatttggtyaccttgaattaaaaagatttgttctatacacaggaaaccacaaatattctcaaatatatagttaagactatgagcatattaaaaataggatggaaataaatttggttatgagaacatgactaagttattgtgaaataaatttagccttaaatatgtaaaattcaagtttgttggtatgattggtatatttgcacacttaggtccatgtgtgtgcattgcctgtctttacctgccatggaatctttcaaaaaaactgtggcagaaggtggaacgcagggcctaatgtaccgtctttagtcaccgataaaaagtgcctcttgtatacaatgcattatgctaagtacaagaggattacaagaagcacaagacagacccctaatttttcaagtgctggcagtctacagactatctggggagcaaagacacatcagaggcagtgcaatactgttgtacctctaacaagaaaacatgatacttccactatatttcagtggttttggagaaggaagagaactgagttgggtgggtcaaagaggatgtggaactttctggttagaaaaggataaggagaattcatagagcgtaagagattggggtgtgtgtatgacactctttccttgccactaataggttgtggaattaaagagaatttacaaaaaaacaatggcgacattttcccttgactcatttggacctgtctgggtcttgttatgaatattggcctccatttgtgaactgtggatgaaaagggttagggttgggtcatggccttgggccacagttaaattaactggctcatagtgtgattgaactaatgaccttagcctcattaccactatgttttaaccagttgagtcaatcgaacattacagaaagggtaatcaaggtatctcttagaaagacagctgtatttctctaatgaccagtaatgatgagctttttttcatatgtttgttggccgcataaatgtcttcttttgaaatgcaaatcaaaaccacaatgagatatcctctcacaccagttagaatggcgatcattaaaaagtcaggaaacaacagatgctggagaggatgtggagaaataggaacacttttacactgttggtgggagtgtaaattagttcaaccattgtggaagacagtgtgggatttctcaaggatctagaaccagaaataccatttgacccagcaatcacattayggggtatatacccaaaggattataaatcattctactataaagacacatgcacacgtatgtttattgtggcactattcacaatagcaaagacttggaaccaacccaaatgcccatcagtgatagactggataaagaacatgtggcacatgtacaccatgaaatactatgcagccataaaaaggatgagttcatgtcctttgcagggacatggatgaagctggaaaccatcattctcagcaaactaacacaggaacagaaaaccaaacaccgcatgttctcataagtgaagagttgaacaataagaacacatagacacagggaggggaacataacacaccaaggcctttcaggggtcaggggctaggggagggatagcactaggagaaatacctaacgtagatgatgggttgatrggtgcagtaaaccaccgtggcacatgtatacctatgtaacacacctgcatgttctgcccatgtatcccaaaacttaaagtataataaagaagtattttatatctaagatgaaaagagggagacctgtatagcagtaaacgtaggagtgaaatcaaagccaggcccttttctcatgtaacacccaagtgtttatctcctcaagtttttatacttgtttctgcatctaataaaaatacagtgggcacaacaaaagacaacatgactctcctgtgttagtaatttgacataatgaaatgcatcacggtttttgcagaggatggtttgagcaacaatactgttttcaactttagatgtgtggtatcccgtaaatttattgatggtgcctttttattcttctttaaagtctgaacaacccagtcctgccagctccagctccagctccagctccagcttcacaccatcccagaccaggcaacaaggtatcaacatctcatgcaaactaggagatgcttttctcataaaacaccttaatggcactttgggaggctgacacgggtggatcaagaggtcaggagatcaagaccatcctagctaacacggtgaaaccgtgtttagtaaacgtctctactaaaaatacaaaaaattagccaggcgtggtggcatgcgcctgtagtcccagctgctcggggggctgagacaggagaatcctttggacctggggcggaagttgcagtgagctgagatcgcgccactgcactccagcctgggtgacacagtgagactccgtctcaaaaaaaagaaaacaaaacaaaacaaaaaaaaaccatcttaatgtcttgatttatcaccttatactgttttattattcgaatcataacttggcttttatgcagttgtatttatttcccttaggaatacagttgagtattgttctgatgtacgaggcaaggctctagaaattcccctttttccggtccctgccatcagattgtcattgctacaaaaggattatagacacagcccatcccagggagttcccaaaggaaatacaatagcaaaagctttaagaggctttgacatagggaaataggttttcatctttcctcctggacatattttttttctacatgttaatagtctttaaggcaatactaattggctatcttttaaatatatatttttctctactcatgatcaagtgttaacttgaattcagaataaagacatttaaactagaatatttaactaattatattttccatttttgtgtatgtggaaaatcttcaaatatacactctttttacatgaaaaatgcataggtatcaaagtagaatttgtgttttagcatagtattgaacattacctttttcaatgaccacactgaattcctgatggctttgaatgttttgaaaaggattaaattgttgtatgtgtttggactaaggctaagcttccaggaaaaaaataaaataaaagacagtaatcgttttggctattcagaggtcttgtttcactgacttccaaagaaataagcccactacaaaagcagataaatttgggttttgcagaatgtgagattgtagggagtcaagatagtaatagctcagatatccctgtcatagatgggactttaggaattgcctaatcccgaatgaaagtgtctctctttcttcattgtctttataacctcttctgttaagattaaaactatctatttttcatcacatttagcctagtaaagtgaaaataagccacactgatgaatttgtgtttgtgtgtgtgttttcatttctgtcctgtcctagaataaaattagagtttgattttttttctttttcctgtctgatactggatactgtcctgatttttctgtgtacctgatttattacatggtcttgtttatgtttatacatgctggtattgtgccagtaatttcttaaaaagtaaaatgaaaattggctgcttaaaattgctgcaacaagaccttgtgtccaagatcaatgtgaagatcagaggtaggatattacaccatggaattgaaatactttataatctgaacttgactgaaatgcttgcttgacctgaaattgaccttgaaataaaaggaacagctaaaccttaatggatcaaaaagtaccacacaaaggctgcattgccaagaacaagttacaaccacagtgatttattaatctcaacttctcaatacatggattaacctaacaaaacattcaatttactgatagatttttctttttctttttatgtataatttttcttagggaagaaaaatacacagaaaaaaaattcctagaaaatagagattctttaataaatattttgggaatccattatgaaaacaatagtgttttggcagagattgcattttagaaactataccaaatttgccttgtaaattgtataaatatatatgatgattatttttaaccagtgttcagtgctggtaagcatccccctgtttctaatatggctaagtgtgtttgagtatatgtttgattgcctgtggttcattgtcattactcaggtcctttgaggtctataatgaaagatctgcattctgatgacaatgaggaggaatcagatgaagtggaggataacgacaatgactctgaaatggagaggcctgtaaatagaggaggcagccgaagtcgcaggtgagtatcttggaaggaaaggggttgcctgtgatgaagtcagactctttcacaagccctgctgggataatcacagcaaaggtgtgaaacaccaaaaacggcagtagatggtcacattcatttgatgcagggtctccttggtatgcctacacacactttacagggaactrtttctcctttttctcagaaagaggcttttcctctaaaaatttttataggaaaaagtcacattagatgtccttgtccttggaaaagtatgccaagtggcaggactgactgttgaactaaagtctgttttcatttgaagagtttgtgttgatccactgctggagatagtctcagaatttgaagaaatgtgtttgctgtttgtagttagaaatacataattggctccagtgaattatgtgtgtgacctaattaaaactaggatcacctgtgtgttttccagaaaataaattccttttaagtgtgctgacaattaagtgccttaagtagctttaatgctgtgaggcataattccatgttataagatggtaattcatgtcacttataattaatactcaacttgaaattgccctgaggattttatttctttatcatgaagaaaacaaataggcatgcttactttaatttgtcttgagtggaaaaaatacgaatctacttgaatttaaaatccaattacatttataatatattgcattaaatctttccctgttatccattactatgtagaagaccctaagattcaaaaaaaaaaaaaaaaaaaaaagcggtcttaacccaaactggagagaccgatgcttcctaattgccaatgctttgtcctctgaaaagagcctcctcagggtgtgtgccccattagatatctcagtgactgttttttatggtcatattcaacccctgtttctctccttgtctctcagaccaacctgtcagcattccttttaaataggagaatataacctctttaatatgcccatggccttataacatttccctttagaagtcttttgtctgataaaaaggaaactgatagggaaaaaagacctcaaaatggactgaaacttaaagtagcttacttataccaaccaaaatcctgaccactggctgctctcaagtttagttgatgaaaaacgtatgacctatttagatgatttccctagttgttatttagaatatctggatattctgtgattagttgttgcccacctacttattgctgcaactcctgagtctgtgtggtcatcatgtaggtttgtgagtcatctgatacagatacacattttgggggctgcttttcttgttccctgcctgaccgtgctgtgttagcatgtcagtgccagtgtaacatttgatcttcactgcacttgtgaagtctcaactgtttaatcagtttaaatacttagccttccacttcactcaagacacattttaaaacagcacttcaactgaacacttcattaatgtaatttagttaagaaaaacaagttctatcagtttttgctaaaaggatgtcccagtgtatccttttcatttcctatcttgtatcttgtctgtctgaatacattatagagctagaatgtgattgcctattcagagtgaaagaaaaactatcctgatttctaaaacagtttctgtttctgagaagcatattacattaggtgctatataaccagagaggaggggagcaaatacggaaagaggacatctctgagggaggactacattcagcacagtagaataaataaatctctcctattgtggataaaagaaaattccattttcttctgaaaagaaaaaatggggaggaggtggtgtggattgtctttagttctttaatttttaaaatatatcattgtagttttccaaagcggttatcccaaacataccatttctttgtgttgttgtagcgtatttccaatgaattgttgtatcagtgttcagaactagagacagccttgaataatgacacagtagaaatgattggtaatggtcctagcatgccgggctccacatgttcaatccttagatgtcactctgtgctgtcagcggtgcagggctgttttctacattctttatgaagtttcatttatgtggttgcttcttcccctgcagcgtgtattctagacatgtttgtaactttttcatctgtaacagagagggaggaggaaaggaaaataaaggtagtaatcaacaaactaattttgctgaccttctgtaagcttgagtagcatgcttgatcrtagtaggtagggagagcaggagaagggagatgaatgaataaatgaccccagtaaagtatagtggctgagcactagctttgggccacttgcttgtatttgaattccagagccaccatttttacctgtgtgaccctagatgagtgacccagtctttctgagtctcagtttactcgtctgtgaaacaggagatcatgaaaagagaaatggcaggtaaagcacttaacacagttccagttacaaagtaagcaccaatatgtgttagcggctgtgagttaaaatgaacttgtcaagggttagtgtttggattctgtgctttccacgcctatttctatgggtatttcaagaatcatctgtttgtaatgatgtgcataacttgtctgtttcttttcagagttagcttaagtgatggcagcgatagtgaaagcagttctgcttcttcacccctacatcacgaacctccaccacccttactaaaaaccaacaacaaccaggtaaattgtggggtttgcactttgcaagactctgcagagctaggtgtaatcatttttacaaagcatgcaaaactttcatccctgaattttaaacaaacttcctcttgatgccaaatagatgggagggaggccacagcctgtggaataaacacatagttagggtataagaggttctgctgtcatgagaagatgaatatgttccaccagatgggttaattaagttagtacaataagagagggtgacaaaaagtattgcccatttaccatttactcctgatttctatatactttacacttcagcagtaagtaggtgccttaattaggaagaatatgacctttgggcctagtatagagcttggttctttaccactggtaatttactggtgggaaattaacttttagcttttgattctcagtttccttatctgtaaatgacattaacactatcttttaggttattgggaagatgacaaataatatatgtaaagagcaaaaggcagtgcacagcccctccttggcactcagttgatggtagtttattattataggtgttcggcctcagttttctcgtccaagatagaaggattattacttgggattttaaggaataattaataaaatgctgagaaaataatggtcattatcattgttacaacttgagctaaaggaaagcttattaatttgatagtcaactcaaaatataactatttggataagatctaggcagaactttgaaggctatgataaagagcatttgttaaataaattaaatcgggatattttctttaccaactaaaataaactattttcagtatcatgaataatgtaaaagcctcattgagcattgaattgatactctcattaccataagtttttcttatctttttgtgtcgacagatttcctatgacctctacaataactgcttaattcaagttactgtacgaatattaacttgaaaactaaacaactgtgtttttctgaaaatactgtttcacaggtgtccttcaattttaaatagtcttgcccttaaatccgtggtctttgtgttacttggaaaatgttagtttagagctgaagactttttctttttgcattttatttaaagcactagcaaagatctcttatagtttaaaattcctcatttataaggtttgtctataatgcaaatccgttcttgttaagtaggaatgataccagtactctttgttgtaccagttacagttcaactgcaatttctttgtgtcctacattaaaatcaaagtccagcctcattatctcttatagatggggtattcagcaagttatttacttctttttccatatcctggctcttccccatcttcagggccagctgtgctcatggcccagccgtcttttacctctggtgtggatgcctgccaccacaagtcaggcatttcagaggaaagtaaaaagaggaaagacatatgcatcatggccaatcagctgagaacactggactggttaactagaaaatttgggatccttttgtaaatttgtgcttcagtgagaactagcattagaatagaatttgaaccttggtgagattttttttttttttttttttttttttttttgagatggagttttgctcttgttgcccaggctggagtgcaatggcgygatcttggctcactgcaacctccgcctcctgggttcaagcgattctcctgcctcagccccgcgagtagctgggactacaggtgcatgccaccacgcccagctaatttttgtatttttagtagagacggggtttcaccatgttggccaggatggtctcgatctcttgacctcatcatgcgcctcacaaagtgctgggattacaggcatgagccaccgctcccagccgatgatatttttaaatccaacctaggcatatttcagcttgatttctgtatccagtgggtggtatatgagagctacaatacgtcatgggcacagcagtggcagggccaggagtgtagggcattaggctctgcttttgtgcccctcactcatctccttcagtatctctcccaatcatagtgaaaagtgggcttgctagggaatgcaactccagcaagcacctttcatgcccttcaaaccttatggcttcacttaagcccttcctgaatgggcagtcttgaacagaccttggctttagggaaaggtttagactctttgtcagactgttttttacctgtctagcaaaacaaaaccaaaaacgaatagtatcgtctatctggagagggtaaaagttaccttatctgattaagtagcatactcctggttccttggcgtgtttatttggcaagtgttgcttcacacatgtgaatcatcagtctgccaataatactgtattatgtgtcactttctccatgcacttgtaagcatggtaagaaagtccgtatgcttccacttttagctagtctgggttaggaaatatatataccacaggagggcttaccttcttagagctatgtcttggagccgagaggacaagtaaaggtttcttaaaccttgtttagtattggtttcctagcccctcaaatcacttgcactggggtcaggtgtgatgctatccctttaagtcaagcttctgggacttaaaaaaaattactagtatatcttaattctctatgttgatggtataagagagtaaaaatttcttaaaaatctaaaagtcaactaaatttcactctggaatgactttttagtcgtatttgaatgtgtgtgtgtgtgtgtgtgtgtgtgtgtgtgtgcgcaggagggagggagaaaagtagggggagagagacagggatagagaaagagtatgaatctgaattttcacgattaataaagagttgagaacatacttggaaggactaactccgaaatgggaacactcttgagtttcctccttccatactccttgcctgttctctctctatgaattgataatgatctctgagtttgataaagcaccaggcaaagctgaaatgtccattgccttttctcaaatcttccagggactagagaagaggggaagtactaatggagtcaaatattttcatactgaataaaagtgaacatagagtcacacgtcaaccaagcaagtaattaacctgagtactgttgggagctactgtcattagtatgaaagatctatcagtagagaatccatctgtgaataactgagttgtcattcttcataaagtgatacagaaaaatataatcttgaacgtttgtcaagacattttctcagattaaagacaaaagtgctactaaaccacaattcttctattttcagagactgctgtatctataaatggagtagctaggcagtctaggtagctctgcttctctcagtacaatttaataggtaataataaagagtgttgcgtcatttcaaccagagatggttttttcactccaaacctcccttatgtgaatttcaaacaaaaacaaaataccacatcttttttagccagaagcttggcagggagggaggggagaaaggacttgaaggaaggaagtgatccattggacccgggttaatattcagaatatcataaatcacctatcagcctgcaaggcatgttgaatgaaattaaaaagagtctatccagttaaactggtttaaaataagcctgtggaagacaaggtgttgtacttttttattctggagttgtttccctaaagataagaaatgatcataaataaaacaattgtcttcagcagggctcagctctctcagaatgaggttttgacaaagctgtttattttggagcagggagagatcaaagaaggaagattaactgagccctctctgggcagccactcagtaacttgaggcgggtcactgacacccggagcttttgttcctgccactgcaacttcagaagaaagaaactaggatttcaatgtattttggccttctgtgctgtagcacttacggaatgtgtggggtgggacttcagcgtccaaatgttctattttctgctttgaagaaaaggtgncagaactctctaaacctagttagcaaagttctattgcaaatacagcgtcctcaagtcacttcaacacccagagtacaggagttggaggaggggatcgtgggaggcagcgggatatgatgggaacaaaattcagttctgtaatgcacaagtcaagcaggcaggcactttttttttctttttttcttgcctgaaatctcagcggattgtctctgcatgcccagcccagtatctgagttggcgaggagtgccatctactgacctacttgctcctaggtctcagcgctgatttttcccttgagatctcactttcaacaacaatggaggaggaaattctgaatgtagtggagtatttggtttcctttacagtggagcatgttaaaaacgattgccttgcctctgttaatacgtaatttccttgtgttgccaaaagtattgtattttaagttagcctggtcaaattagtcatttggttatcttcatattaaaaatgatgaaaaaaagcatgattgtcaggaaagactgttaaaaggacactttttactcgtgcattattctcaattaaaataaaaatatgccccttcaggagtattcggtcttttccaggatgtcatgttcctatcctcatccagtaaaatgtttattagtaataaaaaatgttaaagctgaatgggaatctgggtcttatcttgttcatctctcccatttcatcctttgcggtccaaaaatattaaataataaggctgggacttgaacttgggcttctgagcctaatcagtgctcttgccactacagattaaaagtggactcattcttaaaatctttatgttacggaatgtggtaaacttgtggacagaagtgttactaagttagggcacagaatgggtaaagagaacagtaggaatataaaacctcttaagataaattaggtcctttatttggcattttcctcctttaatattagtctccagttataacaactcacttcataatgagttataatgaaaaagacaaattactttgctttttgtgtttatacacatgtgtaagcactcatcatttataaatttagtggtttcaagctttttcaagtgaggaccatttaaaaatacttcccttttaatcctcagttttgaagatgctgtcaaagaaatcagctgcatttattaaataataatttgcttctcctttttattaagtagaaacatagcttcccaccaaagcttctatacagtatgtaaagctattcataacttaagttgtaatcagtccagataaaaggaaaagcacttggcgttttaccaagggtaaacacatcatttcttaaaacacagaagatagtcggccatcttcatttccaaagctgtatcagttttgtgcatatgagtaattttagaatgtgaaagttaggtactaaaaagggcatttgagtatttgtttttatcatccctagcatactgaacactagtagtcatgctgaaacagcagaatgaataggaaaaaaattcttgccagagggaactataatctctgtataactcagctgctatacatatggtgagagtgttgtcrcaaaagagaagcagccttggaagcttagatcaatttccttatcatcaactgtgttgkttttttttkttttttttttttagttctacttttctgactcagcatttcagatctaagtaattcattttccaaggaaaataagattagagagaagaaggaaaatgtatagaaaagaaatgctatttggaaagcaaatgttactgtacatttcattcagtggatgcctttgtttaggtggctggttagctaagagatgcttgaaataaaatttaacacagcgttctctttgatccctagattcttgaagtgaaaagtccaataaagcaaagcaaatcagataagcaaataaagaatggtgaatgtgacaaggtaggtttcyagtctgttactaggagggctccaacactgacaagccttccgtttctttgtgttgcccttgatcatccttgctggttctcctttcattttcttcatcaaagtgyccaagatgcccaaatgatgagtatttcatcccagtgctttgtagtttgttttccatgtgttgtttatatcttcagtattaagcttggccttatgctgtcatttgccatgatgcctacrttgccaagggatttcaggcacattgaattgggaattaagagaattgtggtagagatagaatattaaggaatctcagatgtagatgagcaagacatctgatgctagtgcagtgtgctttcccagagtgtgcgtcatgcttctgaaacctgactacaacacctggtggggttaagttgcctggtttgggcagagccctaaccttgctctgtagggccagggcagacctctgtaatgtttcacaaatctttcatttgcctttatcgcaaatggtgctgggggcacccatgcagttacactaacaaagactcgtgagtctgagcatatggaaagagaggtaccccctctcccctttcaggggagctcttcacaaatcagatgataattagatagtgatccctgtttttcgtaatacattcttctgttcttctgtcacttgctggcattgcttactagcaatgtttggtatgaccaggaagcctttttaaaacaaaaacaaaacaaacaggaaaaaccccacaaaattcccctgacttaattggtaatgtacattcttgtttccatgttcaaacttagaatttttttctcttagaaaccttctgagattcaagaatgaaaaaaaaatgaaagtagcctttgttaatatgtttaaactcacaatttagcatttaatttccctaccttttgtagagatattgttggaggaaagtgagtctactgacttgaatcttcataagagcaattaagtccaagaattcactccaactccctttttgaagttggtgtgataaaggtaatgactggtccaagacaggcttgttctgcagaggcctttgggcactgagtgcacacagcctgggctagagtggtgtaatgagaaacctccagctgctgctgcctgtgtgttcttacttacatattcatttatttttgaactactacttaaagtgcttgtccttttcggggacattcttctctttcaggcatacctagatgaactggtagagcttcacagaaggttaatgacattgagagaaagacacattctgcagcaggtgagaaatgctttttagcacaaccctttccagaaacttcaagacttggtttgtcctgcagtagtgtgatagcacctggaggccactgcagccccacgctatcagaacctggcgaatgccacctgtagatgtatttgggaaaggttctcatttctgaggccacctagaagtctgctctggagctctatggcaactgttctccctcctctagtgcagtggatggtgagaactgggcaatttgggaagtgatactggattgtagtgatccctcagatggctggtgtaatgtgggctcmgggaggggacagtagaaatgcaaaaagctttggggccaggcttctggtttcatgggaaaacagtgataagaatttgagtcaagtgttgtaaacatttgtgattcaatttagtaacctttgccaatgatattctaaggaaaataaatattttcttcatttcccttatcttgtatgacatacattctattattatgaactcaactgtggaatacttgtagtggaatacttgtagagtggggaaacttctattagtataatttgatgttttgagaagataagaagggtggtttttcattttcattcagttaatgatgtatgcctctgttgcactaccagcagctattggtaattttttttaacacccaaagagaagaatgtgtgttctaaattccagggcagacatgtagattgtttcgctgtttgaatttttttcttctttttttttttactactttcaaatgacttgacgttagtacttaatctaccccagctgtgtgtgggtttttttttttttttttaacatttaatggctggtggtcacatttatattctgtgtacatttttgcttacatctataaatatatactctcaaacttgccaagtttcctgactggcctgataagctttttaacccttgtagaattttagatttgaacaaaagactacagacctatgattcttaattgcagataagttgcatttcttgcagtttctttttagttagtatgggtaaggaagcaggacttaagtggcctaccatgagtggtggtctagtactttgctaatattcttcttaggcctcttttgaagaaccgaacgttgttttacctgtcattttccaaatatttggggctggcataatgctgattgcagatctattgcatgatctttctcgtctcttcccaaacaccagctctgaaccactgtggagcaattgtccaataaagctattaatgcccaagctgggcccaaatagtgagtctcataggagggtgggacagatgtttgtgcagggttgggacatcttcacaaagaaagccctatcagttagtcaaggatactaggccattgggcagatcttaccttggggtgtcattggcattcgcaatttaatgttgtcctttattttgaccttataagaattgcgaagaaaggtggcttactggagaactccatccaagtggattattttagtattctagagggagagagtaatatctgtgaatttttaacctggcataaaggcactccagggcacacagcatttcaccctaattgcattcccaggccggttgaaagctctcagtctttggccttttgccttgtaatgcagctgaggcttgtgattatgataccatgatgcatgtcctgtcacggtttactgcttaattaattccttttgtaaaacatagcactattgaggactaatgttattctccaccttgagggctgctcatctcatggaattcattccacaaagtctacgtattctctgccgtgcagacttgaacacctgaagcagaatttctggtgggcccaggatcacatctaggtcctttcctgttaaatgcatcctatccaaaaatctggcctgacgattttatttggctcacaaaaagcggttaataactttgttttcctctgggggcatgcagtcctggcactcggcagctagtttaatgaacagacagcattggatcaaggagcctgtgttcctaagccactttttcaaagggtataaatacagtagagtagacacagtcaaaccaagagaagtgattacctaggactgatgaataatttgattsctctttaaaccacatgttccacatttatttggaaagtgagattgaacatatgtaacctccccagcaattcagctctaagcctggatttgcatccacgtctgggggaagaaaactctgtgggaaaccaggtttcctaagagagtagtttagcaatttagaagccagccgtcattcttttcgaattgtctgcrgggaatggggaatctgtggcgtattagaatattccttctaagaacccagagaaccctccctgagaaatgttctgatgaaaatgatgttctccatcctgggaaattacttgtcatatctcagcaccccttgtagattggagcctgatggcctaycccttaaccaagggtagggcacacatttttatgtggtggttgtccgtgctttccagaccatagtagaggccattctatgggaagacctatgttatcccagatctggctctactccatagagaagcagttaaagtaaggcctgttcattactccccacacagcgaagaggctgcttcacatggaaagaaccctggtttttgaaattataatcagaccaaaatcaatgcatttacctttttataattaaaaattggggaagggagccacagatctgacaagtggatcttaccctgtttaaaacaaaatgagacatccaacagcctgcgtagtaccgcttgaaaggctgatgtggcaggaaataatccatcatgaatgttttcacaacaaccatcatctgaagaatgagttaagcagtttacacactcttccttttccactacccatatgtacctggttgcctgtttttctttctttctttttttgagacggagtctsgctctgtcgcccaggctggagtgcagtggcgggatctcggctcactgcaagctccgcctcccgggttcacgccattctcctgcctcagcctcccaagtagctgggactacaggcgcccgccaccacgcccggctaattttttgtatttttagtagagacggggtttcaccgttttagccgggttggtcttgatctcctgacctcgtgatccgcccgccttggcctcccaaagtgctgggattacaggcgtgagccaccgcgcccggccgcctgtttttcttatctgcagtcactctatctactattattattattttggacagacrttaattattgcactatgatgcagagtaatgacgtcaaggtcaagccacactgcatcagcaaagagggtattcctgtagaaaggcacagtggagttcttcaggcactcatggggtgtgttcaggctttgtggcctgtgtcaatggaataaagcatgttaatgttgtttctgacgttctaactatcaggattcctggaaagcaatgcacacttatttttctttatggagcccttacttaaatgaggatgtgggcacatgctctaataattcaaatcattaatgccattccctttggcaaataattcccaactccccagctgctgccactgctactactttaaggctgtttctctgcatctaccttgatgtattcttgtgggctctcataaaaacgtggggctcatttagttagatttatcagatcccctttatattgttgtgcatgtgtggctgcaggccgggcacaacatggtgatagaggaggtagcgggtggtgatggaagtactggagatctgcaagatagcacaatgcatgagaaatgcccgggctgacgtttctagtgggcaaaagtgtttatatgctttaaaattaagtggctttttttctagaagggatttttttattgcccagttttctatttgttattaaataattagggaacaactatattgggtcgtggaaaactgttttcttaaaagaatgagttacaattttttttttttaattcaagccggcctttctgagttttagtttctgcattttcttgcctcatttattttagtgctaatgaaatggctaacactcattggggkcgagaggaaaaagcatcaggtctataattcatgtgcagtttagtcacctcccagataattaaggatcagtttataaggtaatcataatcatgttatcctgacttaggtagcaatttaccatttataagaagctttatttatgataccttatttgatcatctgcccaaacttgtacaagtagaacaggtagcattactctcattttccagatgaggaaactgaggctcaaaggttatgatgttctgtctaataccattgaaaaagtttgcagagtcagaacttgatatgccagatccagaactctattctgaatgctttgtcaattacctactgggcagctcgctgaggaaaggagtcaaattctggtcagcttgttatttgcctccattgcatraatttgaaattataatagctctaaagagactacttgtttccatcctgaaatttacacattttcactagattcatagtatttttgcacaaaatggcaaaaaaaaattattccagaaaatacatagtcttagttcaattgatcttaattatatagtaagtatatgattgacatgaaaagcctctgtgggcatagctgtgtgtttgtgtttctgtatgtgtgtggatatgtgtggaagacttsttgaaagttctgttactaataactaataaaacaaatgtgtgtccattttagatcttttagtgttaataagrtcttgttggatacatttttacataaatgtagcactttaaccataattgggtacactccttctaagaatttcttgatgcatgtaacagaaccttgagtctagtggtttaagcaagtaaggttttcttctgactccctccccacctataacagtaagcctggaggtaagtaatccgtggtcgagatagtggcttaaaagatgccactgatgacacaggctccttgtctttcttttcttccatctttcataagctgtattcgtcttcttaatgggaagacagctgctgcacttccaagcactgcattcccattgcacacaggaagaaggaaagaaggcaaaagatgcatacccattgtccatacccttttcagaaatattcctgaaaacagtgagttctgacaaataaattgtaaatagcagcatctgacaagtgctgcaagtaggtctggggaggcaarcattgtagttgggcagctctcagaaaaacggccttccgttaataaaaaaaaattaaggaataaatcgatattagggagttagtttgcagcatctgttrttgcatccactatgagagtagcttattttaatattaaggctgtagttatatccctaaaaaatagttccagagattgggtaagacaataacagctcaatctggagttgagcagttaattggattgagagttaatatgtcatgcttctgtgaaagtcaaataatatgtcaggaatggggagcacattttctattaagagccactgacctatagggagtagttcacaaatttactgtattttttaaaagaaagctaattgtaagaagagaaggttaaaagtttcagttctgctgttactcagcgtggcattaggtaatctaaaacttcattaaataaatgataggctcaataattaaaattattctcttttttaagattattgacctaaagagaatcagaggtaagtgatagaaagagaataacagacaactcaaatcaggtagaagtttgtcagctgtttactctgtgcaaattttcttttattgccctgatactaactttgctgcctcccccaaaaaacgctgtgcccaatacactgcccagatacagcatccatgtccaataaaattattagtagaataggaatgggaagatactttacatggtaaaagaatctctcaaaccaatcatcaccttcattcttaatgttgagacttcagaagtgttctcctgaaagccagggcaagagtaatagtaaccgtcatctctgtcatttaacatttttctgaaagttggagccaatacaagaagaaatgaggtataactattccaaatgacaagacaaaggcatcctttctttttctagataatatttctatttaattgaataccttaaatatttaaaatctccccaaaatattcaggggaatcaagtgaacacaactaaaagtaataaatatgtttttatttttatgttaaagtataacaaagcattcaggtagatrcattttcaccaagtgacaacatcttatgtaactagcacccaagtcaaacaacaaaacagttccagtactctagaaggctcccttgagccccctctggtcactatctgttaagggggtgggattgtagacagtttctttcttttcctttttttttttttttttttttgggarttcctgtattttccaaattattaacaattatataatgataaaggaaaatgattttatataggggtgtgtgtgtgtatgtgtttgtacttaagtaaaagtagttttgttatttctcggctggatttttcttatgtctattaagtataatcactgtctattgagtcagtaactaatttttaaaggagtcttgaaatgctatctccccctaactgctcactcacagttaaatattctgttcatgacttgaaagcagacatcagtttaaagggtatgaaaagcaagacaggttctcactgggaatttctaaggcttaatatacctttgacttatcaagttgactgagacagtttaatgctattcatggtatgggaccttgttgctataaatacgaatatttatcacttgattccatatttgatcgcccctccattactctctctttgccttttgatgtttgctgcgtattgcccaaactttctcttcttcactcctctagatcgtgaaccttatagaagaaactggacactttcatatcacaaacacaacatttgattttgatctttgctcgctggacaaaaccacagtccgtaaactacagagttacctggaaacatctggaacatcctgaggatataacaactggatgcatcaagaactattgtgttttttttttttggttttttttttttttggttgtgattttttgttyttkttgtttatatgaaaacactcaaaatgatgcaaccaaaagggaaaaaataaaaatcaaacaaccttcagctttatttttctttaaagccagtcatcatctcttgataaaggagaggttaaagcaaaccagcctcagcggaccactcttctctccaaggaaatccccgggaagagttagcctggatagccttgaaaacaaacaaatcaaacacaacacaagaaaactcaaagaatgtgtatggtatcatgtatctctctgtggtggttcattccacaggacgaatgcatattcaacacactgccttattacataactgatctatttattatcgcatacagatattctaagtcgttgagggaatgacaccatcagacattataagtacttggtcccgtggatgctctttcaatgcagcacccttgccatcccaagcccagtgaccttactcgtataccgtgccactttccaccaactttttccaagtcctttaactcgttgcagtctgtattttccaccttttgtttttycagttccaggacacagattatcaactggggggaccaaatagccaccttgattttcttctttgtggtctttttcctgaaagttggggcccagtccttggctgtatccatgtaatgatcttggaccatggtagaaaatgcaccaaataggatcatatgaattgctgtctagccttagtcaataaacttgtaggacttttaaacaaaagtgtacctgtaaatgtcctgaatccagcattgttgagctgtcatcaacattcttgtgtctgttttactgttacaatattaggtgaatatggaagtaaaggcattccacaggatcatcatttaaaaaaaaagaattctggtcctgttttctaaaaaaaaaaactgttgtagaaattcttaatttggatctatttattagtcagagtttcagctttcttcagctgccagtgtgttactcatctttatcctaaaaatctggaatcagagatttttgtttgttcacatatgattctcttagacacttttatatttgaaaaaattaaaatctttctttggggaaaaattcttggttattctgccataacagattatgtattaacttgtagattcagtggttcaatacctgtttagttgcttgctaatatttccagaaggatttcttgtattggtgaaagacggttggggatggggggatttttttgttcttgttgtacccttgttttgaaactagaaatctgtcctgtggcatgcaaaagaaagcaaattatttttaaaagaaaaaaaccaaagtacttttggtgtcattattccatcttctccataagtggagaaatgaaaagtaagaacagctcatcttcaaagtttttactagaaattcagccgaaaagaagagaaatgaagaaatacttctggatccaaaggttcgtcactggatcagccttaagaaagtctctatgtgtgctaatagaccagtatctcccttgtttgttcccatgccagatgctgtcttttcatacagagattaactagtgtctgtacagaaaatggtctttccagacccattcttttgggcagttatataaatgcagattgataatggagttatttctgcattttaaaaaggggattttttacactgtttctttctatccaaagaaactatttttcctttaaaaaattataatacagccatgctccttgtaaattatttctctgaagcgtcctcccagaggacaagtgtactttctcaataatgttatgattcttaatgacgattggcatgaaccgtacttgaagcatttgttgtattgtccacttcttgatgtgcagagaaactttgagtcattttggacattaggtgattgatgaattgtgtggtttcagttgcgttttgtttttaactttatagctggaaggggagggtaatgtttatatggaaatgttgcaaatttttaaaatattttaaaatttctaactgctaacacatattctgatcaagccagaagtttatgtgatttaatatatctgtgtagtttaactagaaacgtatatatgtagtttgggccatttttatttctgtaactaaattgtggggcaaaaaatatgatttgccaatgtaaaaattttttcctttaagttactaaccaagaagctaggtaagataagaaatgaccaaacaaaaataatgataagaaggacagctattatatgataaactttagacttgaaaattaggtaataaagttaatttcttcagaatatcctaaaatgtaagtttgtaaattgataaagttcagaaaaacttatccatcttctactcatcaagatagcaaagtaagtttttcacaaaattaagactgagagttacgttattttttttgaagtggtaatcttgctctcatctaatttttaaatacagaaataaaaagatccctttgaattaatttcaagtagttttaatacctctcttaaagtaaccccttcagttctgtcacatttatatacacccaactttgaagcctattaagaatatctttgacatgtgagtaccctaacagtggctctggtttcttaagcacaaagggaaaatggcagggtttaatttctttggtgtacatatataaatagatgtttcaaataaaattaattgggtaaatgtgaatatggtttgaaccagccagagtatgataaacttttaaaaaatttttcctcagtgatcagccaggggaaaaaatatatgtacagagctcctgcccctctgcccccttataacttagcttttgcctctggttttgcagcaggatgtgtgttggtgggtttggggttccttctgtcttcggatgtaacagtcatgttagcaacaatattttgcagttacttcaccatcctcagcataatctgcctctctctcaatcttaatacagacaaataggtatgtctataaatgcgttcatatagtgtcaaggtagggaagactataaaaacttcagatcaggaaaaaaatatctcttaagagagtgtcttaaacattttaaattgctaggcaatttaaatctctctaatctgaatattcaccttttggtggaaagagccagtaatattggttttcttccactaaaaagtttcttcaaaattttttttttttttttttttttttttttttgccgatatcttttacaggcccacctaatctttaaaaaaaagagaagaaacaattttaggcctgtataacatcctatttactacttcaagctccacaaatgtagttaatatatttgtttaagagagactttactcttaaatgttttaactttgcctacttaatggagttggatgtccagtgttggaaacagtcagtgtctgtttggtggctcgtgtttatttttgtcactgtagaagtgatctgctctggagtaatttgctgtatgcttattactttccacctttagcgttttgtgtactaatgctatgtactgctcctatatttatatatacatatatatatatatatacacatatatattatcagagtaatcttgctttggactgttgctctaaaactatgaatatgatgtagagactactacagctgcagtgaatgttaaggagtcaattcccatggtttagtttagtctcgggctggaagtctacatcttttgacctcttttgttttatatgatgctttttattatgtaggcactgccatccctgaatattccttgtaaagatgcagtgaagaagtcaatttaaaaggaagacaaagccaccgctgtctgtaaactgtaaatrtgtattttggcacttgtactccagtattctgaaaatagagttatgatggaaatgctgacagatccttaatggtggccagagctaccatgcagtgcaaaaataaattaagtgaaaatgtattattgagattaacagtgcaaggccaatacattttataaatctgtcagtatctttttaatggactgtgtatgtgtagttatgttgaaagatacattgtgtatgtgtacatgcttttgtgtgaattcaaggcacactgtaagatgtatttcccttctctaaaatccatgttgaaatgtaagtacagattgatagaaataggtgttttacttaaactcrtataatctgtttcagcaccttttttaaaatgtataattgtactgatttgctgagagtcatttgaccaaagtttggctttattttgcatacaggaaaaattagcccctagccttttctcaagaagtgatgctgtttctaaagaagaatagatggggagatctgagacatccagagagaggacaatgtgtccaaaaccagctgaaggcagagagtccatgcctcattcattttaggagtccctcatgtctaacaccatcttctgtgtcctaaagccagtatatatataatatttttaaaactctgcaaagattggaacaagaagtggtgggatacattttttggcataaactgggctatgtgtgcccggtattttttctttcccccctatttctttggagggttttgttcagaaacaatgtgctatagccagagagagtcgatcttacaaagtccctgcatttactttcacagcaagaactgctaccttgattagacaggaaggagaacaactactacaacaaagagaataaaatacattcagtttggtaaataaccaaggaattggatgtgatgctcttacttaatagtaaggagatttacatcaaatttgagaaactgactttatcttcattcaggctgacaagccatttaggggattagaggggactgctttgtctcttatcaacccgaaactgagtttaggtgtggaagcatcagtcccagatgggttggggtggcagtagaactttctaatgaccatacttggattggactaatctgttcccttgttgtggcatagatactcaattttatttaaaataatggccttacaccttctccactgtatagaaagggtcaagatcagccccaggccctgctgaagcacactcacccaggggtgcactgcaccacatggttttccccaataatttgtttcctgtctctccaatttatggccccatttcgatatgcaaggaaacctggagagagatgacagataaccaagcctgacccccagacctctctggttgctaattcagggaaataagtctccaaaactagtggtcttgttttattctgattagtagaacaactaagggtattttattggtttccttgccagggataccacccaaatagaaaacacggagcacatttcaaagcttctgctttctctgccaggtaatagtatccataccttcctgtttatgcggtccccttctgtagaggcgtttccaattttttccagaggttgttaaattgcctttggctctcagcttagcctcttggtcttaatttccccttaattaaagaagggtaaccaatgtggtccctaggagctagtgagagaaatatacggcacaaaccagaaaacactctgataatgataactgggccctatggctcttaaataacagcacaaatagtcttcgacctgaatgagaaggctccttgagtccacttttataacaattcagggtgactactagggcactcggcagtccgcatggaatgggaggtgcccacaaggagtgggagatagatggtgagtaaagacaacgttatttgctcattttccccttaatcatgtagtcatgtctcccaccccatgcagtccccaccacagagttctgaggcttcaaaagggtagaaaaggataaatccaggccattaaaagaaaataatcaaagctattgaaaagataaaacaaatgagtcgcactaaaagggccgtctgtgcaagtaacaaggttgaaatactgatactgatttcctagccgaacagcattcctcacacatgtggtttgtgtatccgtgtctgggtgggtggtctggtgagaagtgctaaacgcagcaagatggcttagtttttgagcagtggagggaagctttgggacaggctcagcccgtggcatctatagtccctgcaacataaagaggctttccttttgctttgttccaggatggaaagttttaacttggcttattcatttaaatgtgagtctctattctgcacagaaccaatcagagggtaggagtgtgtgtgtgtgtgtgtgtgtgtgtgtgtgtgtgtgtgtgtgtgtgtctgtgtgtgtgtatgaaccttcttgtctctcgccaccccagccctaggggatgggatgtgtggcatagaatgtataactcttcatttgttggaatgtattccctgggtgctaagcacctattaacatctcttttgaaagggacgctgttttaaataacacctcggtctagctaggacaggaaatagcattaaattaaaggtacacacgaatacggtccacaagcaatctaaataaaggtggactcccccaaaagcacatctatactaatgagaatgccaaatgaagcgcgcttagttcaaaggcggagacttcttaagggaagcttcttttattcaggaaacacgatgcccgacgatggcttttgagagacacaaatcattgccaactcacatctgaagacaggctgcttcatgaatatccctcagaattgttagatgtcgggagttttgactttgaatcagttgggggataaatcattgttttccaaattacaatacttatttgtttccatgtttattatctgtctcccccactagaacagaagcacctgagggcaagaagtttggtttgttcactgctgattccaggacctagaacaagtccaagacatacgagacacctctatttatcaaatgaaaatgtgggagcattttgtggaacatgaacctcttttgacatttcatgagaaatggttttgcgtttaagtttggaaaaattgcccagtatatgaccctcttggcaattcatgacgtactaaaatattaaatcttggaaagccacatgttccaccaatagtcaaacttgtttaactttatttaatgcaatatttcccaaacagtatgtaacacaatagtagttatgcaagataataatagctgtttggcatttaaaataatgtttctttatcaaaatagtttttattttattttattgtttttttatgagacggagtctggctcagtcacccaggctggagtgcagtggcgcgatctcggctcactgcaagtaccacctgccgtgttcacgccattctcctgcctcagcctcccaagtagctgggactacaggtgcccgccaccacgcctggctaattttttgttgtatttttagtacagacggggtttcaccgtgttagccaggatggtcttgatctcctgaccttgtgatccgcctgcctctgcctcccaaagtgctgaaattacaggcctgagccaccgcgcccagcctcaaaatcgtttttaaactgtatttcattcttcaaggtttataacatagtttgggtagcacagtttcagagaaggacaacacggctattactatctctagaagtgg

SEQ ID NO: 6781 - DNA, 87384 bp, Homo sapiens
aatacaataatacaaatgatataaataaaaaaatacagggtaacagctacttacatagcatttacattgtattaggtactttaagtaatctagagatgatttaatgcatatgggagattatatgtaggttatatacaaatactatgccattttatataaggaacttgagcatgcatggattttggtatcctcaggggccctggaaccaatacccccatggatactgagggatgcctgtgttaattcagcttactgtatggtttctctctcctgagtggacccagatggataccactcaagcctgcctcatttctgattctgttgccttcagcagtgtgactatccatttctttttcttttttttttttttggagatggagtcttgctctgtcacccaggctggagtgcagtggcatgatctcggctcactgcaacctctgcctcctgggttcccaccattctcctgcctcggcctcctgagtagctgggactacaggcacctgccaccacgcccggctacttttttgtatttttagtagagacggggtttcatcgtttcagccaggatggtctcgatctcgatctcctgaccttgtgatccgcccacctcggcctcccaaagtgctgggattacaggcgtgagccaccgtgcccggccgactatccatttcttgattcagaggggaacttccaccccacccacagggtgtgtcattgtctcctggcccaggaaaaggtaaccgtagcagttgaatattattattcacacctgaataagattctactgcaatcaaagcccaggccatatagggctgaactgattcctaatcctttcctctgccttcctctccactccctctccccaagagcatcagacacggttgctcctgatgccctgtgattgcaaactaccacctgcaggtcacctgtggtctgtttttgtacagctcacaagctaagaatggtttttacatttttaaagggtcgtaaaaaaaagaagaataagaaaaagatgatgcaacagagattgactgtatatggcctgcaaagcctaaaatatttacagtctgattttttacagaaaagtttatgggtccctatcttacaccaaatgacacaatcccatcttcaaagcaaacaatgactgtgatggttaatattaggtgtcaacttgattgaattgatggatgcctagatggctgatgaagcattgttcctggatgtgtctgtgagggtgctgccagaggagactgacatttaagttgatggtctgagagaggaagacccaccctcaatgtgggtcggcaccatccaatgggctgccagcttggctagaacaaagcaggtggaagaaagtggataagcttgtctgctgagtcttctccctctttctctcttcccatgcttctcagcacactaggcttcttctcctcctgcccttggacatcagactccaggttcttcagcctttggactctgggacttgcaccagtggcctcccaggggctcagactgagggctgcactgtcagcttccctggttttggggctttcagacttggactgagccaaactactggcttttccctttttccaacttgcggcctatcatgggactttgccttgtaattgtgtgaagcaattctccctaataatctcatatatatatacacatatatgtcccccattggttctgtccctctgaagaaccctgactaatatataactttaaaccagagtggtttcaagccagatttaagtttgaggagatgtagaatttctctaattttcctggacagagtacagtttctataaaccaacagatcacttgctcaacctctcagaatgaagcttgggcattaggtaacctcaccaatatttaggtttccctagggtggtaagagctccttgcctaattaaggtcaccaccatctagtgctcaggccttaatgactgccacagaagaacttcagtctgaggtcgctgacccccccatcagccaggacccttgggactttaccccaggagaatacccccaataacttctcccagggcacttggaagcccccaaggttaggggtgagggtggtgggcaagggcaggtctgacctgagaaagcatgagagctcaagacaaggccctgcttcctgaattctccaccccaagtgtgtcgacgcagcattgtacagtgcagaggagtggacggatggaacagggttgacaccatcagcctggaagagcaggacagtgagagttcacggtgcatctcatataagtactttcccttaccctgtccactgccagtttccttgagtgacccactctgggggtacctggtatcacatcccctccgctcaccagtgttatctccatgcatgtcaccaggccctctttacacgcccacagcagtggccctccacttccctgcctctgggctttcttcaagctgcctaagtccattaagcttgtggagagaggtctcccctaaaggtataggggagttaatgaccctgacagttgccctcaaccaatgggggatgagagttgagtggatgtgtcccagccaccatccttcagtgggaccattctgaggcacattctacacaaatcttcagagtgtccccagcaagattgtgctccagctgcccacagtggtataatatctagtttaggatatgctctttattgactcttctcttttccctggctcatttgccttaaaccctcactcctgcctcatgggactacctcccaaataacttccctgtgccttgctgaggggggcaacctaaattaaaacaggaacaaacccccagcatgggaggaacaccttccgtctaatctgagtgacagtgacagaatgaagggtcagcagctgtcccttgatttcacatctcttatcatttttctgtagtttcaaaaccagtccatatgcacagccctggagggccctggaaatggtgcagagttagaaaggattacctcatatcctggatgactcaatccaagtccaaaaagacctcaaccgcctaaagcaaggcgaccaccatcaacaggatgaaattgaaaagaggtaaataaggaggactacatttaactttcaaaaggaaactacttgcccacatactgaacataaaagtcattaatgtgaaacaaaaagctccctatgagtcaagacttaaaaaaagccagagcaatgtggggtggtgtgggccgaagttcccagatcaaggctccacaaggctctgcaagatcaggctccagctcaccaccaccaagcccaggtccaggactctgctgagagcccagtgcatcagacacctggaagggctgctttagattcactcagcctcaccttccgtagggcctttgcctacttgagcaggctcagcctcggtagtggccactgtctctatgagggctctggccatcttcacgtgggcacaactgacagtgtctttggccttctgctgcccttggtgttttcctgttgatactgaggtgcgagatgccatgggactccctgtgtacatacacagcatggacattaatggccaatggggcaaacctttcaccaatgggagacaggacccttccttcctctggtagatgttcctgagtagcggttgtttatatggccccttggaagatggtcaagccattcaatacactttataccagctggtggccccgttgagaacaaccctaataccaactgttccctgccctgcatttcctgccttctaactcttgctccctggattatactttggaataaagtccttgcatataagcctttgacacaggttctgttttctggagaacccaggctaagactgatgttatctgaaccaactcctaaggccaaaggaatgtggtatgctcactgacttggcttggacggcctgctgtaatccctgcgtcaagtgggaggggcttaggccaaggagcaggaggggctgtatataacatgagaagggtggtgtgaaccaaccaagactcgactacacagtgaagtctgtgtttgtcttgccccagaaatgagtgtttacttctagttccttaaactatcccatttctagttctatggggttgtttctcctagcaatttctgatgtctaataaatcagaagtgatggtacaaatccagtttagcatcttgcattttgtaattcttgtgttcacaaatgtgaccaacccgttttaacggctacagattgcaatcacaagcttaggcagagaaggaacgttgcaagcttcttttttaagtgaaatcctcctgattcctcagccctccggactggggtacagttcatttcagtgattattggagcttccaccccacccactaagtaaggcttgagaagcctggtgcagagcaaaacaaccggggaaccctgcaggtctttgtgctgtgcccattgctgttctcatttgcaggctggtggcagccctcctgcccaatcacgtttcagtgtgggagtctttgctgagcctggagtccctgctttgagtcccctccccatgctgagagagccctagccccatgtgggaaaacctgagactccgccttccccttatactcatgtggacttgaatgctactcttcttcattggctttagagcttcttcctaccccctggctatctcagcacaaccccaaaatactactcatcttactccaccctacctggggacaccaacctaacctcagaacatttagggccaaggtcacaaattggtaacctgctggccaaatactgcccacgactctgttatattgttttatatacaaaaaggggaatttcatttgtaaatgcagacttctggtgtgctcagaatatttggaaaatattccggaaaaatcaggatatttggcaacctggaatgttgattgtttcatgatgacagttggctgggactgaggagcagttgcctgcttcagatgggatgagtgctcatctatttggaaaagttcctaccattatctagacttcatacctggcctctataggcattttggtgtgagtattaaatttatttcattaatccaataaatctttattaagcaccttttattggcagaccttgttctaggcatgggggatatagaagtggcaaaaaggaccaaagatcctgtttagacagaactcatattttgatgggagagacacaatttttaaaaatagaaacattaacatgtaatatgtccagctgtgattaccactatgaagaccatcaagcaggctaagagtaatggaagataatgagataggagtggggacaggtgaggtgccattttgtatcaggtatttctataaggtgataaggtgacatttcagcagagactgaaggcaatgagaggcttcccaaagccaggaagagagattctgtcttcatatcacctcttttaaggcctgtgaggcaagggaacaagcacaaaggccttcttggaacattctagaataaaatacagaggccaaaacaccaagagttctcattagtttttagttttgcgttccagtagaagctaaacacaaactaacaccttattaagtttttagtttaactgttgtaaacgctttgggtaggtaaagttaaaattcaagtgtgatatttatccatttaaaggagtgaatcaatcctattttattttctatatttttgggagctggcctttctgctttagtcataggacgcatagagcaagcttttctaatttgattgttggatgacggtgtggcatcttcctttaggttcttttcttgggtcatgatcacagctagtgctaaaccactccatgctgcctgatcatacaccagggtttggttatccacataaacatgatgctgttgtgagttcatttttctatttagagaagcatgtcagctagaaatacttccaccttatttcccagacacatgcgtgctgagtgagtggccaaaatagccccttgagtaagtggcagctttaaaaaccatccaactgctgacttcaaactagaaggtcagcaaaggaaagtggaagttggattctgaaagatygaggtgcccayaggaattttatggtcgtcggattttgaagacttgaactagactgggggttckccttgcatttcttgcctgttgcctatctttgtcctctctcttccggcttcgagatgaatgtgcagccctgttctaggtgtgggtatggggtttatcctgccgagaagatcagctgtatagatcaggtcagtagacatttcttrgcttttgtgaataataacaaacacaggaaattgaccttctcacatatggacataggtaaatatggaaatttaattttcagttaaattgttttgaaccacaagaaaaagttatattttctcacctttatttagttctacacatttctatttcttctgtgttrtctcaaaaaaaaaaagttatccatttatttaaccgtgagtgttgttatagctgtgtgtgtggattttaatttttttaaaatcagcattttatcctcgaagttcatttttttaccctaaaatatataagaaccttgagtctggggggaaaagggtaattgctaaatcttctctatatgatttctagatatggcataaagcctgttttcactgtgaagtttgcaagatgatgctgtctgttaataactttgtgagtcaccagaaaaagccgtactgtcacgcgtaagtgtttgatgccsccaccactacctcttgagttttatttgtttttcaacaaggagccaactaaaygttcaaatcatataacccagggttaaatccaagaaatatcttctcccaaagtgttcccttgtatcctgtcattaaagagacctaaggtgggattttatgcaatggacacaaaacttcaaatttcttccaagtaaaagatcaaatatatccactrtaacctcatgtcaaattattaaatactgtgcagaacaatgtaatggccataaatatgcatatagagctttgaagtattttcttttaaataatttcagaatccttttttactttcttcagaaagttttcaagtgatcatttccagttaaatttaggctttcagttatatatgtcgattttatttgatttgcttttttttctgtaagatgcattgcctggaaaatcackaacttaatttttaagttttacatttattgattttttaaaaataactgttattatttaaaaataattttaagaatagtccctcaatcatttggataaagtacatttctaattttgatttatacctatttgttgtagccataaccctaagaacaacactttcaccagtgtctatcacactccattaaayctaaatgtgaggacatttccagaggccatcagtggggtaagttatttaattttcagtgggatggagggtatggagaatgattggttactgggtagaaacatgcaaatagataaaaggaatatattctagccaggcacagtggctcacacctacaattccaacactttgggaggccaaagcgggcagatggtttgagyttgggagttagagactagcctgggcaacatagtgagaccctgtctttatttcttaaaaagttaaataaataaaagaaggaacatgttgtaatgtcctatagcagacagagtaggatgaccacaattaacaacaatgtatcatatatttcaaaatagctagaatagaaatgataaatactcgagccgataaacaccctaaatgccctgacttgatcattacacattctaatatgtaacaaaatattatatgtactccataaatatgtgcaaatattatataycgattaacaatgctaggcacatgttaagtttttaagtgtctctgtctgcatgtgaacctgcccatttcctccacatacacatgtaaartgcatttgagtaacaaatrtgactgtttgttctcccacaatattaggagccaatatacaggataatctagattgaataattgaggtccttgatttcagtataatctttgtgtcttgaccagctcaagactgtttcataaaatgatgacagtttatagagtaggctctgcatatactaggtgcttaatacataaaacaatgcttacgtagttggaacatattacaaggatcttgacttttccctgtgacattctggtacacaaaattaaaacctttagtttcacactgttaagtctctctgaattcagtcattacttatgattattggcagcctgttttccccttggggtggggataagtcaaagatgttttcctttggaaaggaagtttagtttaggacgtgtggggttgagatggggaggtaaatatggaggccacattgccaaatccaacctcttgaaaatctaatagtggagttttgtcaaataaccagttatcgacggaactcttgcacctattaaaatgatgaatcattgagcttctataacccatgcccacaagaagttgctctgtgggatgaagttttagtggctttctaaaattagaaaattacccatgaggtgaaagactctctagtgatccctctttacccaagattcccttcctaatgttgctccacctcatactgactcccttccctgcccagctgtcctcctcccaaaaaactgtgtatgagatagaggtagtgaccttgctgtgtggctctctacacatgctgccaagataccttattttcactaagtgcttagaactaattgtgagtttattatttcttttatttaacaagcatatatagcatttactgtagaagcacttaattaatttaacgtacaccacaactcaatgaagttgatactactattatcccattttacggtgaggaaacagaggctcaaattgttgctcagacatcattgcttcctagggattcacaagtcttatgaattcacaagtaatcctaggttactgagaagcctaattcttttaggactttgttttcatctcttggtgtctgagagcagctacatgaaattacaataaatattgaatctagctcttacttaaacagagtrctgaacactctgctaagttctttatattatctcatgtgttattgacaagaaccttctgtaatattattgtgttatagttgaggaaactgaagctcagagaggttaagtaacctgcctagtttacccagctggttgggcacaaatccagatctgtttaactttaggatatttattagtggctctctttcatatatatccagagggtggcaaactctccagaagacaaaaagcacttgttcatgttttcaaatatccatatgtttctgcagttgtgtagcgaggatttgacacataaaacatgaggagatgtactttacctcagaatgctstttgcatttattacagtgtctrcagaaagatccataatgtctgtatttttcctctaactgagccacagcaggcatgtctccaccttataatcacacaacaggtcacacactattttcctctttttgaggtgggagtggactcactttattttaactgtgtatgacaggcccaacctggagcaaggctaggattgttgctggttctatttccagccacagacagtgatgtgagcttcccaggaagcctgcgtgtgtgtatttgtttgcgtctatgtgacagcgtatatgtgtgtatatatatgtgtatatatatgtgtgtgtgcatccggagagtgtgtatatgtgtgtatgtaggtgtgaatgtgtgtgcacacacatctatatgtgtgtatgtgatgtgtgtgcatgagtatgtgtgtgcacatgttcatgtgtattgtgtgcatgtatttggtgtgtatgtgtttatgcatatgtatgtatatgtacatgcatgtgggatatgtatatgcatatgtggtatgtatatatgtgtatatagtgagtgtatatatgtatgtatggtgtttatgtatgtatgtatgtatatatgtgtatatggtgtgtgtgtgtgtgtgtgtgtgtgtgtgtgtgtgttgtctactgagatcactttctcctttttgcccaccagggacaaagtaaaacggacaaccatatcccttacagggcccagctcttacaactgccctagggtgtgttatgaattaccttttcacctccctgtgatctctgggagactttgacaattgaataaaaaacaaattcattgtgaaagtgctaaaatcaaaaaaggaaagagatttttcagtgatggtgatgaaggagaaaagtagagattttaagctggcattcaaagcagatttgcaggttttttgtctcctaaatgtcaccctttgaaaaataaataaatacttgcaaagacagaatttcctgtttggtaggtgtgaatggaatttttagaaaaataaaacatctagggttttcttctattcagagaacgaaatttagcccttcatgcttccttaccccactggtaagatttatggcattttttcctctttctgtttccttggtgtaatcctgaatctcacgaaaggtccctaggggaggcaaaccctccccagtggtagatttgcactggggaaggaggacagcaaatataactttctagaagtggacagaatatctattttggtcttttggtcctgtgtttctgattcctaaagtacattgttctcaaggagggcagttccccccaacccctacctgggggacatttgttaatgtctgggacatattgattgtcgtgactggtgttgatggggtattattgcatctggtgggtggagacctgggatgctcttaaacatcttgctatgcccgagccagtactccacaacaaataattaactggcccaaaatattggtagtattatttgtaggtaaaaacaaaaaacgaacaaacaaacaaagcccactttaagtttacgtaatgttcatttaattgtttcctaaaaatacaaggaaaaagcatgtaaagatctctcagtgtatatatttaaaaatatatgcatcaagtagcattaagcagtagcaaccctggaaagtcaatatcagaatgtgcccttgatagggaacaagaatcctttgggtttaaacttttctctgagcttgttttcttattatgtttaaaattaagaatttaaacttcagcttgtaaaaatttcagatttctttctttctttcttttttttttttttttttgagacagggtctcactctgttgcccaggctggagtgcagtggtgtgatgtcggctcactgcaacctccgcctcctgggttcaagtgattctcatatctcagcctcctgagtagttgggactacaggcgtgcaccaccatgctcagctaattttttctatttttagtagagatgggatttcactgtgttggccaggctggtctcaaactcctgacctcaagtgatccacctgccttggcctcccaaattgctgggagtgcaggcrtgaggtactgcgcccggccaaaattgccgatttctgggcctcacttcctacctaataaattttgatatcttagtttggacctaagaccttctgatgttttttcttttataattagtcctttttacatttaagaaatctttgtctatctcaaggttatgaagatgttactgagaggtcagttttcccccaattaatctatacattcaaggcagtgccattcaaaatcctggtgtttttttgtggaaatggacagactgattctgaacgaatataaaaacacaaagcttctaaaatagccaagaaatcttgaagaacaaatttgaaggactcaccagatttcaagacttactctataaaagcagacttactctattaactcagcatagaattggcacaagaagagagaaatagaccagtggactccaacacaaggtccagaaatagggctgcacgtatatggtcacttgacttacaagaaaggcatcactgcaatttaacatagcaagaatgatcttttcataaacagtactgtagtaattaggtatttatatagaaaaaaatgaaccttgacccttatctatacgtaaaaattaactcaaggtgtattataaatcaggatgttaaaggtaaaattgtgaggcataagaagaatatcttcataaaattgaggagccagcattttaataagctccctgggtgatggttacatgactaaaattaagaaccagtactctaatgcccaatgttttctgaggttactctaatttgtattgtgtggtaggtttataaagactttatctcagtcactttaattgcactgcttcaaagagcttcacacacagcaggtgctctatatgtgccacctggttggaggtgcagattaaaccacagggagactgacagcacagtgtgccttgcagcacagtgaagatgctttgcagttgagacttagcaaaatcccccaattttagctaggaattgtttgtctatgtttttttctcttttctgatggaaacattactgacaacatcttccttgagcagatccatgaccaagaagatggwgaacagtgtaaatcagtttttcaytgggacatgaaatccaaggataaggaaggtgcacctaacaggcagccactggcaaatgaggtgagagaaaagtgacaagtgggtttggaaaaagaaagaatgacatactatgtcaattgagtgtattattattattacttctagagaaaaccaagtaggtttcctttcacccagtttgtaattccagctgtctatggaagacctcaatcagsgtgtcctaatatcacctgaactctatcttccccagaccaggttcattgtcttccccttccaaccactgtatttctatcacccaggtttgaaaccaaggctaccctgtctttctctgacacttcactcagctccacccttttctctccactctccccgttctgatctacatcattttctgcctggacctttacgaggcctcccaaggtggctgctttccctcctctaggctggcctctctccagcctgttgtactcacatgggtcaggaggctcccagcttcctaggtgtccctgacttactcttcccacctcccctgtctgttgacagactcatcatttcagaattccttagccatttattttatttacacacataatatacacataagaatttgcattattcttattataaaaaaaaatccaaacagtacaaagctaaccctttatccaccacctccaattccagttttctttgtacaagtacccactctcgtcaatcttgtggatagcatccttccagacttttctctattgatttgcaaataaaaccatatctttctagaatttacatttggacatgctaccatttattgaaggatcttaaatgagttatttaaccattctttacttcaactttctcatctgtaaggtgaacttcaaaaacacttcctaacataatgatattgcgatgaacaaaagatcttagaacagtggtaggcacaataaatatcagctagtattacttgttattgaaaattatatatgtatatatgttatataaacccaaaagtatctgagacaggtctcaatccatttagaaagtttattttgccaaggttaaggacacacccacgacagcctcaggaggtcctgacaacctgtgccagaggtggtcagagtacagcttgcttttatacattttagggagacatgagacatcaatcagtacatgtgaggtgtacattggttccatctggaaaggcaggacacctcgaagtgggggctttcaggttataggtagatttaaagttttctgattggcaattgatttaaagagttattaactaaagacctgaaatcaatagaagaaatgtctggattacaataaggggttgtggagaccaaagttttatcatgcagatgaagcctccaagcagcaggtttcagagagaatagattgtaaatatttcttatcagacttagagtatgtgttggtgttaatgctggtcggtaggcttttcttgaattccgaaagggaggcgggtataatgagacatgttcgacctccccctttccatcatggcctgaaccagttttgcaggttaactttcgaatgtccttggctgagaggagggatctgttcagatagttagggggcttagaattttatttttggtttacagtatatttctattaaaatgtatacttttttcatgaaacaatatgcattgttgtgaagtgtgtatttttcactcaacaaatatcttggaaatatttctacatcagcatccttttaagctatcrtgawtgggtgtatcataggtgcaccattaagtatggatatacaaggccaggtgccatggctcacacctgtaatcctagcactttgggaggccaaggtgggtggatcacctgaggtcaggagttcgagactagcctggccaacatggcccatctctactaaaaatataaaaattagccaggcatggtggtacatgcctgtaatcccagcttctcgggaggctgaggcaggagaattgcttgaacccaggaggcggaggttgcagtgagctgagatagtgccactgcactycatcctaggtgacagagcaagactctgtctcaagggaaaaaaaaaaaaaaaagaatggatgtacaataccatactatcctattgatagacaggattattccaaaattttttttctattgcaaatttgcaaggaacattcttgttcaagacctcttttgtatacaagtgagtgtttttctagactagataatgaaaaaacaaagttgctagatcaaagggtatgtcccttttaaattttaatggaggctcaaattgaattctaaaatagctgtacattttatactcccaaaggcagtgtgtgagaatgcctgtttcccaacattctaaccatcacttggtattgtcagataagtgtytggacaatctgcatcttgtttcaatttagatgtccctgattgctagtcaggttgagtataatttcacatakgaataatctgtctttctggatctccaaaggctggctctatccaacctgtccaacttgcccccctccagcccacctggctccccatctctttcccttgtgtccaatcaaacccagctcctcatggtcctaattactgagcccatcactgccttcatgcttttattcatggcagcctacattcctggaatttattcaacaaataattattgagtctatgagttgctacacactgttccaagcttttgggatgcgttagtaaaccagacatgaaaatccctgccttcatggaacggaccttctaaagtggatgccattcgttctcccttggcctctactaattgccctcagccctggaggtacagctcaaattctatcttcctgccccatatgggacccatctcttacagactgctttttaaagattcttattgtacttatcactcagacaatacacttaaacacataactgttttctaattgctatttatttcatgttagttttatctcccaaggtggtaggtcatgagtatcttaaaagagaaactttgcctttccttttttttttttttttttgcttttattgccattgtcagttgtcaagcacataacaggtagtaggtttttgacatttgtctgaataatgttgattaatctcagattacctgtccacagwgatttcccctcctcctygcccaatcttgatgcaatggtgtgcaagaaaatgttgttacattcaaaattttcctgtaacataagtggttctcagaaagttcaattatttagaatcttaggtcattttctagcctgaaataaatgaacatttcagttagctgagacccrggatttaccaataggagtttataatgtttaagaatatcttcttttgacaatgtatgtaagtgttgctgggagtctggggcatgtgtttgtatcccttcrtgtgcttcctttgtagagagcctattggactggatatggggaagggaatkcttggtgcccaggagctctgccagaccccgaaattgtaaggatggttgaggctcgaaagtctcttggtgaggtaagcaccctagaaattgctttaggaattggtttagcaattacttagcaattagtttgactgttccttgacttttacaatttcggtagacagaatgatgctatcatccccaaagatacccatgtcctaatccctgaaaccaggagggtcagagtcagaggaaaggtgatatggtgacagaagcagaggccaaatccatgtagggcaggaactagaaatgtrkgggcctctagaagctggaaaaggcagagaaacagattatgctctagaacctccagaaggaaccatctccratggcccattttaaagtactgacctccaaaatcataagagaccttagcaggctttcacatagggaagacagttttagcccagactgtggaaatcctcaatcatttgcacaggttacgctctaggtaactaggtccctcctggttacctctaggtacacttaccctttgaagaatctactttggaaaacactgttagtcctcatgacttttctttagaaaatggaaagaaaatgctagaaacacaaatgctaaggtgataagtctcattaggaaaactaatcatcagagatattcaaaaagtcagaaggaaagaaaaagagacattttacttccaatactgtagtactcttgctagcagacgagttacaggaaagtcacccatgtattaattaatagctgtggtacctacaggccttagagccaaagggcagcccttgagttgtgccaggtccccatattttgatatgaacattgaagaggagcccctttgacatgggaaatatgagttcttcagtgctgatggttttattcaaatggtcaattataagccatttttaaatttattacaggtgattgaaatatttccgaagaactttatgaatctagtttcattggttttattgyggttttcttagttgtcattcaatatcatctcagttctcatgctgacattggttctgaccaacaggaatayacagaagactatgagcaacccaggggcaaggggagctttccagccatgatcacacctgcttatcaaagggccaagaaagccaacsagctggccagccaagtgagtryctgggtgctttttcaccattgattatgctaatttttgtcattaatgagcccccgtgatttagggaaaaaacagtaagagagtgctttggggaagtaggtaccattagtgtcatattacagagaaaactgtgttcttacytttccccgtcaagtattctctgtgctgtgattggaccatgtctataaaatacagagaagaatgtatagttcacccaaagtctggaccacatgatttcttgagtttgctttagcactgaayacattattattttacatttttatttttattttatttatttatttttatttttattttatttttatttttattcttggctcactgcaacctctgcctcctgggttcaagtgattctcctgcctcagcctcccgagtagctggactacaggcacgtgccaccacacccagctaatttttttgtatttttagtagtagagatggggtttcaccatgttggccaggatggtctcaatctcttgaccctgtgatccacccaacttggcctcccaaagtgctgggattactcgggtgagccaccacagccagccgaagacactaatttttaactggatgtcaggttcaccggaagagtagcaaagtttatttgttaaaagcttagattttggagccagaatgttgaaatttgaatcctgactctatcccttagtgctatgtgaccatggacaaattacttaatttctctcttycttggcttctcgtttgtaaagtgagghwtagtcctgccaaatatgattgttatggagattaagcaagttaatatttgttggagtgtggcagtccctggcacactcctggacttagcacattggcatagatgctttttgaggaggagcccatgaaacaagccacagaagacttgccacaggtttgcattgagtgtagcctgatggtgcagctttaggagagccacagggagaggtcactgaggaggctgtgaggtgggtgcacccttgactctactgtcttctcatcaggtggagtataagagagggcatgatgaacgcatctccaggttctccacggtggyggatactcctgagctkctacggagcaaggctggggcacagcttcaaagtgatgtaagaaaggagggaggccagtccatcactgatgggcatttgggttgattcctcatctttgctcttgtgaatagtgctgcaatgaacatacacgtgcatgtatctttataatagaatgataaaaaggaacaagatcatgtcctttgcagggacacagatggagctggaggccattatcctcagcagactaatacaggaacagaaaaccaaacaccccatgttctcacttataagtgggagctgagcaatgagaacacatggacacagggaggggaacaacacacactggggcccacagaggggagttgaggggagggacrgcatcaggataaatagctaatgcatgccgggcttaatacctaggtgatgggctgatacgtacagcaaaccaccatggcacacatttacctacgtaacaaacctgcacgtcctgcacatgtattctagaacttaaattaaattaaattaataaaaaagagagagaaatgaggaaggccaagatgtagtggtttgcacttaagatccctcattctttccttgcttggaggtggagggagggagaatgtatgagacattttagtcctgcatgggtaacaagaagaaattcctgaggtcaaggatggttgggcttgataagtcagttagcagagaccttgcaaaaacacttctttaaagagaaaactttagattggattagtaccaaattggatgtatctcagttatctgagagaaawctctcttgccactacaaattagagaacataatttctaaacaacttttaccacttgcctttacataatccaaatgttgcacagcataataagatcaagaacttagtgttgttctgaatgggacattgaagcacaaatccagcttctgcgtcatacatggtttcctcttgcyttagccttaatctggggttgagaagactcttgtgtctcccaaaaatggctgacaactccttgagggctgaggacttattactctgcccaggcccagtgcctggcccacaccaggtgcttagcaagcatgtgttgaactccacattgggtgtctccatgtgccaggcactgtgctgggtattgggaataagaagatgaataagatgcacatggcccatcaaactgtaagccaattatgtgccttatgagctatgacaggagatgggcaggatgtcatggaacccttagcagagcatctcactaagatcatctgataaacatggggcatgtgattcacatgttttttcatttcaggtgagatacacagaggactatgaacaacaaagagggaaaggcagtttccctgcgatgatcacacccgcctrtcagatagccaaaagagccaatgagctggcaagtgatgtaagtgtccttgacaatgtggtcatgttagggagaaagaggaatgtgaacctgggtctgaggagtccaacttcctgttgacttttgcatttaccctgaagccagggagtagttttcctttatagttttaagtcaattttaccaatgacaatracctggcacttttatgtctgagacatacctactccctagatccaagcagaaaaagaacattccattaagacattcacttttactcttttggctcctgtgcatgggagtcaaattcacygagtttgtcctttgccttaaaacaggtgaggtaccatcaacaatatcaaaaagaaatgaggggaatggctggtccagccattggarctgagggcatcttgacaagggaatgtgcagaccaatatggccaggtatgtgataaaatgatctcctgacctgctcttttccatgtttggcccattctaggctgtgacacagctatgacaatttaatcaggggtggggctttggtttatctttaccttttttatgaraggtagattttccaagatagaaagtagtggacaaacaattgcacagggctcaacttgacccacttaggaaaacagattgaggcactttctttttttaaattaataaatgacttataccaatatggtggcttggccaagaagaaagcattcctatctgtccattgaagaacagtcgctaggactaagattggctaagcttagctggwctctatcataagcaacatagagatcaaaatgcatcttgaaaaatattgagcatttcactgagtagtggkgctcattttcttagaaagtgaattttttttatctaggttggtagataaatcagtatgccagagaatgcaaaccctttttccaatttcacttctcagatgaactacatcttgacagggagtaaaaaaagattaagatgacaatcacaagctaattattatttgcacatccctctgtcttttctggtactagccaggtgttgtagggtagaaaggaagcattattgttcacagttgcaagtgaagaacattggaagagcaagtgtgtgtattggaagaatacattccatgggtttaagtgatttttattcataattggacagttgtttgaawtatttgtcagtaagtagactctctacaacatatatgatttagaaaaccacaatgaatttgtttctcttctttagaaagacacattgccatagttaggcatatgctcatatgagtcttaggatgtgtgtgaaggtcggttgggactcctttgaaaatgtctgccagagcaaaaatgcttggttttgaatttaaaaggccatttaatcaaattctctaagttaattaagtggtcttttagtgctttaaaccagtgaaaaatgtttttactggttttgtattttaaatatattgtttggaaagctcaggacaacttttaaaaatcagcttaaaaaaaatctggcttctatatttggcaaaaagtattttgtcctgtatttggccaatcctatmtaccagtagttataagacacatgtatcatttcatatgtgtacctagacatgtctgtaggtacagatgaaatgtaacttcatagtatcatagctggttcttgattagtaggacgatttgattgaagttttcagtcctgaaaataacaaatgcaagaatcaaagtgagtgttgtttgatagcaccttcagcagctgttgagaggactcagtctagcatggcatttcactgttgtgatttagcatgactcgccagggcatgaggaggagggagygagagagaagccagcaggcagataactataaatatctgtagtgccttaaatgccaaccaattcattcttctttttaacaagtaactagacttgttaaaaggattataccatgtaatcaacaggattaggtgtcttgaaaaaagattaacacttacaacatatatatatatatatatatrkagakakagagagagagagagagagagagagagagaaactaaaataaagttacaaacacaaaactatagagcagaatggacaaagccatagagcagattaccaaagaatttgagaaccttttaaaaaaacttaacctttttttacttattatatttggccagaaccttctgtcagccaggcaaaaaggagaactcgggctaaatagttttcattgttggataacggggagcctggactttctaatctgacccaactattttattttagaaaatgtgtgtgccacagtcaaagccctggtgctggagctggacaggcccmtggcttggaggaggccacagagagatggagtcgtgagcctaatgagggcaccatatgggctgtttcagatttatgcaaaaagtgcagtgaaaacacagaggactctgcctggggcaggtccaggggtgaaggaggactcagggacttccacgaggagactgtccctaagctgggtcttaaagtacatctggctgccagggaggggttatccgtcatgtgatgacagtgtcatgaaagagaaggttttcctttctgggagtggatggatggtgtggggaagataaaagaaaggattaagacaaagattataatccttagtctgaaatatacatttagtcccatttcagataatcttatggtaatttgaggttttcctcccatattacaaacattgtttaatactccttttctggttacatgacacataccattggggaaggcagtaccactgggggagacagtaccaccgggggagacagtaccaccgggggaggcagtaccaccgggggagacagtaccactgggggaggcagtaccaccgggggagacagtaccatcgggggaggtctctacatagatctgccactgggtgtgagtaaggtagtgttcgagacctactggaagacaaaggacttccctggttgtcagttaaaaagtgaatatttcataacatatgggcctgggagagtggtagagtgtctgatttatctagtggaaataaggatgatgatcatgatatcagttgccattatttggtgctgactatgtgctgggcaccagtaagtgggcctgactccagggtctgccatcttaaaaggaatgtttaaactaccacatggacatcagtgaaatacccaaggtggatraacctctgtgagaataggctctatgagtgaccattgctgaaccccacccatctggggagggaagcattactcactgaagtttttgatgcacccggcagggttacccggaggagtatgaggagcacaggggaaagggcagcttcccagctatgatcactccagcatatcagaacgccaagaaagctcacgaactygctagtgacgtaagtaccatgtaggtgtgaccacagagccagaggcagagaagtgagactttgaaggctgtgcttactgaaacctacacacagatacatttattatagctgagccaaagtagaatgttagccctcaactcccatccaaatttatgatgcctgctttggccccatttgtctgcttccaaggagatggacacggacarccagcatagctcgcttgaggccaytgaagcaagtacagaggctggccagccagagtggggtgttaggagagttttgccaaatggcccaattagaaattgagtaatttaggggaagagctgattaaaataagtcatatgattatcaaattgggtgtaacccrgtgatgaaatgattttyattggcagaatgttagcctgctggcagtccttggaaggcagggtataattaaacttggaaaagtgacatgctcactgcagatctyagcatgccaactggaacttggtctcaacagaacctagcattcatttcacgccccttgccattttctttttctttccttttccttcactctcttttctttcctttaccaaagaactattcacctattacccattgacccataacagcaccatctttgcctgaggaaggaagttaaaagacattactctgcccctcattagcagggaaatgatgtttaaaccaagggcagaatgggtttggactgacaacttttgttatgattattttaagacttttttttcccaygcagaattagagtataaagtataaaaagtgtgaaaagggccaggaaaattttaataacaaaaaaggacaaagtagtttatagatttaatgaagagaaaaggccatgtgaatttttttttctttcagaaaattgtattaagtaaatgwtgacattaagcccaggataactttggagtaattcccctcccagagcatggaaacatcaactccagccccgttttgtgttttttttttcagataaaatacaggcaggacttcaataagatgaaaggcrctgcacattatcactcgcttccagctcaagacaacttggttctcaaacrggctcagagcgtaaacaaactcgtgagtgaggtgcgtatgggggaaragtcacacccatgagcatcacctcttttatctcctatagtcagtgaatgaggtgaccctataataaaaagctctggttaaaagtgtgacaccggccaggtgyggtggctcacgcctgtgatcccagcactttgggaggccgaggcaggcagatcacctsaggttgggagttcgagatcagcctgactaacatggagaaaccccgtctctactaaaaatacaaaattagctgggtgtggtggcgcatgactgtaatcccagctactaaggaggctgagayaggagaattgcttgaactcgggaggcggaggtcgyrgtgagccgagatagtgctattgcactccatcctggacaacaaaagcgaaactccatctcaaaacaaacaaacaacaaaaaaggtgacaccacctattctacccattggttactggtttcaaagaacagatatgcggtaaaatgcaatttacaagacagcctagaatcaaaccaattacatctttctctggtggktcagaagttacttcctaaatcctcccagggctgtcaatattcaaaagtgccaggcaacaggcttctagttgccagaaagaatactggaggatccatctttttaamcaaatcaaacatctgaaagatgtttcaaatgtcaaacccctctcgttctcttattactgaagtctgagttctgagaagctgtgtattccatgtgaatttcccttaccttacatgctgcactggctgcctgaggggtgtgttttgtttggcttgcccaccgtttaagacgtttttattgtgaggactgtttggcaaggaaatatcccctgtagaacctcatatccttctcaygccctagtgtgttcttcacggcattttccctcatttgcatttcttatctggactctgaaggcatttgacttggcagcctctggcaacgggaacaattatggcaattcaaagcattcacataacaagttatctgcaactcacaaacagatatgcaaatatccaaaaatattttccgtctctaacctctaaaagctggtcctttaccctaaactgttagttaacccgtgatcctctaacttggggctgctctgagtcaccagcagtgatattttcccaagcctcatcaggagcctcagatactttgaagtggtagatgactgttgaggctttggaatctgcattttaaacaactgttccagatgattctggtactctagaccagaggtcaacacactacaacctcagtgacaaatccagcccactgcctgctttttaaataagttttatttgaacacattcatatcacatttgttyctggattatctgtggctgctttggagctacaagggcagagttgagtataataattgacaaagaatttgtagcctgccaaacctaaaatatttactgtctggtcatttatagaaaaagtttgctggcctttgctctcactcacagaacactagacctagatgggaccttttccatcattaggctatcactttgtcatacgcctggaaaagtaaagtatctaattctgggtggtagagacttttagggacagaactggatccataccactgggagtgcagttctaccacccaggaataacactgttaacattttggccttttttttttttttttttttttttttttgagagggagtttcactcttgttggccaggctggagtgcaatggcgcagtctcagctcaccgcaacctccacctcccacgtcaagcgattccccttcctcagcctcctgagtagctgggattacaggcgcccaccaccatgcccagctaattttttgtatttttggtagagacggggtgaaaccccgtctgctggccaggctggtcttgaactcccattttagcctctttctatatgaatatactgtaactgaagggatgaatataaaaatgtatttatagaattagaattagacatacccccaccatatagttttataagatatgataacaaactgtggggtatttcctttggtaaagaagttgcaagggaaccttccatttctttacgtccttatgtttagtcagtaagacaaaccagccatctattggtggtagttggccttaactgcctcatgctaattacctgagatgacttggagtctatttaataaatgtagcctcacatcctacatccaggcacccgggagagctcaaatagccaactgattttaaattagaagacactctgcatctgagtggtctcatttattatactgcttgtaaagtaactttcctcgttgaattgcattgaagtatacctataaagatgtgcatacatcataaatgtatagtgggaaggatttccttaagtgggacacacctgtgtgactagcaatcagatcaagaaacagaatacgaccagacatcctcctaagacatttccattacaggaaatatgatttatccccgtaatgcatttccactcaagagtaactacctgagttgtaaaaccagttttgccattttttgagttatgaaatcttatattatttgttcttgaaagcgactatatgcttttaattttctgaatgaaaccaattatttgctatttattatgattcatttttataaaggaaaatatgtcctgctaacttagcatattctatgcttgatatgttaaaatcttgggttgaaagttttctaaaaatatcctagtcaagtcctgggacattttcaagagtgacttcggatttggttctattgtgtgtctggtgttttgatttccaaggtggagtataagaaggatctggaaagtagtagaggtcacagtatcaactactgtgaaacacctcaattcaggaacgtgagcaagatctcaaaatttaccagtgatgtgagttgttaamgctaagcttttgtttgggcactgttggtgagcttagtctttaggtctcctaagagggacagtctwtgggaatggatctatgtgtcttggagaagcatggccttttaggcataaatgcctgggttttggttaaggttgcctgctgggattggtcctcayagtgttcaattctgtcacatccccaatcttgaccctgagtcctctgggcgggacctgtcctctccgtccccttgcttcccttgtgtgcagcacagtgcccagctcatagtgatgaatgctggtgagggggcctggctgagcatgtgacgtcccctctcaatgtgactttgtgcttctgagttaatatgacctcatttcaccctcagagtcacctggagagccagatgttatttccctatcttacagatgaacagatatgtactagaggggcattygcaaatttggagattctcagagcaggtctgaagatgtatcctcatggacatcaaagacctatactagatagtatgctttacttttgcttagttgcacataatagtagaatttaaaattgcaagggactgtgtaaggcacagtgaggaatttattttgcataaatgtagtggyttaagagccaacataccttatgtcccagttattaatagcaaagtggccaattttgggcagttgtttaagctccctgagccactctgcccaactctaaaatggggatgataatagttccttccccctcatagagtacttgtgaagattaactcagataagtagaatcatatctgatatatagtcataagtagtattctgtttaaacactagcagtaccgagaaatgcaatggcctcccaggttaggtgattttaataccccaaatttcctatttatgacctcttgtcatcctgttttggtcttctctttatttgrtaagtggcatttgacacataacataattatttcacatagtcrcactagtgaccaacttttacatcacagaatttggcaaagctcaggttttgtccttcatatatttagaaatggaggtaatggcatgcagtgatttgtaccagcctcagcatggggctttgcatgtgaygtccgcatagtcagtgcctgccacyrtctcatggtaaattttcacattggaaaaatctggtaaatttaaaactaaaaatgtaaaaacaaacacagaaagtcaagtctgttttgtgctgtctatgytcatctgatcccatgtttccttgtcttcctgtcttactccaacttcttgtgatgggttgaaatttaygttattaaaaaaaagtttgccttattttttattcygtgatacgttgactatttaaatgggttatatttaatcatttatgccttggatttaatgcattaagatgagtagtttatcttcaactacttgtgaagggaaygctttggttgaaaactttgcgtttccatgtagaataaatataaagaaaactaccagaaccacatgagaggccgctatgaaggagttggtatggacagacgcactctgcatgctatgaaagttggcagcctggcaagcaacgtgagtccttttatgccagggtctgttgggatggagtggggcrgggcatgaagaattcagccaattctttttaaattccccttaaaaaaaatctgtcttctattttaaagactgtgtaaagactgacccaaaagagtttctaaatgttagtggatacaaccaagactaggtaagatccctgaaaattttcaaaggcttcaatttgtttatattagctttctctaatttgaagagtacttcagtctattataatgaatccagtgtggttaacactttcaatttctgagagaaaaagagaaatgaataattatgattcttattccaaattccccagggttccaaagcttttgtgatttattgagarttggttggttggtaagctggtttgttccttcattcatttttttgatcattgtattcattgaaaactactgtggcctggcactggtcagggtagtgggataacagagtagatcaagtccttgttttcccctgtagcatatactctattaatctctctttagcttcgtcaatccagtttatagatttacaaataccagattgtaaatcctggaggtaaaggacacttaaaggaaactgatttcattattaaaacatacaaatgtcggattttctctgcttaagaatgtcaatttgatctttagaaaaaaaattaaatactctgaagactcttcacctttccatctattttcttggggttagccaaggagcycttccattgcctatccatgtgaaaatgcttcttttcaacaaaaatgacaagcagcttcataattaatatgaaatataaagtaaatgtgctacagatggaagttaactaattttggactaattaakaggaattcagattcattaaagacaaaagtgtgaacataatttaattttccttgaaggtgatgaaactgaattcgtttctgggtatttaaaaaatatttcttatggcattcaaacaaagccaaaagaaagtagaaattgatttctccattcttcttcttttcttcctgttttaggttgcctacaaagctgattataaacatgatattgtcgactacaactacccagccactctcacgccttcctatcaaacagctatgaaactggtgcccttgaaagatgtaagttcttttccaacagctctttytgctttgtcacttgtcgcttccttcctgaggagtgatttgtaggtagcaagatggaaagaaacatgatacaacagttcataagaggttgaagggattgaggaaagggaaatccttttctattttccactakgaagttcatttatgcatgtttgcacacccttagattttcaatgtgaactagggacaactctagttttgtcttgaaaataacctgaggttcagtttttcctcttagaattcagtgagctttgcctgctgggcacatttcaaatgcttgttccttagcaaggatgatttgttttctttctttaaaaaaaggtttgttatgtagtatgttaagagttgaaggaagtaaaataaaatgtctacatacaagttgagaggaagtggtactattgactccattttttctcaggagcacatggaaaattatatgtatcccttaattattacagcagcgattttatttatggtttggcttgttccaagcaaaatgtgtrcaatcaattaaatttcttgtttcctgattacaagaattttactacatgtttattatagaaaatttagaaaatacggaaaagtgcaaagaaaaagataaaagtcacctactagcttaaaaagtacttaaggtggcttagaagaaaggttgtattgtggttgccagcgaaggttatctccaatcaatcaataatttaacaaataattcagcgtatatttacgaatgtcaagtgctactttcctttgctttcctttgggatcrgtacaactttagaaattgattgaggttttgctactggtagataagtctctgaatctgtctctctctctcttgctcagagttggggcagtaggattcagttggttatctccagtgtccaacccagtgcccagacatcagaggacaatcattggcaaatgatatttattgaatgaaaggggctttccaaatgtgtaataaaacaggaggaaggaagctgaggaattgatcaggggcctaaactttgcttctctttttctcaggaagtttggttggattgacttgacttactcatttcacaaagttaaacttgaccactaccaaagctacattttttttttttttttttgctatatacattacctgggaaacttgcagatcaaaggcaccttattaaaatttgaatatgtgcttttgcagtaggattctataaatcatgcctaataagtagcacaaagagtgcaagatgtacttccattatgacatgacttgctactacatttatctagataagactctgagtcaaaccaggcacctggaagcccacccggggaagtctgatacagacttaaaccagactgaattagaaatattaattgagtttagaggtgggttcactggcagcccatgagccacatttgcactacggaagtgctttgtttggctacacagtgggttttgttgttgttgttgttgttttaattgaaccaacatgtggaagttctgattttagacaaaaactaatacgctcaccttttcttgaaaaccctgagacattctgccctagttcctgcaaggcagcaattggctgggactgggtggtgactgctctctgttgctgtacctcctttagcttaccttcctggttctgatgtgaatttgagtttatcacccataatgtagggattttaataatcaggaagtttggggaatccatttacaagaacaattgtggtctctctgtctggtaatcttaaaggtggtgaaatagccatgaaattaaataagcaagcatgggttcttaatttgagagcattccctttagatagattttataaacactaatagaattaaaatgagactctatctttagcaaaaagaaaaaaaaaccttcaaaatgtagactgaagcaatggccaagcatttgtggtgttgcaaagatgtggttaatcatggagacttttaattatgtcccacagagtaaagtaattgtgctcagtaacatacttaatgcagaattatcaggaagaaatatgccatttaaaaatatagtwtttgtgacattttatcatgcataattctgaattctaatagactctattatgagataataattttgcctcctgaattaatacattaggaagtcactgtactttaatctaattaatagttgacattgaaatgactttatatttcctaattttctctacacaccccatgtccaaaactcagaacatgcaaaaacttttctccttgaatcattaactaaaaagcacaaaatgattttttttttttttgagacggagtttcactcttgttgctcaagctggagtgtaatggtgcgatctcggctcatrgcaacctctgcctcccgggttcaagcaattctcctgcctcagcctcccgagtagctgggattacaggcatgcgccaccacgctmcctaattttgtatttttagtagagatggtgtttctccctgttggtcaggctggtctcaaactcctgacctcaggtgatccgcctgcctcggcctcccaaagtgctgggattacaggcgtgagccaccacacccagcctaatgatgttttttaatctccaaatccaacaaaacaytccacggcccattgtcaggagcacttcgttatttctaggtcctgttctagaagttcacttgtaagtcatttgtttgtttctagaatgcatttccctgtctaaacaatgctaactctggctaaggggaaccccttgcccatytgtaatataacaaataatcgctctaagcacactagctttggcaaaccaggtttatagagtataggtatagagccaccttgcgaggcagaytcctgggatttgaatcatagctctgatacttactgcctggatgacctggagcaagccactttcggtctctgtgcctcagtttccacattgtaaggtagggataataatagtgcctaaccatagggtggtgggaaggattaaatgagttacatgcatgatgtacttggaatggtgctgggtgcatagtaagtaccatgtgttagtcataattatgatgagctggtgttaggacaggcaaaaatgaaatgaatacaagacccagactcagggaagacatggagtatacaagttagtagccagtgggccaaagtggctattagacctatttctcttgggtcactggattttttttttttttttttttttgagatgaagtcttgctctgtcacccaggctggagagcagtggcatgatcttggctcactgcatcctccacctcccacatttaagygattctcctgcctcagcctcccgagtatctcgggttacaggcgcgagccaccacgcccggctaatttttgtatttttagtagagacaaggtttcactatgttggtgaggctggtcttgaactccctacctcgtgatcctcctgcctcggcctcccaaagtgctgggattacaggcatgagccactgcccctggcccgggtcactggatttttaaaatattgagctatttgttagcatttaaaaattgcaagattttgcatcataatatggatttctggtttctttggaataactggaaaatctggcttctgtacgccctatttgttgcatcacaacaatctcctagagctgggcagcagctgcctctctttgccatagtcctctcgactccttacttccccaacagtaaggccaagcattggacttgtacccagctagtggtctatctggctcccagagacatttgtgacttttgggttgcaaagactccttgaggtgggctgtcatctcagggaggtggccataggagttagcagcagataggaggaagacagaagagcaaagacatcaggctgtagtctagacagacaggaaatgatagaacagtacaagagtggmcaaggtgtgggcccttggggagggcagagccagctgccagaggaggctggccaaggccataggtgaggtccaggcagagatgtcagtagatagtggtgacacagaaaaggggtgttgttcttaggcaaaacccaggcctgaagaagttgccacactgtgtgggattctgggtggggcctttggccttgggcaagaaaagagagacatgaagtctgtgaatgaggtgttcagtggtgatcctgtcgctttgagccaagccgggggagctcagctggcaacaggcccaatctggagcccgtgggcacagagattcagatgtccagaagcactgggtcaatttgggatcctgggagtgaggacccatctgagatatctatgtgggcagggaatgtctgagtttgctcactctgcagagtaggaaccccasgacagtttgttcaagaaataaatggatgggcaagtggatgaatgaaaggaaccaggtgagcataagggaaggagagcagggttagagatgagtttacttcttcctcttttacctggatttcagataaccttggttaaattctaaaagagggccaggtgtggtggctcacgcctgtaatcccagcactttaggaggctgaggtgggaggatcccttgaggccaagggttccagaccagcctggccaacacggggaaaccctgtctctactaaaaatacaaaaattagccaggcatagtggtgcacgcctgtagttccagctaccagggaggctgaggcgcgagaatcacctgaacccaggaggaggaggttgcagtgagctgagatcgtgccactgcattcccacctaggtgacatagtgagactctgtctctaaataacaaataaatcaaaataaactgtgaaagaggttatctgctatccacaacctctccctcttttctttatcctagctttacttctacctgcataggtttctggggctttcactcagctcaccttagtgcctcacgccttatcgcctactatccagcctcaaacctgttcctttacttcactgcccaagttcccattccctctgcagtggatcttggtcaggtgtgtttggagaaaaataagatgattggatgcatatgatgcatatattcttgtgtgcaaatggctaataattcttaatattygaaagggcaatttgtattttcaaaggggaaaattcctagtccytgatgtcttgaggtgggaaccaggcagtcaatgcatccagctgcactgacgattctgcctcctcctcttttgaacctgcatcttctacgaaagtgctaagcttagggcaatttccttggggactctggcaaggtggaagtgagggccaggcaggggctggtgtayggggtggggacatgttagggccacctacaaggagtcgctgatgctccattgtctcccacttgaagatgcatgtataacttggttggactttttgtttctctttcattttactttttttaacacctcttttttggtgaartataagacgtatataggaaagtatactatgtgtggatatactgctttaattatttataaaatgacctcaggcatatattttcattgggaatgagccctaggcacagaattgttgggacacaggatatgtgtatgtgcccaaatgccgtactgttttccaaagtggttgtaccaatctgcacttctgctagcaccgttgtgagagttttcataagtcctcatcctttgccaacactttgtgttaccagcagttttaacttcggctcttcaggtggtgtgcaggggtatcttgtggttttggtatgcctttctctcattaatagtgtggctgagcatctttctgtatgttcactggccagttaattcacctcttttatgagttgcctgttagatgtctcactctccaatgtactgtttttctatctatgggcttggagtgtctgtcagtatccagttggaatattggactctttttctacgtagccatttgagaattgccactttattgggcttgggagagggagctaagcaaatctttgagaaaagagcaaatgacatctttttgtgcctgtttttacctaggccaattataggcagagcatcracaagttgaagtacagctyggtgactgacaccccacagattgttcaagccaaaatcaatgcccagcagctgagtcatgtaagtaactgtccctgcccagctggatgtaggggtcttgaaattgctgctttgaggcctctggacatctgacctccaaggatttgactttcataaattgtgacacatgtcttattacagccagaaaatgacccccacttcttttaaactttttattatggaaaattttgaatacatgcaaaagtagagagtatagcataatgaatccccatgtacctgtcacccatcttcaacagccatcaactcatggccaccctgcttcatctatatgcctgtccaattctcctcttcyatattattttgaagccaatttcaagtattgtataatgtaatctgtaaatatttcagtatgaatctctaaaaggtaaaaaagaaaaaacatgtttatataattttaacatatcacatcaaaaatctaacaataattcttagtttcaccaatcatccaaagttcaagtttaatttctggtcaagactgcttctcrgatgatgccgtattcatccaacaggagtcacatatctggttggctgtcttttgtgtgtgtgatttaagatggatttttgtcattgtgggcaggcatttgataattaccctgcctataacaagatattcagcactgcagcaaatgttttttaaaaagytcaatattctcaagtgcgtgtaargggagttggtgaagcagtcacagggaattcttttgcaaactcacaacttcaagtgtgcctttgagtttctttagttttcatttgacaccttcagttcattaatttaaaacattcacaaaaagtacaggctgccttgtaaaatgccttttctggaaactccttctcaactatgggtctaagggggaaagagctatgggtccctaaagttctctttctgcccatataaaaaccctacagatttattttaaatccaacaggtgaattaccgtgctgactatgagaaaawtaagttgaattacacattgccccaggatgttcctcagctggtgaaggccaaaaccaatgccaaactcttcagtgaggtaagagagcaatgtggggagacggtggagggggttatagagcgatgtgaaaacaaagataacaggatggtccagcaagtgggaagtgtctgtccctgagaaaggctcatcagaggcatccatcaagttgtaactttgaattttgctatgtcakggcaygttgtagtttactagtgataaattggtcatagccatttattcccattatatgagcatgtgtacaatctatgtgtgaacacacacacacacmcccctacatgctcatcctcatcaccctagtgaactggtgatttgctgtgtggaggaaatttaagttttaagaagatcaatctgcatcatcagattctccctggagtcacaagtgggctatgaattggcttctaactctagatggaattttgggggcaggagaagaaaatgaaaggaactaacattgtttaaatgcctgttctatcctgaggcaggcactgtgtatgtggaattatcataagtcctagaaggtattgtagggacacagttggtggcatgggctttggtgtcagagagacctaggttcagaagctggcattgccattttttaaatttatgtaaccgtaggtgagctctttaatttctctgagcctcacaggcctaatgtgaagatttgtggttaatgagtagaaatcatttaggaaaaggccaataaacagtagttattgccagggcaatgtcaataccccacacttatgttaygcttcaccagtttaagatctctttacatatattctatccaatttattctcacagcaatcctgagaaagagaatatgatacactctttgcaaataggagattgaggccccaagaggttattggccaaggtcacatgatcagaaaacaacagagcaaggagcaacacatggggcttctctttgtcctattccattaccactggcctgcacagctctacagcgaaggaatcaattaactgtgttaataattactgttatcattttgataacaacagccgagcctctggtctgtaaatagaggaaaaatccaactttgctttgaaaaaatctttgacgtttggcaggaatatgggtagcaactcctattcacttgtggttttgtttgtcaggttaagtataaagaaggctgggagaagacaaaggggaaaggatttgagatgaagctggatgccatgtctctgctggccgccaaagcctctggggagcttgctagcaatgtacgtttcctctcattaactcaggaatgcataagaaatggttccaataaaatgtcagtggtcctgctgaaaaaaataatgactcttaacattgtaaacatcgcaatactttaatcttcttctggatttgtgaaagactgggaggtgttttttcagaattgttccccttgcacttgttaaaaccagagccccttagacggcaaagtttctctctcactcacagtagaccttcttctttctctcaagattaaatataaagaagaatatgaaaagacaaaaggcaaagccatgggaacagccgactctaggcttctgcactccctgcagattgctaagatgagcagtgaggtaaactcttttctaacccccaacctctcacttacagttgtgttattttaaaagttttccctgggcctacttcacctgggactgtaacctttttattgacttctacctgcaactcctttctttcctggcttgcataagaagtttgtttggtttatttgttttgccaaagcatactatttttttttaaatagataaggagtgtggccctaagggtgacagcatctgctgatcaaggtacaaaggtgttcaattgcatttattcatgtcacaaatgtttgccaagtgactactatgggcaagacactggtcgagaccctggggctataagaatgaacagcgcataataagtttctccctcatggaccaaaagcgtcctgcttattgtggtgctgtcctggtcctgtggttacaacacttatggtattcaaatatttagcaagctggggcctcccaggctccagccaatcrgaatgacgatgcttgtaaacaactgtaatagctggagaggaaccttggtaaatgtcatttaccaagaggctttgggaaaggagagttctgctagaagagacagacccagtttcyaatcaagtcttccctgctgatgctgaatagggaaaaagacacaaaagattgcctgctccaagctgtgagsccaacttatgctgctctgatggtacagttggatgtaattatccaatgagtcattaaatagccatagcttgaatacaaaagagggttggcatctgggtcgccattttggatgtgtctacagaacaagccgaatgaagtgcatagtcataaggcataaagaggcattgagaatttggcttcagtttagacagaacacattggtgtttcatatttgcagttggagcagctgggggtcaaaaagactgtgtctttcccaaagccatrtggtagtcagcagtagtggtagaggggtagcaaattagagcctagaactcttattacctggcaccacactccttctactatagcayactatcttctcccatcagcactaccatcgtcaccactatcaccatcaccttcaccatcaccatggtcattgccaccacaccataattaccatcaccattgtcatcaccatcatcaatcaccatcattgctgccatcatcaccatcatcactaccatcaccaccaccactatcactatcatcatcatcaccaccgaaccaccattgttattgtcatgcgaatatttatcaagtatttgctatgtgacagtccctgtactaagcatgtttcagctattattcatttacttatcacaacagtctcccagagggaaacaagtccttagagaggtgacataactttccagaggtcaccctgctgttagagggcagatcaggtttgaactcaggcttgtctggctctgcagcccaagcttctttattctatctcttaaagcatctatgagaattgggaatagagttttctcctggagcagccgggtgaaaaggtttagcattggcaagagacagtcctcccagaaacaaagtagtatggaacctcagctccctcatgatgctgcctttcagagccaggacttgggcctttctgacagaagggtggcagtgcccagagtgccgattctcctgctcccgaaagcccggaaatctttcctgcattttcacatcactcctgcaaagggtgggcttcaactaacaaaacgggccttgttttggtatattcaaggttgaatataagaaaggctttgaagagagtaagacccggtttcacctgcccatggatatggtaaacatcaggcatgctaagaaggcccaaactctckccagtgacctggactacaggaagaaactgcatgaatacactgtgctgcctgaagatatgaagactcagtgggccaagaaggyctatgggctycagagcgaggtgagcccacacattatcagttctcttcatgcatctcttgcagttggacatgctttcagagtgatttcaaacctgtgcaygagtctattacataacttggaagactaggaagaactgcaggaaatgtaccagrgggccagaaagggcagatggggaggtagagatakagttgacacaatggagactggagggctcacagctaatgctaaagtcaagatgtgttggtgatggggatgagccaaggagaagaaaatgtttaaaatggtaaataaatcttggaaatttagcaggttggcaaaaaaaaggcccttggtcaacaaatatgagaaacactctttttgctaaggttgcggtgtctcagcagtaaggtagagcatgctactcttgttacaaggtgggcccrgtggctgtacctcccaagtggagatctgcctgaccataaaggagcagggagcagttcttctaggaaggcaaatgcaggatcaagatcttcttaactctcccatcaactttgtcctgtctctatccatgcgcccaatgagagctttgtggtttttcttttgtagytgcagtacaaggctgacctggcatggatgaagggagttgggtggctgacagaggggagtctcaacttggaacaagccaagaaggctggacagctggtcagcgaggtaacctgcactggggcctctggcctccagtagtcctcagcccctgacacatgcagggtgatctttgcctctaattccctttctctaycctcagatttattttggctgtgattcaaagtgggagtacttcatttcacacctgtagcacattctcagctaactttccacacccttaaacttactgagatggtgtcattaaagaagcctactgatttactttaagtagcagttacatccaaagaataatttggtttagaaaggtgtaatatacagcacctgggaaaacagcacttcttaggtgagcagcktgtgattccttttgaatcagaaagtccagtatttggaggatactgttttcattatgcctgtgccttaaattcactgcagatttcagamaagtcacttaaccttcctgatcctctttccctcrtataaaaatgaagaggttggcctgtaatcccactactttaggaggcctaggtgggcagatcacgaggtcaggagatcgagaccatcctggctaacacggtgaaacccygtctctactaaaagcacaaaaaaatcagccaggtgtggtggcacgtgcctgtaatcccagctactcaggaggctgaggcaggagaattgcttgaacctgggaggcagaggttgcagtgaaccgagatcgtgccactgcwctccagcctgggcgacagatcgatactctgtctcagaaaraataaataaaataaaataaaaatgaagaggttggatcagatactctcccaggtccctgcagctctaagcctttgcctctctttacaccatagaaagctggctctggcagcaggcagaggaggacgtttgaaggacatttcgtttggaagtgtcactatttcaggaactttgtttggaatcttccaagaggattcttgtttcagggccaagaaggctgagtcggcatatctcttgcaaattataataatggtgataataatagctgccatttaagggctgataatcattattgaatcatcactttgggcgtattatatacatactgtcatgtataggttgccacagtcttctgtgattagatggtatgattagcctattaatattcccattttacagataaagaaagtgagatttaagttacactttaagtaagtagaagagctgggatctgtacccagtgtgtttgatctggtgccccagctcttgaccatgagacagtattgtatctcaaaagcttatcttgtaatttactcttatatttccactgtactcaccctcctctgagacagagacatatttaggattagaatatagaatgaggtggagagaaaagcataaccctttagggctttcattatctagcttcttggagaccaactaaagtccaggtggagcaatcagagccccgtctgtcttggacaggggtgtagcagaggggagagaatgcagccagttggtccttgagattcaggaatgtcagtttctatctcatttcctgtattacctactaatttttaagctcctccaaggccaggaggatattacttccttcaccttttttatgttccttctgtgctctgtacggagtagtttcttggctgctcagcaagtacttgtgatttgaccaatgcatagtctgggttaactaggaatttccaacaatggcrgggtaatgtgactcccttcagttatgtggtgaaggagttttcccattcaacacagtggaactagggaggaaaattagaagwctgtttggaatgttttctctagaacttttttcccctaaaggcagaaaatttggagtttccagtgttccaatcactgtgttgggttcagttggttgctataaccctcttgctgatggcatggggagttttgccagaaccaggctgtgagctcatctctgatctccctgccatgtgaagcttttgcttccacacgccgttttcagtggccatctttcccagcagctttrgcagtttcaatggaaaagccagaggagctaatcttcaggaaagacaagaagtcccggaggggggacagaattagcacattgaaaatttgccaattaatttgtggctgtgagatggggacactakgaggacaagacctcagtgatctggaaaatcagaaactgtgaaggcgaatctcacctgaccgcaggcttctgtctgtggctctgtgtctccttccttaaatctgctgctttctggacaattgtgataacaccatgacaatggctatgtcctaacactgtcccagggacctgactcacaggtaaaacatggtgatgaagcctctgctccccactagactgaagtagcttctactgttgtccccattgtacactccaagcaagggtggctcaggttggattgagtgatgtgccggaggtaatgaagctggaaggatgtacaggcaagatttgaacctcagtcttcatcattgtaaagtccaagtttcctccacctcaccttcctatgtcaggtctatatttataaaatgtatacctccccagggcacacggtgaaatacagggttactgaggaagaaaattacatttcccattcagtaatagcaactaaatcaasttcactggaacaggctgtctcagggctgtgtggttctgttcaagctgcaggaacaactagaacattcctcccaaggaaatgcttggaccacagaaagaatgtgtgtgtgtgkgggggcacatgagtagggtggtaggggcaacccaatcctaatgctgtggggtccctttcctttggaaacagaaaaactaccggcagagggtcgatgagctgaagttcaccagcgtgaccgacagctcccagatggagcacgccaagaagagccaggagctacagagcggggtgagtcctgggctgccctttctccaccaagctgctgtgtcatgggcctgggggacctccagggacaacagcaggtgccgcccaggcacaatccagaaaccaaagagccttccctctaaataggctggacccagctttccccaggcttccaggctgtttctggaactggacaccaggccccttgcttcatccaccaccatctcccccgattttattagggatagatgcagggctgactttattccttttcagcttccatattctctagttccttttttcttctgactcctatctctcatcaaagactctaattctggagccaggagagaattatcttgggggaagaaaacatttgcgtttggggtgtgtgcaggtcacacccacataagcgtatttatggggccagaacaaagaagcaccacacacattatttacagattagttctctacaccaaggaggaccatagttgctgcaatctgtccaggactttcctagctttccttcctaaaggtccaggtaagatatacctgccagaaaggatactatcaacataactcagagtcagcagaaagccactgtcaggaaactcaagttgggggtggagaggaagcaaagagagaaagagaagagtgataagtttgccatggaggagatgtccacgcatgctcacttcctggtgtcagtacccatgaatggattaaggttgattatggaggggcaggaggcagagcatgcttcttatttttcccacctggggagtctgtactaatctgaaccccctggtggggtatttttwtggccacagacagtgtaaatagcaacagcttgcagaggttgataccatcccaaaggaaaggtgtgaaaagagaaatcttggaggggttttcaggttggctccctgctgcatttttctcccagctcctccccactgcttctccttctctcatcatctccttgactgtatcctgccactcagagtctgatctggtgggttttgtaatggactttctgtgcaagtcagagaagtgcmaaccagacagagacaccatgagggatgccaccctgcccacctcgcccttgccacctgctcctgactcagtgctctttcccaacaggtggcctacaaggcaggaaatgagcagtctgtccatcagtataccatcagcaaagacgagcctctcttcctgcaggcccgagccaatgctgcaaatctcagcgaggtacagagagaatgagtgggcagcaagaactctgctcccctttgtgtatagccacctggtaaaccaagcccaccagccatggcatagtgtctgtatcaactgaggttacatacatctkgttgttgtaaaaacagctcacccagcagatctggctcctgatcagtgttttagggggagaggaggacagctttcataggaatgagctagtggaggacttgagctgctgattgtatcctggggttggaggtaggggttattctaggtgccagagttgaaacagcataatcgtgttagaggggagtaagagctcagacatttgctccaaatggtctgggtttgatcctcggttgccacttactaggtgtgtgaccttgggcaaattctttgtttccaggtgtcccattggtaaaatgataccaatattagtcccgtccttactgggttgtcatgaggtttcagtgagtctctatayatcaagcactcagaggcaagtgcacagtggtagctgttagtcatgaaagcatccatagttccaacttccccttctctgtatcttctggggaaagtgttttcttggctctccctgcttagctcccaggtctttgggttcctcatctgagaaatagatggggaggagaattgggaggagaaacagaggttaaattgattcacatgcagaaagggaaaggaggcttccagaagaaagatctygacatttggagataggagcaggagagagaacaggaggcgcaaggaaaagacccaggtggactagagaggctgggggaaggcgggaggaaagagaaagaggtgcagctggagccgctgctggcagggtggggtgcgtggacagagatggagaatagacttttcagaaatgtcgctgtgttgtgcgatgttatcctgcctttggcatgtttttgagacttccaygaaaactcctagtatttgttaaggcttctggagtttaatttctgctttttttgattgaagccctatgtgttaaaaggccttaaggcaggaagaaggcctggctgtattcagactacatgatttctgtggctctcagagaaggacgtaataatcagtattgctttcctagaatcgtcattagaatctagagaaatgctctcacgtgagaaccctctcacatgaaaacccactcaccttctctcctaaatccccttagaaactgtataagagcagctgggaaaaccagaaagcaaaagggtttgagctgcgtcttgattccttgaccttcctggcagccaaagccaagagggacctggctagcgaggtgagtctgtccccaccttgtacaagagaccgcagaatcctgcctttttataccggggagattctctgagtgtctgggcaggttcttaatctctctgaatctcaggattcttatctgtaaaatggagatgatagcaatcaccttgcaatgagataatcacatctgtgcctatctatttaataactgcttgccacacactgattttcagtaagtgatgacttattatttgtagtagtagcaagagtaagaatccaaatttctcgctttacagataaattgatgcccagagacattccatgactttctaaagacgttgtggtctgttaatggttaatacaggctctggtgttagatagaccttgtataaaatcccacctctatcatccattagcattgttacttcaggcagattgtttaaactttaaaaatctcagttaacttgctggtaaattggtaattgcaaaataatgacaacgaaatggaatgaactgacgtacatgaagtgttgtacagcctaatgcaatctgttaggagttggatgtgagagaagaagcttgagcaaggatgtatgtcaaactctgcttccttyatcgagaaagtcttgcttcaaaaaaagatcaggtgaaccaaaaacaactggcttggtgatgtggttggtttacattctgacataagctctttatcttgttcttagttggtaacattttacaaatcggcactggtctgtggatgcacttgagttacacaggcttgtcctgtgcttggtttataccaagtgttcgataagtggtggcagatattgatactgttgttgttgtcagagctgagagtagaaccggaatctaccactggccagagcaatgataatgttgaaaatcatgccccacactggtgccttctgacagttttcacagctttttcatatttattcttgcttctggtccttgttactctcgacctagtgttatttttcaaacaatgtgctcctttttgcccctcatactcccccaaatatgtatgtactccagttatcttttaatttsagttcctttcatgagcagcaattgtactttggctattctgtatgcttctcatttcacggctacttttatttataaccctgagttttctggcagctgaggtgaaaagggaaataataggtaatactattttctttcactgatgaaagaaaatgtatcggatgctcaaaaaggcaaactttcatatgattctaattctaataggattctgtccaatggctttgtttcagctcccatgcatggagtctgaagcctaacaattcctttaggaggttctaatgtatccctgctctattcctcttatttaggtgaagtacaaggaggattatgagagatccagagggaagctcattggggcaaaagatgtacagggagattcgcaaatgagccactcactgcaaatgtccaagctgcagagtgagctggagtacaagaagggattcgaggacaccaaatcccaatgccacgtctccctggacatggtccacctcgtgcatgccygcaaagctcagcatttagccacagacgtaggctacaagacagcggaacatcactttacggctttgcccacagacatgaaggtggaatgggccaagaaggcttatggcttacagagtgatgtaagctctgtgtgagtgtgtgcacttgtgtgtgtatgtgtgtgttgtgtgtgtgctagtgcaagtgtttccctaagccattcagtgcaacaatttatgctatgggacacctgtttytggatccctaagtggcaacactttactttgctagtggtttaacttttattcaaactagaccgattttaggttctgtactaacacacagaagaaatcatagagttactttttccttcttggaattctggactacatatgttttccaggtttctttttattgccagggggkaggtatctttgtgtcattcctagtggtggcctgctaggggagagcatcgctgataactcaccccgactttgatagtccccatttttggaatgggtgggttgctaattttcaataaccctttccctgtcctccttatcctcccctcccagttctactttctgtcttcaggtaactcttgcacaagaatgggggtgaactgaaaaggcaggtcagctgcagccagactgtcacacaggaaggttgtgtgtgtgtgtgtgtgtgtgtgtagacacacccttcctggtagagctgtttcatgatagatggtgatatactagttttagagaagtgtccatttaaatgactttccattaaaactactcattcaatggcaactaaagaaatgagaagaaatacaccctgcccccccactgaggtggctaggaaggaatcagcactgtgggaagcctccgctgccttgtgaaattccctcaaatagcgcccgcctgggttctgttgtgaattctcattttcttgtcccccgtgtgtcattttaaacaagaaaactggtaatgcagacaatgaggacgtgcttctttccgagtagactcgtccgtaatgaggggcaagcttggtttggcccctcctgcgtcacccccaatagtgttggatggggcctaaagccactgtcccaagggatggctccaattaaagggggaattaattgacttttgggagccctacctgtgactktgcagaaatgcataagacaaaagtggcatctaatttgactcagctggcaccaaggctgtgttgggagccgctaatagccctttaaatgtctgtgcaccaacaatggcctgctttttttttttttctttctcctttgtcagaaccaatacagggcagatgtgaagtggatgaaaggcatgggctgggtcgccaccgggtcattaaatgtggagcaggcgaagaaggcaggagaactcattagcgaggtgagatttcctgacagcctgtaacaggcctggctgcattaggcgtgcggcrtctctgtataaaattaaaataatttccactcaaaaggcaaagaaaaaggcaaagccacatgaaaggcctcaaaacccagactagggctggtaattagagggaaaccacgtacgaaacacacaccagtaggggccctggcaaaaacaaagtgggtgacaaatgatattatgaataataatgacaatcaaacagagctcaattgctacccaccaacttacctttttaatgaagcaacacaggagagatgatgaaaagatacatttatggcacccaaaaagctctttggtgactttaggcacattttcttcctctccctttctgctacagagtcaacagtttttgaatattcacgtggtggccaccatgtgacatggttcttttttgagggagagtctcacttcagtttactcagttctgcctacttatagccaccttggctggaccctacagcaccactgcttgcgaaaagagtcgtttcttcgtatttcaggacagtgtcaatgagcagctctttctgagtttttcaacttcggcactactgacgttttgatttttctttgtcgtggggttatcctgtgccccgcaggatgtttagcaggacgtcctacaaggatgtcagtagtgccctctgtgacaaccaaaaatggatygagacattgccgaaagccccccaggaagcaraattgtccctggtggagaggcacaggacaaggctcccaggaggctggacaccatcagaccactcacacccgtgctctttatgtttgcttgcagggagacttgatcagaagacaagtgaccatttgcctagttgtcttcagagtaggcctggtctttctggacttttctgggtggggaggggaccataatggccatagtcccacaggttgttagctttggcaatgagcctcctggatttttttttttttttgaggagtctttctttctgaacctatagttaaaatagaaagacacccttgttggtttttcaaacacacctgtccagcattagtattttcccatggaacggcattctcactacctggcacaatgcagagttgacttcaaaaagtggccttatgctgatcagcctgatttttagggaccttggtcaacactcaaggctcagaagaccctgggaactccatggggatagcactgctataatttgttcattctagttcaggagaggccctctgggaggataaatgtgaagaactcacaggaataaacatttaggtttgaggattcatgatcccaaactctcaatattgggctcactcataaaaggaaatgaagactaaagaccatatttgcataatttagacttcagggtgatttccttcgtgtgtcttaatctggcagccaagggatcttcaggggaccatgtatcccacagttgttagttagccacctcattttgcatactttctcaacaaatttgcttatcctctttgatgggcttgtctcatactagtcctcaaagtttagtaagtaaggcaaggcatctttcagcaactttcccccccatctcattttaggctgtcacatttacaagttactgtcgaattgggccaccttcttttattttacttatttatttttgagatggagtcttgttctgttaaccaggctggagtgcagtggagtgatcttggcttactgcaacctccgcctcctgggttcaagcgattctcctacctcagcctcttgagtagctgagatgacaggcacccaccaccacacccagctaattcttgtatttttagtagagacggggtttcaccatgttgcccaggctggtctcaaactcctgatttcaggtgattcgccctcctcagcctcccaaagtgctgggctacaggcgtgagccactgcactcggcctgggccaccttcttaattccagagagaatgcccggcactgttgaaagagccacaaatgcrcacgcacacctacgatccaaagcagaggtcagaaagccttttctgtgaaggaccagatagtaaatagttttggctttgtaggtcatattgcctctgtcacaactagctggaaaatggccataggcagcacgtaagtgaatgagcatggccatgttccaataaaactttatttacagaaacaggtggtgagctagatttagctggctattgatttgtgttgtcttaagacaacccagtgtacaaaaatccaaccagataaagaagagtgtgtttaagacaattattctgctttggaaagcataaactctatgatctcattgaagtaattatggtttctgtctcctaaaaatgtaccttgatttttaaaaaagaaattaatttaaacagattttcagaatacttcaaaattgggtatctaggtctttgccagcatttttgtgatttttttttttttttgcttcagtgtctttcaaactgtgtgatgactcctttgaataatagcaccctttttcctgttattgtaatattttaaagaattatttcctgtgttaactgaactaggctctaatgtgactggacggcatacactcgcgggctgctgaatgtgagggttttgactgcaataatgtctgtcagtgtttttttgtggaaggaaaatagaaagcttaaatggataaatgtaactctgaatgctctttcttgcttagaagacccaaactaagatatgtaaacaactgcgacaaagtatttgaagcctataaaaagaatccttttctaagtgtgtatcctacagtattttactagtataacctaattttgagatgttttctttgcaccaggtagaaatactttaatgttaaktgacatgaggttattcttaaattgaaacaaatattaacctgaaggcacctaggatataaagatggaggaagcagaataataattgtgttcacaaattcactctaatctcaagcaacctatgattttctctttcaaatggcatgaaagagcagcacaaaattcacagctttgatctttttctgctcaacagaagaagtaccgtcagcatccagatgctttgaagtttaccagtattaaagacactccggagatggtccaggccagaattagttatacccaagcagtggatgtaagtgataatgtatatacattatgactctaagagtgggctcttctttcaacactgcgattgaagcggaggggttcttgggtttgctccttctgttgtcctaaggatgaaggcgctccctgtcctttgcagaggctcccttagcggggggtgcttcctcattaggatgcaaatgggggtgttactgcacttagaatgccaagtggggctccaccaccccactgccccaagatgctctccctccttcccatttgcatgtctcaccgattcattcgtggtgaggctgttttctcctctccttttgcctgaaagtgttgttttcagaactgggtgaaattcttggtaattggaatcctgacgctgtgcttagagctctttaggacccaagggcagcaattgttgctctatgaatttcccagagactttgaacatgatttgggtctgatttatatacatcagactaactttcaagccatttcccatactcctttatgatgcaaaaccaagatttgacccttttccctctgtgggaaaggttggctggggtgcagggttgcagggtyggctggagactaaagtgaacgatgaggtgctgaaaaaaaacactttgtgatgtagattaaccctgtttggctgattctgctaagagatacccatggatctttgtgcagggcaaacctggcttttaaataccttcaaaccattcaactttccatggggaaaatttacaaaccttgggggcatagctttcaaaattctcttccttgtttcccaattgagcaaatgattctggttgcgctttatttgacaggcattctgaaacagcctgagtgcctgtcagaatctgggatgggatgatttacaagcttatggatttaggaatttataacttcttcataatcagcccatcagaatcaaactgaattctgagaaacacagatggtcaaacaagaacttttgtatgaagaaaaacaatacctgtttcttccttatcctagccaactctagggggcactgctgtgatacgtagaaacttggatacatctgataagatttgggatggaaaaaccctgtttggaaactttctctggtggcygatgccaactgcatgtgtcattattaactatcagggtatccgaagcttgggtcagagttctgggtaaatagagtcccagatccacccaggagacatgtcttaggggaagaatatttgagacgggggaacggaggaggattgagatagggaggagaaaacctcacctgtacragagccatcttctttctcgccttctgtatcttgatgccatctcatagctgatagttaatcaccaaattattactaggtgttaagtaaacctcgttttctcatttgacacccatctcagcagtttactatgagtggggcgttcactgaggggaatgcttcagcttgtcatgttctgagctaggaagcagagcttggaaatgacatgcgtgtcaccgtgctagctgtaaaatctgggtggaggcagggtgcccgaaatcatgtctctatgaggaggtggcagctgcagcagcttggactcttgaagcgtaacctggctgatggctgcatggaatggggtctaggtttcatgcaaaacctccttccatccacagagattatacagggaacaaggagaaaacataaagcatcattacacacckactgctgacctccctgaagtcctgctggccaagctgaatgccrtgaatatcagtgaggtgaggctgacccaaggggcacgagttttaatgacgggagagyggggctggtcatgggcaggcacacaatgccctgtgctcagaagcccctgagctggtttcatgttctgccatcaccaccttgaaatatgtgatatttttgaamaaggggccccacattttcatctgcactaggccctgcacattatgtagctggtcctgcagaagagtccagctcatttgaaagaatgatctggggacattctctgcctagttcaaagagcattggtttggaggagctggaaagtgggaacatcagaatatagctgagtatatccagtggctataccaagggaagacttggggcttaactcctcctctccaaaatctgtcagctcccctgcccaccatttctgttctttggtagatacatctgacttttctctatctgacataaagcactatgcatatgcaatctcatgccttcttccaatcaaattgctgcttagaaaaactgtgtctgtttgactctaaagcctttgcttcctctcccctctatgcctcaacccatcccccccaaccccatcccctgcctacctccaaagaggtgggcacgaggcaggatccaactcacgtgggtttagctaagccaccatgatctctaactccaactggccaggggagggaggggacccaccacaaaccagattgccaatttggtaagccagagtttaggaaaccaccaggtcacttaaaggtctttccttgtgcacatcttcccgacagacgcgttataaggaatcctggagcaaacttcgagayggtggctataaactgaggttggatgcccttccattccaagcagcaaaggcttctggtgaaatcataagtgatgtgagcattcacccccattcttgtgacaatgttcaacactaacccgttttcactccttttgcccgtaactcctgccttcttttgcctgtggataattccctgtcctctccgaactgactgtgtcagggcaatcagataatgaccagtgagaaagaacatatcttgcaacaaaaaattccccagcctgggatacaaagccaaatgctggactgtaaacatagaccctgggcagatgaaatgcaccctccaccgaggtgttcataaagagagtccatgtgaagagatggctaacaatgcacccaccttcctccagtgcggggccgcccacgtgctaatgcatcctgccatttcacagccgagccctttagtcattgggagtcttgcatatgaaagaatagcccttttgacgactcccgcgcattttcttttaactcacccagctactgtcaaaagaacaaaacattttcacccaatgcccacctcttccattctgtgtcccttatccctgagctgttcctctctcccgctctctttccctttagtacaaatacaaagaggcatttgagaaaatgaaaggacagatgcttggttcccggagcttggaagatgatatcagccttgcacattcagtgtatgcgacctcactgcagagtgatgtaagtggggggagaggcatcagcggctgcagggcccccacctgacaacgctcactgcatggcaacctaacctcatttgtccttctggacrtgggtattggttctgttgctaacttgctacgtgacattgttaaatcacttgtcccctctgggctacaccttcctcctctgtaaaaatgaggtrccggactggttgaccccttagttcccttctgggctgggcattctataattttcaccagtggacatgggccactggtckggatttgaccctgggctggatttggcctccaggggtctttcatttcgtctgcagagtggattaattgcaaatttttaaaaatggaaaattttatataaaagtgttaagcttctggccagaagctggacctggattccttaaggctacagttggttgtagtggcttcctgaccaacagctccatttagaagggatccatgcagtgggccaggcagccaccctcctcttcacttcctgctttacttctttatgctacctgcctggcccctgtaggcgtctgagtttgcaatgaccctgtcattgttggttgtgaccctctggaggctggcaaatgtgtgtaggtgctgtcyccttgcacatatgtgagttggctaacattggtgatgaaatctgtatccagcatrttacagaggctaaacgcttttatatacagtgtctcagttaactgtcagactatctctaggaactccatcttgttattcttccttattttctcatagggaagtagaaactctgagtgattcagtctcttgtccaaggtcagctacataggggcagagccaggccgtggagccagctctacctctcatggtctttccacagcttcacgtgttctctgccattttgtattctgccccagtttccccattcataactttttttttttcctttccatcttgagttgctgacctaagaatatgaggttggatatgaactgtccttggcattatgctagggtgaggacagaatgaatggaagtggggataggaggtcagggaggggtggccagagcaatgaaagacaatggaaggacaaaggaggatgaggaagaggtggtgattctgcatctgattattcccagagtttcccagacctttaaacacagctcctccaaggactatagtcgaatctatggtctggaatgggtcttcccctccctctcccagggtgtgttttgggttttggggaatgcctatccctgaggcttgactctccaagcatcctccccactgctcctggctcccacgttggctaggaaaatcattgaatgctttgaagaaactcttcctaagctagtgtgagaggagaatccctcgtgtctgaacttgagtgggcgatgggaaaaaatatggtgggcagggagcgatgcatcttcttgcctctgaaaaatagaaagatctaaagatttgagcaagggaatcactgacattatttactgttccttggacttttgtatgttcctcaaatgagggaaccatgggccttcttcatccagatcaatgacctccaggagctgggggtggtaagtgtcagggcctagagacaagccctggttattaggccagtctctgcaagaaaggagcactggccctgccaagaacttcccctgggcttacctccagacaactgcattgcmgttgccctccctgatggtcctgttgcaaatagtggctttgaaatagctgctgttgctctgtctgcccctctaggtgaattacaagaaaggctttgaacactcaaaggygcagttccatctgccgttggacatggccgccctggtgcatgccaagaaggctcagaccctggccagcaatcaggactacaaacatccactgccccagtacacttccttggcagaagacctgaggctgagctgtgccaagaaagctcacaaattgcagagtgaggtaaggagacctggcctctttctcagggccccttcttctcttaggacctcagggtggtgacctccaggctcctgttggctcagtgaaatctctggaagtgagaaatcctaaacccaagtmttattttgaaacccagtctgagagttcctgcacatcccttaagcacagttacacaaatctaatcataaccacaatttattattttttgctgcactctaagcattgttttatgcattatctcacaatcagcccatatcattagtttattctcattttacagagaaattacagtgaaatgcagagaagttaaatatcttgtccaagatcacacagctatagttagaaagagagggctgggatttgaacttgaggtttgaatgacaaagatgccctcaaggttcatggttgtgcatgtttaagatttgccaatgatattgcctctggcctcaagtctcaggaaggattcctcttggtgcttcatgcgttcctgtgccacccgccttctgaggagggctaagatctgttgggagaggctgctcagaacctgtcaggactgacgcacttcagggagtggagagggaaatcagggccctggagaccctccttgggtccctttgaggagtctttgtactcctctgacatgcatttctcactcgtgatcccgatttctgaagcagacaggcccaggagggtcaggaagcattggagacttcctcactcccaaggagagccagagtgttcttcccaacaggcatccacatcctgttcactactcaccttatttcccagcttgctaggtttccatgctatgagatttgcaggtaatgggcccgcttaggaaaagaaaactccgcacaaaacctctttcctggtttggcagtgcctgcgatctgagcggcactcagatctgggtgtctgtcgtctgtttggattttacgcctgtgtacagcgtttactgaatgacataaactgtcaggaacctgagagcagctgtaggaacgasggagctgccacgctcatctcgggggcccgtttgtcacttgagcggagccctcacttgccctgcctctggttgtgatagcgattggaaggcaggacgcccagggggcgcctcactggctgaaggggagtgaatgtgggaactctttaaactgtcagcccgaatcattcaggtacacagactggcccccacccacacgaactcaggcaggcctttgccagattcttttggatttatttattagttctttcttaacccatgattaattaatgccacccgctgctgctgagttttgttttagaagacctgttagaccatttccacatttgccccaagacaactgactttctaaccacaatccgcttcagtgtttattttttgatagcccacattaaaataaaaatctgtctcgcttctgtggaacagctactctgagacaagtgacagcagaattattttcttctgacctacattgcttcccccctagtgagcatttaccaagaagtgtttgtgcgttggctgagtttaatatatccggagggacgggttcagccttgagttctaattatgacgctgtcagatgctgtgtcatgagacctctggttttgctttgcttccctgttctgagagcttggcttttctgattctttgtatttattatttcttctagaatttgtaccggtcagacctgaactttatgcgaggtgttgcatgtgtcrttccaggcacgttagagatygaagggaggaagaaagcatcggaactcatcagtgaggtaactacagatgctggtgttgagtgtccaggacatttccacagcagaggataatcagtttgtttctttcctttttctttcttcctttttttttttttttttttaatttgagatggagtctcgctctgtcacccaggctggagtagagtggcacgatctctgctcactgcaacctccgtctcctgggttcaagcgattctcctgcctcagcctcctaggtagctgagattacaggtgagtgccaccatgcctggctaatttttatatttttagtagagatggggtttcaccatgttggccaggctggtctcgaactcctgacctcaagtgatccacctgttgtggcctcccaaagttttgggattacaggcgtgagccactgcgcccagccaatcagtttgtttcttaccactaaagccagttggatgttaaactcttagcagcagtgactcactccgtaaccccctgggctggacttttttttttttttttcttactggattctccattcagactgcatgccatttaagacagctttgaggatatggagtcagttcctctattaacatataaggattattcactggcccatgcgatattctctctgtgtccctttgaagagtggccctgtggtacaatgcaaacaaagcagcctttgaagaccaacagagagagattgacattccaggccagcactgatttgctgtgtgacctcaagccagtgacctacacctctctgagcctccacttcttaattagtcaaatgggtatactcagacccctctcttttaatttttgtgaggattagcactaatctaagcactgtgcttttctggcagctgtatatgaaatggttactataagcttgaaatggtgataatttcttggtaaaaataaagaagtcttagaattctaagctttctgatttcctggggaatcttgctcacccctgggagggtgacaggactttaattcatggyagatgcagggacaagaggggataatggaaggtactggaagtaataggtgttcagcagtcagcctgagtgctcagataagcttatgttttgcctgctaggggagtttagatttaacctcatgctttgcttttccagagaaatctctaaagcaagtggtctctgtacctcatggtgcatcagaaccttaaaaaaccttaagaaatgcagaggcctgggccccactgactaatttactgaatcccagtctctcagggtggggtgtaggcacacctattttaaagttttatttatttttattttagtttatttatttatttatttgagacagtctcactctatcacccaggctggagtgcaatggtgcgatctcagcccactgcaacctccgcctcccaggttcaagcgattctcctgcctcagcctcccaagtagctggaattacagatgtgcaccaccatgctcagctaatttttgtattttttagtagagacagggtttcgccatgttggcctggatggtctcgaactcctgaccttagkggatcccaccgccttggcctcctaaagtgctgggattacaggcatgagccactatgcctggcatgtctgtttttttaaagctgcagtttgtgatatgccatcaaggtagaggagcactggttctctgtccagcaaagatctggaacaaaccacaaatttaaatagtcatgttcacattcatggcaaaggactaaatctcccttttccatttagaaggttctgattcagtccatcctatcctcctctctgcttcctcatcccagtgagttttggggtcacaaaggcaggtgacaatctggattctggagtgatagacttgcagcctttgcaaaacgaggctttatggctaatacttaaagaactggttctgcttctggtttttatcccttacggagtcgtcttcttcccttcttgtgtgtgaattcagagtaaatatcggcagcatccccactcattcaagtacacagctgtgacagacactcccaacctccttcatgcgaaattcagcaaccagataacgaatgaggtaaaatctcctgatggctttggaatggtctttttaaaaactgctcgattgttaaaaatacacgtgaatgtgtttggggtgagaaagagcatgggtgtttatgtggaggtttggaaagaaaagaatgtcattatatggaacctaaacattttccagaggaaatgaaagcccagttgggaatctgggattgtctgtagtcttgctttccaagtgcaatcccagaccagctacattagcattgcctgggagcatactggcaaggcacaacctcagatctactgactccaaatggtcatttgacaggatcataagatgattctttggcacatgaagatctgagaagtactggtctgtaattcatttgttctatctaggcaaatattggctaaccaattttacattgtcaatctgatgtgggaggatttgtggttatccaaggacagttaaattgtaagatgtttgtcaggcttctcaattatctaccttctcctcttctcactcaccatttacccaatttacactttcatgtatccagcagagggcaggtgcaagggaaggaatctcattctgtaaaattatcattccagcctcattgattctacttcttcttagtggctctcttacaggttcaaaataggtgagcttggcagagaattacattttgaaccacctttasgttttaagattctccttctgactctaacttatagaagtcagctgagatttggttatttaccctattagttcctacttgcttcaactgaaaagcaagaaattgcagcttgggctwaaggatggaattcatgatcttttagagtgatagtatcacttttaaattcctatttcatcttttctgcttactttatgagctttgtgctgtgggataacagtgccttctctgatggcctctggcgttagccaactcagcaaccatagacccatttctttttttctttttcttttctttctttcttttctttttttttttttttttttttttttttgacggagtttcgctctttcacccaggctggagtgcagtggtgctatctcagctcactggaacctccgccttccaggttcaagcaattttcctgtctcagcctcctgagtacctggggttacaggcgcctgccaccatgcccggctaatttttttttgttttttgttttgttttgtttttgtttgtttgtttgtttgtttgagacagagtcacgctctgtcgcccaggctggagtgcagtggcgcgatctttgctcactgcaacctctgcctcctgggttcaagcaattctcctgcctcggactcccaagtagctgggattacagacgcccgccaccatgtcaggctaatttagtattttagtagagatggggtttctccatcttggtcaggctggtctcgaactcctgaccttagatgatccatccacctcagcctcctacagtgctgggattacaggcatgaaccaccacgcctggccctaagttttgtatttttagtagagacgaggtttcaccatgttggccaggctggtctcgaactcctgacctsgtgatccactggcctcatccactcaaagtgctgagattataggcatcagccaccacgcctggctcatagacccatttctaatcataagaatggatgtttttgtacaagatgaggccatccagggcagcattggtgtgattcacctgtggaaaggatcctggggctttagtaaagggtacaggcctgggtttggagatgtcccttccacctcccttctcctaaatttcccaggtctttgtatgatctttatgctctgtcctcaaggacaaagtctacgatataaggaacctcaggagtattcttaaatttatttttctttccctggcctattattcagcaaagcacattgccattccttacatattccttttacatcactcgatttgactcctgaatgattgtctttattgaaataaacatcttccccaagactggagatgtatccatgacacaatgaacggttttttgctattgtgtttcctcaactatcgttgagggacttccagcactgcagaaatgcacagcacttatctcttgcattattattattatatttttttggcctagcgcctctataaagcagctggagaggatgcaagacacgagtatacaatgaccctgggtctgcccgagttcatccgagcaaaaacgaatgcagccaacctgagtgacgtaagcccttttgttacttaagttcaagcatgctccaaagccatgtatgtctacatctgtgaagtaacccaacactgacctttctggccttcacagaagctttttaaaatgtgtagcttagatgctcatgttaaatacaccttctcacaaatatgagtccatgagtgtacccagggtgtgtactaatgagatttgctgcacaaaacagaaattgattctggaacactgtgctataaatgaaaggggtggcctttgctcgttgattcatgtaattttttaaaaaagatttacatgtgttcccactttaggcaagatacaaagagtcctggcgtaatcttcgtgctcaaggctacaagctgacaatagaagcgctccccttccaggctgcccgggcctctggagatatagccagtgatgtgagttgaatgatatgaccttccatcttgcctaatttctgttaacttcatgtaaaacaatgtctrcggctgattttcctgaattaaagcaaatctataaccatgtgagacaggatgtcacctgcagaatatattagttatgaatgagattctttgaggggggaaaagaaagrctctattaatcmgaagctaaattcaggcaaaggtctctagcaggaaggagatgatgatttatttctaattgcaacgtctaggcgacggtccccttgtaatgcatgactgcctgtcttctaactccacccagatttagaacgagaactctcaatagaaattgcaatacagccggaacacatctccctcttggctctctgtagtttcacgcattggtgttaggatttgatggctgtgtttcagccactctgttgataacgtccatagctttgggacatgaaggtgactttctctttcccacaaacaaatcacagaaaaatgtggacttcaaataaatggatcctgtcttttgggtttaatgttttgccaagtgcgaacggataaagcacaagtttctctttcaccctttttgataaattccttttggccataggacatgtaaggggagtgaagcccttcctttagttctgaggatctgattttaattagataggaagaatggagcgatgttttaattgttcatcccccagggaggaaggcacactctcaggccagccccactgtggtttttcttataatcatcacctcctagtgtaagaacaagtgatttttctagagtctgcaatgaaaacgcacagatagaatttgaccggccagccctttcttgcagtttctctacagacatgactttgtgaaggagcgagggaaactcatagggccccagagtgtaagagacgacccccggatccagcactgccggcgcatgggccagctgcagagcgagcttcagtacaggaggggggcgaccagcagccaagcccagttccatctgcccatggacatggtgcacctggtccatgccaagaatgcccaggctctggccagcgaccacgactacaggacacagtatcacaagttcacagcactgcccgaggacctgaagatggcctgggccaagaaagcccatgccctgcagagtgaggtaggggtggccttgtggaatgcaaaccagcccccagcctttctcctttcaccaaacccgggtgtcaatctctgcttcttccttagtcttttgggctctcctgcccctatctgccttccccaaacaatgatttgctgggtctatgtcatttaggttggaatcattcattgaatcattcaactaatctttattgagggctagcacagtggctcacacctgtaatcccaacactttgggaggctgagccaggcggatcacgaggtcaggagtttgagactagcctgaccaacatggcgaaaccccgtctctattaaaaatacaaaaattagccaggcatggtggcatgcacctgtagtcccagctatttgggaggctgaggcaggagaatcgcttgaacccgagaggcagaggttgctgtgagctgagatcgcgccactgcactccagcctgggtgacagcacaagacttcatctcagaaaaaaaacartctttattgaccaccttctgtatactagccaccattctaagccctgagagtgcagcagttaacaaaagagtcaaaaaattcctgtgctcaggaaactcctgttatactagagggagataagccatggtgaatacatgaaatatgtaatatgtcaatggttgtacatgctatggagacatatagagcagggaagtggggcaggaggtgtgagtgtgcgtgtgtgtgtgtgcgygcacgtacacrtgtgccatttaaaatagggcattagggtagttctcattgaaaagttgatatttgagcaagagccttaaggaaaagacagaaggggatagggaactccaggcaaactgaatagcaagttcaaaggccaaggacttgagtaggagcagccttgacctgtttgaggctgaagtgaaggagcagccttggcctgtttgaggccgagtgagtggggatggaatcacagggtctgagcagggcctaggctctgcggagtaaggaygagggtggtgatgtgataagactgtaaccaccgcygactctcactgactgctcgcctttgcttttaaacttgcgaaagcagtctgacgtgggggcagctgttactcctgttttagggatgaggtcatgtgggaagtgcctagggagggtgggctccagaacccattcttaaccatcctgctctcttggggggagctcagagcagggagccatgcccctcacagcacaggcatagaccctgaggctacctcagggaggtccttccctgagcaggggcaccaagcaggctggtggagagcactggcccctcccacatcatggtgcaagattctggagtcagacttctgagattccaaccatagctcccccactactggctgggtgaccttggacaagttcatgtcctctccaagccgcaggcatggtaacgatggcatggaacatgacgataatgacaatgggactgcgttgcagtgtggcaggcactgcgtctcacatcctctctctaggcccacagcatccctaggaagaaggtgctctcattttagaacataaccagccatctgtgtcagggtttctcaacgtctgcacctttgacatttttgcaggctaattgtttgttttaggggcctgtcccgtgcatttcaggatatttagtaacatccgtggtctttatcctctaggtgtccatagcaccccaccacccagtgtgacaacaaatgcccctaaatcttgccaaacaaatgtccctgagagacgaagttatcccccgttgagaatctggttctcagtggagaactggtctatatgaaacagcatgatacctgatccatggaaacactagaataagtagtagctgtttgagtacgttccttgcgccaagcccctcaattctggttgccttcagggcaatgactactgctagattaattgtcgatagcaacaagtggggtattctaaacacataatcaattattattaattgcagtaatgattttgttaatttaattatcattgcattattaatcacagtttgctggaactgcaatatcatgtcattcaccatcaagcagagtgtagagtagggtgccttcatctgggtcccacataggggatttagttactaaagtgccagcccaagttccacttacaaagtccttccatttgctaagcaatcctgagggcccccaaaacagctcatagcatgactctctggtgcccaaccagggaccctcttgtcaatggcctatttcttgggagaacagaaaccttctgggacagaacaggcacctgaggaaggtagagaggccacctgggagaggtatgggaggtggagctggaagtcagaggatgtgtgtgggaagcccagctctgtcactgtgtgtccatgagcagtcacttccctttctaggcctccatctctccatcagaaaagcaaaaaggggccgggtgtggtggctcacacttgtaattccagcactttgggaggccagggtaaatgaattgcttgagttcagaagttcgagacyagcctgggcaacatgatgaaaccctgtctctacaaaaaattagctgggtgtggtggtgcacacctgtagtcccagctacttgggaggctgaggtgggaggatggcttgagcccaggaggcagaggttgcagtgagccatgattgtgctactgcacttcagcctgggtgacagaaaaccagagaccctgtctcaaaaaaataaaaagaaagtaaaagaaaagcaaagaggttcgatttgatccaccatcttagactttgggattcttgggaaaatggcttttaaatggtgggatccacataatgtcaaattttttttactaactgaggaagaaggaaaaaaacaaacactaccttaagctaccatgtatgtcactgttatttctgaaaagaaaggacattttcacactaaaaaaagaaagcagagagaacataatctaaaatggagaatccctcccatgaaattgtagttggcaatcttatgctgacattttaaaggcaggatatgtattacatttttaaatgctaagaagtgaytgcttaaattttaaatgaccatattatgctgtacgcattccttttaagctgcaaattggttaatgagagagtctggattcgaagaagctgtgaacaggagtccctgaaatgttcagctggttctgaggcttcagcttgatagcagccattatcaaaactcccatttcacgtgtttctattatgcaaaaaaggaaacaagtgctaaataggcattacgtcaagggagcagccccagccttcagctgcttctcctgacyttgccctccccaggccagagagaaagctctgggtagggccagaggggacccagagatgctgaggttctcgtggctatggttcattcccatgtcttgcccagttcggaccagcccggcccagtcttgcttgactcagaaattcacctgagatgcatgcctggtccaggcaagctgcatcatgggcaggtgctgattccatcatctcttccgtgcttctcaagtcggctgttgcctgctccctccgtggtctcagaccaggctgcygggagtccggaaaggcacatgcaggaaatgtcacggagacagtcccagcctctctgcatacagctgtgtgacctaaggtagactccttaagctctcgggactcagtttyyccctcagaaataacaacaacagcactaactaaaatgtatggaatgcttaccctgggctaggcattggcataagtattttgtgtaaactatctcatttaatatctaggtgggtaccagtatgactcctctctttacaggatgcggcgataaggcaccagtaatctaagtagcttgcccaaggccacagctggtagggaaatgacttgctcaagactgtacagctagtacaaggcacagtgaggcttctagctcttgcctcttaactcctggttcagtctctttggcttccccaggtggctggattctgaacccaggtgctctgtgtctgtcctcttaaccactacctggtgtggcttacccacagtatggcagctggtggctctgctgagagtctgaacaatcatttgaaaaccaaaattgttctgtgaatgggaataactgttccttaggctgggcatggtggctcacacctgtaatcccacattttgggaagctgagacaggaagattacttgagcccaggagttagagaacagcttgggcaacatagggagactccatctctacaaaaatagaaaataaaaaaaaatgaggcagttgtggtggtgcacacctgtggtcccagctactctgagaggctgaggtgggaggatcacttgagcctgggagatcaagactgcagtgaaccatgatcacaccactgcactccagcctgggtaacaagagagaccccatctccagagagagagagagagagagagagagagagagaatataaccccttctttgcaggatggtgtgaggactgaatgaaataatgggtctaaaacaaaccccactctacacaaggtcttgattgtaatgtttcttattaatatgacaaagatatactttaccccaggcacttgctgggcacaatggtttacatcattccttctgcattagaactcagggactgaaagctgcagcttgagcatttgcaacacagtgctccaaaatgggggtgccgggtaaccccatgtgtgaatccgaagaggtcttctagaccttagtatgtaagaggggaaaaaaagtgaggctgccatttggggaagccagattcagctgtgcagctttgaaaggtctctcattatcttataatccttcttcgaaaccatctttgggtagcagattcttcttgactcccctcccctggccccctcttttatcatgaagtctggggcaagtgtgttgtttttagggtctgcgtgaatagtcaaagctgggctgggagctgagatatcaatagacaatccatttataagagagttggaggcatagtcagatctttggggaacctgcatcttgctttctgacttacctgggatcgtactgttcagctcaacaaaaggcaagttgaaagagcgctccccacttcatctcgcttatgaaaggagcaaggcccggctgtgaagaggccctgtaggattattctctccaacttagaaatttatccaattttctctgttctttatcagagtgcaaggcaaaagctttgccggtgtagactgaaagatcgtggtataaaaagcaatcttactgacatggggttttgaaacctgctcctgagcctgagtgatgtctcccttcaccagttggaaggcacagtcgaatttgcacaggggcattaaccagcagacagtagatcagaaacggaccctctttgaggccagctgtgaggaacgctgtgaatcctgaaatgaaagagaactaaaaaggctgagaggctgatttctggagtgatattttgcgttacagcagagcttatatctaaattagagaaatgccatcaacttcgtttagatccaaattttagattttcttagagaggctttttccacctttaaaaaatgcctaatttccataaagagaagaagagaagcattcaggcgactttctcgttgtaggtaatggtgggcagatcaaggaatagtaatgagattcaacatttgggaaggctaccagtcagacccactgtcttaaagcaccatttattattttctcccaggactgatgccatagcctaaacttctgagctcttaaaatgaggaaagaaaataaggcttagcctatttttggaatataaacaaatcataatgagtaacagtgggaggaggtggtaaactgaggcatgaagcggttaaaatggtttactcactattagctggtggcatccaaatttgtttccgtttttaaagtcatgctataattgacttctttccccctccactaccactatcacaagaacaaaaaatctaacttaaagagtggctcttagccctgactactagcaggtgtttttatgagaacagaggggttgttatgaacttcgagtatcacagagagaaactgagtcacattttggttaaagtgatttgctcccagtcatagcaggttgaacccagagttcaaagcctgaacagtgtgcagaatgtttctatttaggcaggcgggtaatggcctcaatggcagaatgaaacaaaataatcccagctggtgcttagatatgagcatatatctcagctctttctttatgcgatcgtccacataggttgttactctcgctttaaatcctgccaattcactggtgggaccttcttgtatctcgtatgtgatgcattaattaattcctggcagaatgtacaaattcaaacagtttgacttgacgacatgcagaatgtactcccagtgaagatgttgaaatgttgtgatgaagcattattataaatgctattacaaatcaaggatcttcttgaaatgctgtactagtcttaagcactctcctgataaagcccatgatttttttccctgcagttgcgctacaagtcagacctgatcggcatgaagggcataggatggctggcgctgagatccccacagatggagagtgcaaagaaggctggagaactcatcagcraggtaccatcaacctgtccccaccacaagtgacaagggcaagctagcatttccttttgaagagggaatctgtttatggagtggagaacccaaaggacctcatggccactggactcccagtatttttggagggccatgtgcaaccaaatcccaagacagaatgaggtttccctccaaatgaattcactgctgaggaactgaaggcatgatttattagaaagttctcaacaaatacatttygtacaatcgttatctaaactggcccattctttgtatggagaggaggaggaatttgccacccatctactgagttgactctgtgtccagaggttttctgatttctgatagtgttaaaatttgcacaggaatagttacattaactgaactccttaccatactaacagcctggggatccctgccctggaattccctcgaaggtgacactgccttcttcagtttcttaataacagaatgtatttggacaggatccaagcagggccacattgatgctgaatactgccctttactgaattcctttattgtggggagccrtagtattttgtggcctctctcttcaagagagtaaatacctgtaaaatgttccatatcacagaagcagctgaatctttttatactcttgattgttaggtacytaccaagaagaaaggcttgttttccaacaatrtgattggcatgttaggtactgagaaggtggagtgaagctgcaccctgaaagatgcatgatgttggactgtgtttcatgagaatctttgtctttatcttatagaccaagtaccgtaaaaaaccagacagtatcaagttcaccacagtggttgactccccagacctggttcatgccaagaacagctatatgcactgcaatgaggtgggtcctttcttgtcattcatcccgggcatgcagtgtagcactgctgctcagtggtccgggtctaagaacacaggctctggacagatgggggtgcaaaccttctttctactacctggatgatctggacagatgggtgtgtaaatctttctatgacctggatggtcttgggccagttgctgaatcccttctaaccttggtccctttatttgaaggaggttggggtttcggggaggataataatagcaaccatttcataagattaaatgaattaaatgaggattaaataaaggctcagaaagttttagcaagtacatagaacacagtaagttctcaataagtgctccttatcatggtttgattcataatcacaatgacaagaataccaagtattattgatgatcccttgccaaaggctaggtcagatacatgttgcttgttgatagatggcagtggaattaaaagcttaatataacccagttaagaaaaaaataggaacagctgtatttaaagcttcttcctgattttactctctgtataatttagccctatttcctcattcctgtctttatttcaaggaataggaagttaatgtttttcccctgaaattaagggattcagttctacatgcacagtgacagagctgctccatttcacagacagcccgactactgtaccgactggttcatatttgtaaagcctcagttaaatttgggaattgatcggaatattacagtttcacctctaaaagtacataagactcaaacacttcctaaaattgtttgtaattcttaaatcactgctttaaaaatagaaaccagataaatctttgagttttaaaattgtgtcttcctgtgatccaggtgggctatgaaaatactaatttcttgaacatgtattaagatgttttataacaaaaagaacttattaactatgcatattataattatcaccattaatgttaaacaacaaaggcattgaggctgtatcttgttactagtaaaaagcatgtccaatgctcaattgcaaagattctctgaaatatctacacatcttctactgtgtaaaacacccaggtatggccaaccatgatgttggtttgtggcttatttggagcagatcttgaagaatatttttaacagtctatttaaaaccagctgccccatctgaccctggctataaaggcatcttccatcaaattgtgggttctggagggacactgtccatgggcaggactgggttctgttctatgcggtgggcactcaggtgggaggggcaggaaagggagtcagttgctattcccctgtggtttcagcccacacagttctctatttaccatgagcccatcttatctacagcgcatgtatagatctggagatgcagaatccctgcacagatacaccctgatccccgaccatcccgatttcacccgagctcgcctcaatgcgctgcatctgagtgacgtaagtgaactggtggttcatggaacgtgtgcccacttttgtaaaatgatctgygcccaatgtggatttcgtttttttwaaaaaaaaagttctaggaaggaggacttggaacagaaaggacactgaactgagaaactgtttgtgtgactttcagtcactttcctcagtggtcctcgtttttgttttytttatctgcaaaatggtaatgggctgagctaaactgagattctttccagctctaaaattctgacttgggtatggctccaaagatctcagtgatgtgctgggtaaccatgaggggagtggtcccctggccctagtgggtgtagacacctgctctttttgtttcctggacccctctctgtagtcattcagagtagtgtcactggagatagagtggctctatctcaccccacagtttggaaagatgctgcaatggtagcccatcccgtccaaatgcagctcgctcctttgtgcatgggactgtggcctccaacactttcgtttcccttggacatgtgccctttgcgtgcataaccaagctactgtttcctaaacccaggcttgttgttagcaggggttggaggcccctggttgtaatagaataggcggccgctcggccagcaaagctgtgatccttggataacaggtagagagacggcagaatcaaaagacactgtcagatcagaataacacaggctgagtgtgttggcctggggcagcgtagggcctcccagagtccggccattcttccctccctggcctggccattgtgtcctggggctccgtgcagatcaacagctgctaccrttcaccccagaggtggctgccttgcagggattggcgagaggcgccttctagttagcgtgtgtattagtttgttgcgtttgtaaagccctgtgggatcccatgcagtgaatgcgatggtgctttgtaaatatgagttattatgaccatttgatgcttttgaggkatgtgcaggggataattttagaacagcagctctggtgggctgacctccatctggggaagcaggacctccccctcagcagagcctgcacaaaacatctatctcattaatgcttcaaggatgggggaaggcaaggcctccatttgaggaacgattggagacccatcgctgtagaaagtgggataaagctgccagtgcatttggggcccggcttgaggaggagagccaccccaggctggtgatggaagcatcttccctctcacaagggatgccggtctgcagagtcctggagctgaaattagccaccagggtatgcggatatggataactcatgaacctcttttgaaagagcacttcttcgggggcgtgtagaatacgcacaattggatcaagtgctctgtgaggaagatgtggagggaaagtgaccttcctgggcaaagaaagccattgagatgtgtaaggcagccgaaataactaaaaatcaaatgactctaatgtgtgaggaygaggacaaaactgtgcccactgtgataaagaagaggaacgcccagggttccaaatcaaagcgcctacggaatctaaagactcccagtggcaaggcaaaaacctcaacagaataaaaaactcagggaggaagtgatcacaaccaagcaaatagtacacagggagaagtygcccagagaaaggggcctgcacactcgggagaccccygatctgggccatgctttctagttgaccctgagttacagagactcagaagctggggtgcattggacaccaaagtggggtgacattggacttcgatgttgcatcaagtttggtgtcaataaccagcccagatctggtgcgggcattcttattaggaaggcatggtgtgccccttagagagagtgatcagggttttgactctatttgctactctaacctttgtggggccacccaaacagaaagcagaatgctacagaggatcatcagtctgtcataatctgaacattcctacatgtctttcagtcctaactgctaaactcaatgatgacccagtaaatctaatcattttggctctgtgattcatcagttaggtgattatcccaggaacgaacggttctgcatttccagggcctagaacacagtagacgtttggctcagggtttacggcatcrggtgttggagtcagaggcgaggatggaggtgaaggtggtgtgatctgcagtacagagaaatgatgagatccgccatgcttggcccaagcactttgtggtcctctctagttccaggcccagttgtgggatggggtggggcactttgcttttcatctgccactcctcctttgcttaatccccccaatcccccgtagaacagagtgccagccttgacctccatttccaggagacaaaaggacggttcttaagggccccctgacctgctgtagctcgtggaaygagtgagcaaccgacacggtctggggctgtcactttgtcatctgttggtgatgcgcctctcctgctgtctcccttctctgtggctgaataaagaacagccctccactgggatctccagatgcctccttttatagagccattcccttatcttgaaaaaaaaatattagctacatgaaggcacagaagattttgatgcctctatcggtgatgtgggtctacctgaggactaagaggatatgattacagactcccagagggcgtgtgagamcaacttgaaaagggaaaaaatgaaagaggaagatatgaaacacatgggtcaggtactcggtcaggtgcttgmcaataaatttaattcaggtgaaggctcttcccttcgtgcaggcaccaggggtgtatatgagatgcagcatgcctcatagtgatggtgcaaggcatggcatcaaagccaggctgaggcccctccggatgtcagtggagctaacaaacacatgagtgccaaggcccaaggarcagcactttcagcatgtaggaagaaactggattctggaagcttgaattctggcacctagaagctgcaaacccgaagcactgaaagtgaatgcaaagacaggaaggagtggggtggaggcttctgataccaagtgggtgtcgcaaatgagccatacccgaagatcacaagccccacaggagcagggcctaatgggtgggygggttgggggcttagagctgaagccttttacggccaaccccaccaatcccagtgctagggagtcgccaaggtggacatggagctataggctgtgccrtcctaggaaccaacaaaggttaagaaccactcctgctgagtaccagcaacatggaagacagtggagtgactgcctgcttactcatgcttttgtttttccaatctagaaagtctacagaaactcctgggagcagacccgggctggcagttatgacttcaggcyggatgccatccccttccagactgcccgggcatctagggagatcgccagtgatgtaagacccccaygttctctcctgcggtcactgatgagtttttctctggtttycccagttctgttgaaaggcaaaccaccaggacctgtcaagattatctctctctctgcaccaaaactgaacatgtactgtattttaaatgaaagaaaaaaaaaagggctttactttctagcatcttaggcagaaattgtggtcaaggagggctgtatttccattctctttttagagaggcactcttaaaagatgatggatgagtaccaagaggttcatgaatatgagcttgggttgttgatttgcaataaaaggacttcttttagctgaagttcagtgtggtagagtagaaagagatagggcttttgccctagatggacaagttcaaatcctggctcagtcacttaggaaatttggctgtttgtcttgggcaagttgctcaaattctctgaacttgattttctacatctatgaaatagggatcttatctcccagattaatgtaggaatgaaaacaaaatcgtatatggtgtcaggaacatagcaggtattctgcaagagagggcaccattgactagacaagtgtccacagtgctagacggaggcgcacctgggaacagtttcctgctggtccacaattggataagtacagaaattaagagcatgggatttttgaaatattttttagcaattagacgttgtaacatccaagcatgtgatcactggactcatctcattgaaaagggtgaaggccaggttgggtgttaccaaatacaagtggtactgctacatactagccacatgcaataggaccatacatgggtctttgatgcattggaaatgtaaaaagcaaatcaaaatgggactggcccttcactgtagatggtttgaggagcactggactaggtccctaaaagctggaaagaatcaaaggcagagtggcctatgtgagaatgggcacatttatcttcctgttggagtattaattacaatagtgacaataccagtagccaccactcagtgggccagagctkatgccagacatgaagctcagtccttatctggttgaatcctcgcaacctcctatggggtgtagatcattctccaattttatcagatggggaaactgaggctcatggagaaactcagtaacaggcccatgrccacacagataggtctatttgaatccaaagcctgtgcctctaacccactcttgagcctcctgctgagaatgccctgggatggccccatatgtgaggctggtcctgggggaggtaggcacccatgatctgcctctgctcctctgacttgcagttccggtacaaagaggctttcctgcgggaccgaggcctgcagatcgggtacygcagtgtcgacgatgacccaaggatgaagcatttcctcaacgttggcaggctccagagtgacaatgagtacaagaaggactttgccaagagtcggtcccagtttcacagcagcacagaccagcccggcctccttcaggccaagaggagccagcagctggccagtgatgtgcactacaggcagcccctgccccagcccacctgcgacccggagcagctgggcctcaggcatgctcagaaggcccaccagctgcagagtgatgtgagccacctccacccactcccttgaggcccttcccctggtgcctcttcctaagagatggccataatgccacgttccattgttagcttctgggggagctgggctgagagagaatccaagacacctaacactttagtgccagaaagaataacaataataaccaccacttctcgagtgtctcctgtgggccaggctctgtgtcaaatgctttccaagcctcctgccattggcacttaygccaaccccagggctgcttcattttacagatgaggaacttgaggctcagagaggttcagtgacttactcaagatcccataacaaataagtggcagacctgggataccaaccccttttggtttgctgtgagggcccaagctctcgatggctatgctaaactgtttccaagggatcttagctattaacccagcctttgcactttctctgggaagaaactgaagcccagagaagggaagtggcttccctaaggccacagagtgtgtggagcaggtgtcactaccccacccactcccaactgtaacttttgtcacttgaatgggaagatgcaagagacagcaacatgccggctggactcacagcacattgcggcccctgtgccagggagatgctgcttatgataaatttgttycccttgttctggctttactgatgacagacaacatagtctcatactgtggctgcctttttaatcttctttacttaatggtcaaaccgctccaaaccctgctgacatattcctcttgcttccctcttaccctcaaggtcaagtataaatcagacttgaacctgaccagaggtgttggctggacccctcctggctcctacaaagtggaaatggctcggcgggctgcrgaactggccaacgcaaggggcctgggtctccagggagcttacgtgagtagcaagctgcaaagccaccctggcttgcaaggccatggggaaagacaaactcattgtttcttttcaaagtttatttttggccaaaggtcagctagctctaaagaagtgtgaaacgcagctcaaacaaggcgcctaatttcatgggtctgagatgaccaggcagatgacacgyagkttaaacttcctgcagggctttctctgaagtcacagccattagttctgcagaggcaaacctaccggggctacatcaatcccgggccagggcagcccaggctgtgctgactgcttgctcgttacattcgcagaaagggtcagggactcgctggatatgacagtctgcattttgaaccctactttgttcagaagaaagaagccaggtctaaatgagagattggctttgctttctcattcctgccttgamggccctttttcttggggagggtagaagaggggaaaaggaaagggagggtgagcctgttaaatgctccctgtgcttcttagcgtgtcctgtgggaaccggggccgggagtgggggtgggggagcttcattttaacttggggtatgtttgatttcagcagcggggggcagaagcagtggaggctggagatcatcagagtggggaggtgaacccagatgccactgagattctgcacgtcaaaaagaagaaggccctgctgttgtgagccatgtccaccctgattcctgagaggccagagaggaagtttgttcaccagagacaggcttcagatggctttgatttcggcaagctggaatggcccaccagcccatcccagatcttcctttattaaaataataactctgaaagcagatggagaatgttgtatttgtggtcctctctgatacctagacgtggatggctgattctgttgagtgcctcgagtgtctgggctgaggaataaagatgtgatggtggttcccgctgatgctggggattctggagtctgcatttgcaggatgcctgtggtggaggcagtctctgtgaacactgattttctagaaggtacaattgggtaaggaaagcaaacatactatgttgtgttgattccatcattccttgggttaccaagggaggcagaagaagcctggtgatattgtgcaaatgctggtctgggaaggcccaggctgggtggcagttgtctctgcttagagtagggatagtctactgtgtggtcccctggaggctctggaggtgtccattgttggccatgaggcctcccggtgtcagggtgccaaggagagtgggctctgaggtccagaagacagtaccttagaagccactttcacttttgatggtggctttgatccaattcaggaatttggtaacttgggtgtagacccctggcctcttcccacactccaggccccagctcactatcccatagacgtagtaggtgccgtccttctcacaggtcagggggcctccagagtcaccctaagggaaacagaggcataagctcatcctcgtgaaccagagacatctggagatgcccccacctctctccagggggtgtcagggagggatggggtggagtcccttgccagcctccgtgggcttctctggaaagcagtgacaaggctctccccacatctcacatgatacaagactctaagggagagaagataacagtgtcctccgtccctgagtccacgcgggcttaacagaggagccgcacagctgcacttcccaactctcagtgatgcagatgttatgactgtgagttctcgggggccctcagcacacatagggtaggaggttggggactccaaggcagcgtggcctaggtgctcagcatggtctatggggttagatctcctgggttttaagccaggccctaccacctgccaggcatgtgaccttaggcctcagtttctcacactgtaaaccatagatagcaatagatccccatcccccagggttcttgtgaagattgtttgtaaagtatatagaacagtgcctggttcatattaaaccctcacggaaggtggcgaggatgatgatggtgaggagaagaagacattgagggtgatagctctcaaaaacttaatactgcttaaacactacaactgacaggtttttaaaaaatgaattctctattttaaacttagccacgaccttgtgatcttatagatagatttccattttatagtttaggcatctgagattgaagaattgctttcatcactgataaaagccatacagtaagagacagaaacaggtttcaattcacaactatttgtttccaaagcctgcaagtgaaagccttcaattatctagggaattgaatgaggtttttttttgtttgtttgtttttgtttttttgagacagggtctcgctttgttgcccaggctggagtgcagtggcaccctcttggctcactgcaacctccgtttcccacgtccaagcgattctcctgcctcagccccagtagctgggactacaggcatgtgccaccatgtccacctaatttttgtatttttcttttagtagagacagggtttcaccatgttggctaggctgatcttgaactcctgacctcaggtgatctgcccgcctcagcctcccaaagtgctgggattacaggcttgagccaccacgcatgcccagcctgaatgagctgttttcttaaccatcttctgggaaggagtttagggcaaattgcacccatctgcccctcctctgagtaggtgaacatccttggctcactgggaagagacagatagtcacaggagagccacaaaccctggagagaggaaccttgatgtcccatcccaaagtgagttcaaggccagcaaatcattgtgggttcctttgtacggggaggctccctgaaggagttgggatttgaatgttggcatgctgttttccaggacatttagaaggcttatggggacaacagtcagaaaattctaaatggaggtgttcctgggattctagaaaggaccctgtgtgatgtgatccctacagataaagggactatggggaatgggctttgacttggggcagggcctgaagtcactttagcattggttgatggagccaccaccttctctctctgcaacagtgtctctgagtcacaagcctcagcaacttggagttctgaaaggccctaggctacagatatacttagttttctagggctaaaacaccccccccccccccacacacacacacacgcacacatgagtcctaatcatgagttaatattactgtgaaatctctagctctaggccttcttctttctccttctagccactggtcttctggacagttccctgtttactgggattctcagaaaggctgccctacactgaggccacaagcccctttggtgtcctgcagactgtattgttcaaatcccagccctgccactggccacccaattgctataggccaagataacttctctaagcatctgtaaaatggtgatcatgacatcaccttcaccagtgtgttgtgagagttaaattagacagtgcaggcaatgtgacctctgtggtcattatgctgagtcatcctgggttgatgcggatgcagatgcaccagagggccagggggcagacacagctcacctgtgtcttagctttaccacaggtggacctctgaacctagctcccagcccagggctctaagggtcctctgcctagtgaaacatcctgctagcctctcctaccacaagcaccacttggagtctctgacctggcaggtgtcttgcccaggtttctgaagatttcctgcacagatcatactgtcatcaatcatgtggtcatagagttggcgggagttgcacaaagtgttggcaatcagcttgactttggcatccaggagctggcgggacccttttcctgtggggaaggtgcagagaaaagagtcactactgtggggaccagggtggcaccaaccccaccagaaaccagattgtcagggagaagcccaccaactcttagctcagaagggaagggtttttccaggatatgggcagaaaagcctcatctttagccttcaccatgccagtgcagacctgcaatcctgtgctggtcatgatacatggaccagatagtatattccctcctctctttccccaggtaggccatgaggttcaggaggaaatagatgctctcttaaccattttaaaattcccaaggcctaacaaaagggctggcacaattcttagtgaatgaatggatggatggatggatgaagtgccctgcgcagtaggctacctgcttcctagagcaggcattttcccctgtaaagataatgacatcaatcaaaacatgttttgaacataaagtcttagagaacataaaggctttgaacataaagtcttagaagcctgtttatgaaaagcaaaataattctaacctgaggctccaaaagattcccaactgagacatcaccatgctgaccagaccatattgagcagaatagaggttgacaagttcagatggactacaatgaaaatggctgtaaaatgagtttactggctgaccctaaatccaattagccagacatctttctcaaaagactcaaagttgtatattacatttcactttgttcagatatgtggaatttctgcagacttatttatcgtgattctcgctattcattattaaggacaggatttgcgaaggaagagaaatatattttgagtatttggaaaagacatgaaatacccttctgaattttttttgtagtagtgggtataatgttgccagtactatgaggaaagtaatcctttggttacttttaaaaattagaccaaatcctaaagacaaatcaacagctggatttaacacaattttatagaatgtctactgtgtggagaaccccgagcaaagtactgtgagacagacagagatgaatgggacctgacccccatcttctaagggctgacttaatgaatgtctctgtagaattctatcatcccctgtgatcatgcttgcaaacccgggaagtaagtatgattattgagaaactaaaactcagttgttcaagtgacaaagtcaagaattgaataccagtctgtctgactcaaaaatccatgatctttcctctttccaatctaactaggaagggagcaagagctccataaatgcagggtcaatgcttggtaaaattcaagtatttaggggtagggccagggacagatatggagatcagagaaactcagggaaggctccctgcaggtggaggaatttaaccagagcttgatcaatgaggtggatgctttctttggttgatgcattttgaatatgacactcatttcaacttcaaaagggcagttgagtttggcctttcttctctggttgatgtagttcacctaagtcatgggagagtgcatggccgactcacctgtttctgtaacaccccagccagagatgtggcactcactcccagagggaaaggacccatcaggcaagcacacagtcttcacgtatttggattctagagcacagtgaccatccactggctttaacttgagcaatgctaggtggagagagaggtagaaaatggatgcgatgtcacctctttgtcagagaagcaccagctccaacttgctcatgaaggtggccacagcaaagccccacctgcccccaccatgcctgaaaatcttcttccgtggtcatttcatattttgaacttccacccaggaaggagtaacacttcagggcgagagtcatgtcaagaaatgacaattgactttgaaatcatttctaatccattttttaagaaacaggccattagaggggaaaaaagctattgaggaaggagagagaggtgggggggtgtctcatgaaaagggaaacgggatacagaactgagcagctggtagctaggaacgtcattgcatttgcactggagcacctgccaggggctaggggccaggcatgcctgcaagcacattgtgtctcctgacacataggaagctgagagttgtgcatcagtgtttccatttcatagaagagaaaagagggctcaggaggtgagctgtctcctggtgataaagttgggaagctgggattccaggccaagcctattccatagcacaatgttcctagcattgcttcccctcagtttaagagcatatgcccatttatctacatttgcacataccctcaaaaactaaaaatccctggaatacattccctaccgcacagggtccacagggaccaaaaacaatcaagagcaccttctagaaccaaacttcagctttctggtcatagagaaatccacccaggacaagaccctcaggaaagccatgaaagaggaacttgccaatatcattgtggggaatctcatctctttcattgtagtggctgtacttgaatatcttctccaccctaaagctctgctcatgaaattcttctttcttcaggtcctggtcccctagcaccacctttagatgtctggtttttatgctgcaagggaaaatgagatggtcaggaaggcactgtttctgctcagctgtgtggcctttggcaaatctgaccttctgcagactcagcctcctcatttgtaaccctcgtctcactcacagaactctgctgtggtagggtccaaataagattatgtaagggaagtgctttattaacagaagcaagctccaaatataagctataacttttacccacttctcatgggagacctcccattctccctaggccttccaaagaaacagccattgccatcttgaaccaatcttctaaaatccattggcaggtgctaatgtttgcctgcttgacctctcttgaggagcacctcctagaatcccagagaaatcatttactataaggtgaactggaagaccttcatggccacctccaaaacccagactttgttggaccagccttgaccatgagcacagggagctcagaagagggggtgactcttcagctccccagaagttacttgcttctctaaggcacacaggaggcatggatgaagacacctgactcagaagggtcattggtgatggtatcagacaaaggagcatgctttcctctattcagggcaggacaaaagaagtcaaagaagcagatagaatggggtttccatcttacttgtccacttaactttccatacaacttcaggcaaggtaaaggaagaatcccgggattcaagatcctcacttacaaaaagggaataacaataaactc

SEQ ID NO: 6782 - DNA, 606398 bp, Homo sapiens
  misc_feature (1)...(606398): n = A,T,C or G, or insertion/deletion polymorphism (see Tables 1-2)
atgggaggtctcaatatttttaaaatactgatttatccctgattgatctatacatacaatgcaatcctattaaaaagtccatcattcctagaagttgacaatgagattctagaacacgctggaagaactaagggacttcatatcaggttttatgatgtattatgatgttctaataattaagaagtgctttgttagcacaaaatttgacaaacttgatgcattaaggagaatagaaaattcagaaacaatcacacacacgtagtcacttgacttcaataaatgtgccatggcaatatgataggaaaaggattcttaaattttaaattaatggtgctgagttcattgatatccatatactacaacatgaaccttgaaccttacttcatgccatatacatacaaagaaattccagatggattatagatataaatgataaaacaatacagcttctagaaaaaatttcacaaacatgaggtaggaaaagatttattaaactgaaaataaaaagcattagccataaagaaaaggtttgaagtaattgataaattgaattacatcatattaagaacttcttttcccttttagctgttattgaatatatttatgaggtataacatgatgttttaatgtatatataaatagtgaaatctttactaaagtcaagcaaattaacatctccatcccctcacatggttactcctccttcccctactttttttggtgtggtaagagcacttaaaatctactctcttagcacatttccagtatataatacaatattaataaccataatcctcatattgtatattagattctagacttattcatcctatataactgtaactttgtactccgtgacctacatctcttcatttaacaccccctgcactgctagacacaagagtacaaactgatttaattgagtaagttcaagaacagcaaaattaatgtatagttatagaagtcagaagaggtattacttttgtcagagtggatgcacataggtattgttgactgagaaggtacaggatcctgctcggatgctgagaaagatttctatcttcatctttgtggttgtatttgtgtgtaaaaataaaatcacagaaacaacatataattaagattttgacagtcttatggatgtgggttaaattttaatataattttcaaatattttaaaaatgctaacaaacattgtcaatgttaccgggcagggttctctttaaactaacttcagctaatagcaataggttagaaaacaggaacattttcagttgatgatgttttgccttaaattgccatattcattgattcaagttttctcttaggtgtaaatttagctttatgtgacatttgtggtgggtgtttatgattcattctagtgctgatcatctgacaatattaagaaaggctattaaaaatgtgagagcattagctttgttattcactcattcaagaaacactgtcttctctgtgcctgcattaggttttggactgaggttaagagatagatgacacatcccctaacctacaggagtttgcagtctaatggaggagatggctaacttagaagatgagaattaaaaaagtacaatgtcagaataggcatagagtgccaagagaatatagaaaaaagagatactgtttacatacttagcacctacaacaatagaaccaaaaagtacattacaagatgatctccataatgagaacctttaaaagtctgtggataaatttcaaacatttcctaatatcatgccaagatctagtggatgayggcacaggacatggcaggcacagaccaagaattatgctgcaaagaaggaggccatcaatttggggttaaactatggtagcagatatcaaagaaacaaaagtagttaatggaagtctaagaagataaagctactaaaatctagaagtatcagtgagttggatgagagatggagaaatggagaaaaagattttggctgctggcctctacagaaattgggcctttggataacaggcataaaataccagtttaacaatgaactgattgacttcttagataggaactcattaaaccacccctggagaaccacagctccttttagaaaatgaacaggcctcagctaataatgtacctcatagagatatacctgatgatagtaactgagcaggtagttgagtggatcctaataacagtttttcaacaatcatggatctacatctaggcagcttattaaagctcattcatatcttcacactctatagtatctccaaaagataaattgcatatgttgaataagggatgtattaagggattccctggctgggcatggtggcttacacctgtaattccagcactttgggaggccaaggcaggtggatcatttgaggtcaggacaacatggtgaaaccccgtctctactaaaactacaaaaattagccaggcatggtggcaaagcctgtaatcccagatacctgggaggctgaggtaggagaactgcttgaacctgggaggcagaggttgcagtgagccaagatagcaccaatgcactccagcctgggagacagagttagactctgtgccaaaaaaaaaaaaaaaaaaaaagggggattcccttggaccttttctaaagttaatttctcaagctgcaaagaataattcaagtacatagctaaaagctcagtctcttgcccaatctactgttgatgtcctagaagcttgcaaagatgcagattgatggtacagtgttttacacagaacaccagattggcaataactaagaaggtggtagtttatcccatcctttcaatttgcttccagagtgaaccttctgcgttccaacacctgttctctactcttctttttatatctgctggggtatggtggtctttaaattgtgtttttaccctagctggaaataagttgatttttaaaaaatatacatggattttaactccttgtctcccatctagagaagcatgttgaagaacagtgtcaaactgaagttggtatttgaagtatgaagcaactttaacagctaacatgtattgagtgttcactctgtctcaggtaaatcagtctcacatgaggaaggtgatataacctacattttgcagattaaggaatagggattccaaaagtcaaatgataatgtacagttagtgagtgacatgcacgggatttaaaagcaggattttgactttcaagtttaggattttaagccccacactgtactgcctctcagcacaagacagacagacacaacagactttgtgcctttgaccgcctctcttcttttcctctttggtgtccctctgtgccactaccagagcttagcatactgttgggaatatctggactggaggcctgctcttggtccagatcaaacagagaaatgggaagcagcataaaatagttaatgtctgtccaactgtgctactgattctttgatttgtttcctccttcttctgtaagatactctttgctctgagtgagaggtcccaaagaccttgtttttcagtggctactgtacattttatagagttgtattctgctggaatattatgccacagaagtctactgaattgggctttatattaacctcattcatctttggataggttcttgttacaggggacaaatataaccaaagacttcttatcatatagaagcttttggttttgcaatcattggcctttaaagagttttttgaggtagcattttgtttcttttgtcttctctcctctagtcagtattcctgaagcaacaaaagtgaaatgtagctccaagtttagtttaaaataaactgagtttatttttcctatttgtatttctagggaagttggaccagaaaacatgttatgaagttggtttcatgatttagtacatcaaagcctttttatattagacttacaggctagagaaagacagaaaacagagaacacagaagttacattttacagttttcagatcattttaagactataataaagttatgttaatgcattctcagactttttggtaaaggtatattttcaaaaatctaataatacaatctttaaataaacttatttaatcatagtatatttttatctatttcactttaagtatgaatattaaaattggaaaaatatatatgcatatgtgagtttacataatgacagtgatattatttcatgcttctcttttcctayttaattatgcaaactatcctttgaaacctgaaatgattgtataagcactgcataatagctacacaaaaataatgtggaattttaattcatgaatatacaaattgggaacagaattggacaaaacaggggggaaaaggataaaaagacaatctgctctaagtcttgtctttgagtctgtgaccttagataaatttatttgtattctgtaagatacaggcaaaaactgccccctacctatctttyggagctgctgcaagatttattaaactagggggaaaaatgcaaaacaaaaactgtttagaggtgtgatgagacagagggtacacaaatccaagatagttttgttatctccaacgggtgtccaaggtagaattaactttcataacatccttatgagttaggtagataatcttagccctgtttttaaagataagagggcttatgtgctcctactaacaccacttagattgggtgtatgagaacgggtacaattactggattcagagctaggtctgtatttgttgatacctgaaagtattttaagggacagattttaaaaatcccatcattctgttggcaggcaatgagaatagcctgcatattattctccccagttttctttctgtggttcttcatgaaattgatctgaaatgcaagacaagacactttgtctcaatggtatccaaggggagccaaatattttgagaactattaaaagacattgttcaaacgatgaggcatataaatgtgatttagtgcaaactgaagccaaagtagccatcaaaaatcaagagacttaggaaaaagggaagacaaaaaaccaatgagacagttaacctgtagcttatgctgtaagattatgtggggagtggttataacattctctttaacattacttcccacacacaaaataaaagcaaatagaaatggggagtatatatattcccctcagcctaaaaaaagtgcacacttgttcccaaaattgcttgctcagcattactaaaaatgtttcaagccaattagagtgcctgacacatagaaaatcatcaataagtgttatctgttattagttggatttggagtaaaacagtatttcataaaatcaagaacatactgggaataagartgcctacgtagaaaccttgtctctttgcactaattgctgtgtgaccctagttacttaatatcatctgtgaagtggggagaatgatagtacttatgtgatataagctttgtaaaaaaaaaaaaaaaaaaaaaaggcatgagctggtacatttaaactccatagcatagtttctggcatagagtatatatctgatttacaaagtactagttactaagagttgtgctcctaggcttgttatactggtgccacccagctaaccagccattatttattgagcacttaattaactaggcactgaaagaaatgttgaaatgaggttaatgttgaaaataaatgttgaaataaggagcacagggcctttatccacatgtggattttttggaagttattaacaaaaaacaggtttaagtaaaataattaaatgctgtaatatacgcttagaaagatctggcaagagattgatacagaaaatgtggaataaatttcttctgtaggcagaggttcaggaaaagtctctctaaggttgtatatttaaagtgaaggtctcaaaaaagaggagtcagccatatgaagtggggttggacggtggacgttctaggcaggcggaacagcatgtgcaaaggtcacgaattggaaaaaactgggcacatcagcgaaaaggatagcccctaatggttggcgtattaggatgagggtagagaatcctgccaaatgtgatggagaagtgagtacttggtcagccatggtaaggagtttggatattattctgtttgtgatggtaagctggcaggaagtattaagcagttacaataaattatattttttatccttttgaaagactacttttgctgccttgtagggcagagtgtccacacttttttgattgtgcacaccaatcagtatacaatgactaaatgttcatattctttgtctttctgcctctgcttctttctctatctgcttctgtctctctctttatacatatatatgcatatatatgaatatatatacatatgtttatattgtatataaaactgtatataacataggtatattaatcaataattaaatattttagcaaggctaaattttaatctttctgattaaaactaaatatatcaccaaattctattattttcatcttgcacaaaaatggatcacctgagtgtgcttgtgyccttgtacttgtgtcatctttggagatgactattggagagaaggaacggaacagtgcaattatggagtagagtgagcagtaagaggctgttgtggtagtccagatgagaaatgatgataacttagatgaagtcgtggcatatttgtcacgtgcacaatgaaaagactccttattggaattacagatttatgttctctactagcctttgatatcaattactttcctaacaaatgactcattcttattatattatattaataaaaatctattggattgcttagtgggttgttggattgaaaacatcttgaaatagactcccctccatgattagcctatttattggagtcttctagataaggggaataatttaggaaattactggtactttccrcttctgtttgttggcaaaagtaaacggggagcagagccataagaaataaaatgaatccatctatctacatatgaacaatacggcttgcagccaatgtcatccacacttgtgtaacttctgtctcaaatgaataattaaaatcaggcattaaaaacttgcctgctctctatgaactcccagcaaatggactgcaaatgctttcattttaaagggatcattctgacaggtgtgtttgaaaagaggttgtaaattctgggaaggaaaaatctactctacttgtacgagcattcttcaggaagcgcttccattttgaaaccaaaataacataaatggtggtagggcaatgatagactaaagccaggaaatctgaatccactaatgtcttcttttccattttgcttcttccagcctatatttggatgataatttatttgggttctgattctttaatctgcttttcctttcttggaggaattcccatgtacttatccagactggaaaggaggttagcagggcatagaaagaagtcattaagtaaatgatcctgcaaagctctaaaaacctttctgaggaaagaaaaaactaccgctctgggttttgacaaagaacatttgcaatttgaggaggagagaggacctctggctctcctctcctccatctagaggccatagcctgccagacagcctttctgttttggaggattcaggcataaaggagcttttgcttgtatttcttctttaacgacaaacaggacactcttttaggtccttttaggtactcaagtttaatggctgagaagcctgccctccttgcatttgcactttttctgcgctggtcgtaagaacaagaacttaggccgatattttacaacacctctctggattggattgatataacagacgttttcttggacattagaaagaatttcattaattgaagagtaattatcactctgtattactttgaacttggcctcatcgcaaacayggtatacagatttttcagtgaggttattattctagtatgaaaatgaacaaaaatgtaactagaaactggaatcggtactattttgttgtgtcattcatttattcaatcagtaaatattcattaaataatgtaataacatgtacctaagagaatattacgtatatgaagactgcaaagaaatctgaaaccatttcaacccttagaagcaaactgtctactttaaaaaggattggattttgagaaatyctttgccgttttcaaagcccattcacctgctataaatcttcatctgaacttacgaatagtagcagggtgctaggctgggcagatactataatcatacaattatagaattttaggagcggaagggattttaaaggtcatctaatgtgaccatttaattttaaagcttaggaagctgasagattgtgatttgtctgaggtcccaaagcaaaccagtggcagagcaccatcacagacttgctattagggatctcaaagcatgtggcagtagcactgggccaggcaccaagtgacacagaataactataagtactgtgcctcctttcctgtatttatttgttatgcagatatgcattagactcacaataaatatttattgaactaatgactggcagatttcctcccatgtagggtactgtgccacgtactgaggaaaatggtaaacaaaaaacaggtcacttcctccaagttgctcgaaatttgatcttcctgtcctcaatgagtttgcagtctcttagggaaaccaagatatatacgcttaaaaaacgcgtagtggaaagcgttttcttaaatatgattgcatgcaggaagattgggttcaaattcagtgaatgctttaggaggttaggagagaaatctaagcgttaaaattgatgggaaaaaaaatcccccaaactaacacacacacacacacacacacacacacactcacacacgagatcatttaattacatcactctctgctgctgcctttccgggatctccccccaggctgggacacacaggctctgctgcgggtaaggtcaagatgccaactcaggaagcataagagagggaaggagcagaagcccacccatccctatctcctcaactagaaaagaccagaaagacggagaaaaaaggaaacagcaacatagactcatagaaacaataaagcaggaataggaagctcccgacacatcgactgctccgggagcccggggtcgaccgcccccgcgggcagggtgcgcggactcagcgccgggacccgcggccgcgggggcgcagagtgggcggcggggagaggcggcggcagcgcctgcgaggccgaggggaggtcgccggcggcgcctccagcgcccggagacccggtgcgcagcgcagctcggccgcgggacgcggcgcccggagtcccggcagcgcctgccctccctcccgcgtcgcccgccagcgcccgcgcccgctccgccagtgacttcagctcagctccacccccgcgcggcggcggctcgctccgtccggacccgcgctcggcacaagcccagcccgggcaagcggccgccacctgcccggcgccgcctccgcccgcccccaccgcggcgcaacttrgatggagttggggtcctgagcgccggccccccacagccgccagcgcagagctcgtgccgccaccttcgttctgggacccctctctccgctgctcttcgctcccgcgatgggaaaagttggcgccggcggcggctcccaagcccggctgagcgcgctcctcgccggcgcggggctcttgatcctctgcgccccgggcgtctgcggcggcggctcctgctgcccctcgccgcaccccagctcsgctccacgctcggcctcgacccctaggggcttttcccaccaggggcggccaggcagggctcctgccacgcccctgcccctcgtagtgcgtcccctgttctcagtggcccccggggaccgagcgctatccctggagcgggctcggggcactggggcatccatggcggttgctgcacgctccggccggaggagacggagcggagcggatcaggagaaggcagaacggggagagggcgcgagtcggagcccccggggagtgctaagagatggagggcagcaggagcctgggactcgggagcgggacccggacaaagccacccgcttccggatggaggagctgagactgaccagcaccacgtttgcgctgacgggagactcagcacacaaccaagccatggtccactggtctggccacaacagcagcgtgagtagaatgggactgagggyaaaggggtggaaagatggaaagggttaaagtcggctgtgtgatctgatggagaattggggggaaatagggtttctggacatgggagatgctgcaaactggtctctgcccacttcccccaagagttaacatcacctactaggagaccaacctccccatctctcccaccaacaccatcagagtcctctccaaatgccacagcttcaaactgaggagtcaaatccctatttcctgttgccttggtcgcattggtgtgtggaactgaagaccaggtaaacagaggggttaaagttctcctaatacagagatgaaagggttaaatttccaggcaagctgacatcccctcaagtgactttccctttacttgccagacctatgtactggctcaaagaagattaagaagacccatatatgtaggcgttttattttattttattttaatttcatgcrgagctcctaaccccttcttctccacaagggagaactgcagtggagagtatataaggtgttctttagtgtatcctctgctttagggaccaagtggatgcaagtttcagggcaggaactctccagcatcttctaacagcrctaagcgagggtgttttgagaactggggctttccagcccgtgaatgagcggttgttctctggcatggtcagtcccaggaagatcagatatatcccagtgacaacaactccctgttctcccccattgcctgacctcctctaatgaagagcacaaataaagacttaacattccctttatgaaggcaggaaagggattgctcaattccaggaggctggattccaggggacttaggatgcaagtccatgagctttggtcctatcaggaaaggttttagattttcagaaaagcttgcatgtctgcaatctgagggagctattcctgtttaaattgaacctagaaacttcagtgagttgaaatagtagagaaccagctttgattgtaataactaaaagtgattttaaagtgtggaaacttctccagacatagacaagaacataacaaccaaggatgggtaaaatgggggaaaaaaatttcaagttttacagcttcaaccaggtaattgagattgtagtgtttgtaatatgcacaatttacgcagtctggaacctttcaaaacgttttctgttgtgatgtaattcccagaaaccttcccagagaagtgccactttagtgagttgtgctcattgtcagctttttaatgagagttgtgaacattttaaaatactaatctgtcatcatgaattccttgggtacacagatataaattgtattaaggcacatcatgatagataatatttagcattgatgtatctgtcctgagagtagtagcagggttttccctacaattcctccttcatgacagagtctgtgattttatatggttctcaggagtggtttgatcaaataaatgaagctgaaattctttccattcaagttctggagacccttgccctcattccttaccttaaccattatatctttcatatcatagccactaaaattaatcctctaatttgaactcgaatcttcttaaactgattgaataactttcacactgctttaagtgattaactcaaagcttctggctttaaggggagatttgaaacacatcaaacatgttagctcttgttgtattaagaagtaaaagactttggactcagaatgtttctggcttttaatgtaattcaagctgtaaaatatcactcacccattagacctcttcttttagctcatctcttgaaagatcttggaaagaaagagaaaagtagaatacatctttggcaaatttttaamctcygtttaggaaatggtgccaagcactgccagcattaaaaaataataataaatggtgcttatwattctagtagggcttattaggktcagggcattgaacatgcaggcaggtctgagataacgtaggaaatraggtgatgagtgttaaagttttgatcactcaaatcatgttaactaatgaggtgagatttctgccccctgaagtctcttattccataaagacctcttctgacccagtctctgctctggtcatcacacacaaaggtgtttcttctttttcttttttaagtatatacatacagatagtggagaaagagaaatagtctttatctatgtcctccaaaacaaagccagtcctacgtatctggaccagactcagagaaagtttaaaatattttttaaagggaaagaaagcataaataaactttttttttttggccgttttgtagaatgcaaagcagagtggagacctgaattctagttctgcttatttgtggtttgaccgaggcaagttgagtgtccgctgaatgtggattttttcatctctaaagtgggggctatgccggtcagattaactacagagaattaggagccaggctatacataagagggcagtgtgactttacagcctcatacacttgtttggaactctcaacagcacttcactttaccccagggtgggaaatccactaatttaaacccgagggccagattggagtggtggaggggcatgggggactcttatcttttcacatttagatgtcctcccctataaatctgcccccagacccattcaggaccacaggcagtgcacatcctgtgaacccttctcacctttagcaaaaagcctttgctatgaagagtctctgattatgacaacacctgcattcaaggtgcaaatgcatggtaattataggctgcttgtcaatctggtgaggaattctggatggttcactcacctccttcccttcactttcctgccccctcagctgttggacttgagcagttgtataaagacatgtctgttttgcctcgtctgtgggtgtgatgtgattcctctgtactgcagtctcgattgatggaaactgttgctagagttggtggaacacctggggggatcttctggcatgaaaggtgctgggtatgaatcatttgtcatgagcttggtgtcgtaagcaagaacatattgttcccaccctactcatcccaggcatgctgtgccctgatctaaatttatatagtaatccttagagtgttaaaatatatatttgcctttatatgtatgcataatggtgtatgtgtttattccttatttccaagggattttaaagtgctgtagcattaatctttataaaatcctttgtaggtagtaagtaggtgacgggtgttaatatctctttttcatatttttatgccggagttaagtttagtatttcaattcaccactctgcccctttctcactggcaattgtattacaagatttgttaacagagggttttacttgacttctatttttccatgatgacatctttaatgttacatttctcatagcacatgatggactgcttgatttctgtgtacctctttgcttctagttgttctgggatttgacatttaccatccaacattagtgaataaattgagtcccaatctgggccaacttttggggtagatgctttacattcatcatctcacttaatttttcacagaaatgtcatgtgtaggtgttattattgtcattacatacaggaggaaactgaggttccaagaggctaaatgaattgccaaatagacacaggaggtcagtggcagaacagagactgtcacccaaagtgatcctattcccagactgcacagaagggcttgttcaatggactttaaagtaggacggaaaaactcagaccttttggagtttatattttagataatcctatcttgagttgatttctgatgatggtggaggaggacgtactcttagctggaagctccatctccttgtagaaaagcgaggacattaacatgtgcctgtcacattgcaccctttaccttaagtagtgctttggttgttctctcatccacccacctcttcatcttcagtgagacatggaatctgcacctggtgattcagtgagcaagaggtaacctgcgatcattcagctttcagctcagttgttcctcaggaatakattccttttctaatttaatggcaaatctgatattatagacacactggctgtgaatgcttgacttggctatacattttgatacagtttttttttttcggtggggaggagctgaccttttaaaaagtaaaatgatgaaagattttagctttctctagcaagtccacgtaattccttctctcagtacttaatgctatatgaatgctaatgtggtgtgatttggaaggcaatgggttwgaaatcaaacagatttgagtttgaatcttagttgtcctgctaaatcagcacgttgccttgagtaagtcacttaaattctttgagcctgagtctccccatctaaaatatggkgatagtatatctttcggaggttttttcctcaggaggcgacatcktggatacaaagtgctttattcctagtaaatgctcaataaatgctacttactcatgggaagaaagatttctctactgggaattaagaattgtgggttataatactggctgtatacaaaaattagatacgtagtcatagcatgttgaaatgttgtagcctcaatttcatcctctgtaaaatggcactaatggactaaaatccattacaggtcaaaactaatttaatactttgttcatacagatactggatacctgctgcatttactaagtaaagtgcactaggagtgttggggatgtagaaatgacataatgacctatacccttgacctgtaagggaacaaaccttttatttcacaaggttcttcctttttcctcagttcatatgcatatctgtttaggggaaatcaagtaatgtgagatcccagcaggccttcatttcaatctgtgcacatgggtttgcagcaaaacatagtttattgggtttattgtattacatcttcatgttaaggaacttgctaactttggaccccccttcccccccaaaaaaatgcctcatgtgaaattggaaagtaaaaatctcttagttatttaatgagattttctagagaacattgacatgaatgttgactgtcagaactacatccacatttttttaaagagagaccttagaagttcataggatagggcaaaaaagcagatacatgaatctcatttatatatgaaaataataattgctcccatttaggagtaattgctatgtgccaaaattatgccaagagccttacgcaaattattgtgtttagttttaattcaacaaatatttattgagctcctaatatttgtcattcactggcatagggatatttgtgaagtgctacacaagatgaaaagaaataattcctgccctcaatgagctctcggtcttgtacccaaagaaacttcttaagagacagcaggagatgtacgttctctgaggacagaacatgctgtaggaagtcaggggagagttgggcatcttctggctgggatggccttcaagctggattgtagagtaggtacttcagasaaaccttgaaatgtagagaagattgtaagtaacagttggagattattacaaggatatttttagctgaatggatgtcataaccaaaggtcaagggaagagatgtaaacattcctctttatatccaggaatttaaattacttgatttaaaaactatgtttaacgaaagttttaaccttaggaatgattgaaaaatatgagttaagcaaaaaatatacacatcaatcttgtagtaaatttgggtacattccaagcccagtaggaaaataaaaacctttatggtcattgagagacatgactgaccttatttgcacattaaatcttagctggagtcatcattgtttcatttttwccttgatactttccacacagagttttcacaaaaggactttcttttgtttaagttattggtgagagagatcactgttcaggctgccttgaggataaattaatttttctccttgccagcttatattcagccactaaatgtatgtaaaatatttgtcctgtttttgtgtatgtcttaattactgtcccttattttgtggctaaaaggtgtagagaaggcacttgtgtctcctggaggggaaactggccaaacagcatctctgcagtggccaaaggggatggcagagaagagatgtgttcattgcgaggtgaggccaggctccataaaagtgcagtggttcctgtcaaggagctcaaactctgctccgattgtacggatggagtaagcaaacagttggcaagaagcaaaggtggaatcttagagtgcaacgtttagaatgaaagaacagagcttatcctagaatgtagataggagtaaaaaaaggacgtggatgctctgtcggaaatcctatgtgagattttacacacatatgaaagatattgtgtctatttctatagcactcctgaatgtttttataccactttagatcagttatagcccttttttctctttgcaaaatgcttcagttttcaaagatcgacacattacttccattacttaaggtattttttctcaccacgattctataagataggaaagacaaatatcatctacactctcagataaaaaaaacaagatgttcctattaagtaggtcagttagtggaagaagaaggtcaaataacatttggtcacactgtaggagtgattcttggtttgacccactgctggcttgccacaggcaagagttagaacacagctgcaccctagccttgtggtttgtctgaagcccrtcacaggcaagagttagaacacagctgctccctagccttgtagtttgtctgaagcccatcacaggcaagagttagaacacagctgcaccctagccttgtagtttgtctgaagcccatgcacctgtatccttaaggttttccattgtgggaagaagagtgaatattggctgtagagctcctgagttccaggttcagcttttcaagttgtttgtcttgggcttcaaaacaaggagcctcatgaaaagtcatgctcttggcattgtttaaaccactgaaattaccttaaagagtgatgatgggaccttctggaagtgaggttcccagtaataacctgtctgccatatgtattccactgctaatagacttcararatgagactactcatgactgggtttattgcaatagcggcttggggtagaagggaggtatagccatctcttcctctctttgattttcttatgcagataaaagctagttaaaaataatattaaaggtggtctcactacgtcttcccatataggaaacctagagtgtcaatcaacattttggagcagcagtagtcaaactgaaggactgcctgttgatgctaatgggttttacttgctcaaggattataactgagttaccagatgtagctttttctacttctaactgttggggtgagagtggaagaagagagcaaaggaaagtttgctgaatatcagggacaactctatctacataagacatattgattatatcagaagtctcctttaacaaaaataatataaataaccaccaatttagtgaacagcttctctggaaatatgatctggaacatcaccacatgatttcacttgattatcacgacacctttatgaactacgtactgttatcctcattctaaagctgtagaagtcaagcttaaacaacttgctcaaggttacccagctagcaggtggcagagctgggatttgatttttgccctttctggaaccaaagctctttgtgctataaatcatgctttgtatgggtttatttttgtataagtttatttttgaatgggtttatttctgagtttctttggaaagaactccacaattcagtgcagatggggtggtaggggagctctttatatgaatgacatatcttggggggtcttcctttcacttcaccccattgtcaggtcactgacactttacttggcaataacccgctccatgatgctgtttgggttgaagccctcacctgtgtccatccccacaagtggcttctgggggttattaatgtgtgtcatcttgttatcctgggaagatgtgtgggatgtgctgtttggtttctccctgctgactaatgaccctacagtgacagtgtgcacaacgtgtacactttttaaagaaagtgctaataagaatcatgttatcagacaaccaactaatcatgttgtgccctggaaccaatagattgacgcctctagtcatctttccctaaccagagtaacaggagctrttgagacacaaaatcatgggccatcaatccttctgctgcagggcctttggtggtttggggccgggtggtggatgggtcggtggggcagattaaaagcgaaagatcttccccttatctcagcaattcccactgtacattcttgattataatcattaaagggaaaaaggctattttgggcacattcagcaccctggtttagaaatttatcatgtgcagccctgctcgccctgacttgcattttgctgaaatggtagaagaattcttaactgggcaggcatgggctcactcataggtgcctggggcagtgtttctcaaagtactgtcctcatgggtcctgcttttgaatgacctgatggggagaagggaccaggcatctatattttacaaactccctaggagattcttgggaacactcaagtttgaaaatcatttccttaagatttgcacatgagtttaagagtccatggacttcttccattgtctgcataattttgtgttaatatgctttaatttttcccatgaagagatgcagtccacagtgtttatcagcttctcaatagaaaccatgaccccctacagtgaagacctattggaatgtaaggctctataaatcacacaggacagtacagtgtagcccaggtgaaatttctgtcattcaatgtatactaaaaaattatcttccatggctgtccacataaccacaatatgtcttaaatggcagaaagtacacatgatttaaaatataatttattgggttaattgccgactctactatccactagatatgtgaacttgtgcaattaactttatctctgtctttagttccctcatctgtaaaatgagggtactaatggtatatttcttatatggtggcttgatgattaacagagatagtataacttcttaacagaaattaacagagataatataacttcttaacggaacatctggcatatactaaatcatcaataagggttagctgttattacagtttcattgatattaatagtgctccagtatggcctattaaaagatgtttgtaatatgacattcatgatgttgtttctgtttctscatttaggttctctcggtccagttctattttcttaaattgaagattggggcactgtcctaaycttcttagcatccctgtcagcaactctagctgtttccacttaatatttgcttactaaatatttccaattttatttgctatttccttgggaaagtgtttttttttcatgtgttgtgaacaacctataactttgtacctgtgtgttgtagaataatgaagtcattaaaaggttgattataaaaacatatatttttaagtgggaaactgtccacaaaataccagaataaaagattacaaaatagtacaaacataaacccattragtcagagtttttgtctatgttgttctctcatatatcccaagtccctagaaatatayctggaggccaggcgtggtggctcacgcctgtaatcccaacactttgggaggctgaggcgggcagatcacttgaggtcaggagtttgaagccagcctggccaacatggagaaaccccatytctattaaaatacaaaaattagccaagtgggtgtctgtagtcccagctacttgggaggctgaggcaggagaattgcttgaacctgggaggtggaggttgcagtgagccaagatggtgccactgcactccagcctaggtgacagagcaagactccatctcaaaaaaaaaaaaaaaaaaaaagaaaagaaaagaaatatactggaaatagtaagggtttgaaacagtttttttcaattattatatactgtaaaattaaacttttgtgggaaaaaaagcaggaaaggwtatgactcaaaatgtttgccagtgataatgatgaatgttaggattctatgcaaggtttcttgtgttcattctttttgtcatttcttaataaatgtgtattgcttgagttatttttaaaagttattttaaaatgaaaataaatgaaagagagagcaaacgagtttgtgaacttggcctcattaaawctgaattccaggcaacaactgtacaagagctcacattcaagttgcctgtttcccttttaatcactattgttgggagacagtctgctgtccaggctttttgcaaaagagcaagatcactctgtctgtttcctgagtatgcagcagcatgtgctaccaggccttttgtttatcatcgcctttgttgattccagagagaatgatccatggtagtttcaccaacctgactatatatcccagaaattccagtgacctccattcacccagytaaacaatatatgtttcagtttaaatctcaatctctgtctttattttggtctccatctgcatatcatataagtacatataaatatatacataataaatatgtgcgctcttatatgtctgtatacattcacagcaacataagcaccaatgtacaacatttaagtctccactcttaaaaacgaaatattagtatcgtaaggccacagtaargatgtttactgattgtgagcactgattggaaagagagctccagaacaaggagagatggaaaaaaaaaacagagagaaggagacagagagacataaataacagatatatggaagacagaaaatgaataagagagagaagaaaagggagagggagaaaatgaaggagggagagggaaggagggagaagggaagagaaagaacataagttcatgacaaaggcagagagagacagaaggaaagccagagagcagaggcagattgagaagaggaagaaaaaggaaagatgagagacaaagagacacggagagaccacaggcaaagaaagtcatattgggagacaaagacagagctgtgatggaggcatataaacaaagcaggagaatcataaaaagagaggaagagatgaaaataaaaggcaaaagtgtcagtgagtgtattagtccattctcatgctgctaataaagacatacccatgactgggtgatttttaaaggaaagaggtttaattgactcacagttcggtgtcgccagtgaggcctccagaaacttacaatcatggcagaaggggaagcaaacagatccttcttcatgtgacagcagaagagagaggtgcagagtgaagtggggggaaagccccttataaaaccatcagatcccatgagagctcactcactattatgagaacagcatggaggtagccactcccatgattcagttacctcccgctaggtcccatgtgtggggtccccatccaggctgcttacatgggctggcattgagtgtctgtagcttttccaaatgcatggaacaagttgtcggtggatctaccattctggggtatggaggatagtggttctcttctcatagctccactagacagtgccccatggggactttgcatggggaccccaaacccacatttcccttctcctctgtcctagcagaggttctccatgagggctccacccctgcagcaaacttctgcstggacatccaggcatttctgtacatcctctgaaatctaggcagaggttcacaaacctcagttcttgtcttctgcacacccacagggctaacaccatgtgaaagctgccaaggcttagggtttgcactctctgaagcaatggcctgwgctgtacattggcctcttttagccacagctggagctgaagcagctgggatgcagggcaccatatcctgaggctgcacagagcagtgggttctgggcctggtccactaaagcatttttccctcctaggcctctgggtctgtgatggaagggcctgctgtgaaggtctctgacatgccctggagacatttttcccattgtctttgtgattaacatttggctccttgttacttatgccactttctccagcaagcttgaatttctccccccagaatttctctgctccctcttgaatgctttgccacttagaaatttcttccaccagataccctaaatcatttaactcaagttcaaagtttcacagatgtctagggcaggggcaaaatgccaccagtctctttgcatagcaagaatgatatggtttggctgtgtctccacccaaatctccactagaattgtatctcccagaattcccacttgttgtgggagggacctagggtgaggtaatggaatcatgggggttggtctttcctgtgctattctcgtcatagttaataagtctcatgggatctgatgggtttatcaggggtatccacttttgcttcttcctcattttctctcgctgccaccaaaaatgccttttacctcccaccatcattctgagatctccccagccatgtggaactgtaagtccaattaaacctctttttcttcccagtctcaggtatgtctttatcagcagcatgaaaacagactaatacaaagagtgacctttactccagtttgcaacaagtttgtcatctctatctgagatcacctcagactgggcttcattgtccatgtcactatcagcattttggttaaagccattcaactagtttataggaagttccaaattttcccacaccatcctgtctctgagccctccaattctctaggaagctccaaacttccccagattttcctgtcttcttctgagccttccaattctctagaagttccagactttctaacatcctcctgtcttcttctgagccctccaaactgttccagcctctgcctgctacccagttccaaagttgtttccacatttttgggtatctttacagcagtgccccactactcagtactaatttactgtgttggttcattctcatgctgctaataaagatatacccgggactgggcaatttataaaggaaagaggtttaattgactcacagttcagcatggctggggaggcctcacgaaacttacaatcatggctgaagggaatgcaaacacctccttcttcacatggcagcaggggagagaagtgtagagtgaagacggggaaaagccccttgtaaaaccatcagttctcgtgagaactcactatcacaagaacagcatggaggtaactgctcccatggttcagttttctcccaccagttccctcccatggcacgtggggattatgtgaactacaattgaagatgagatttggatggagacacagccaaaccatatcagtgagtgagaagaacttataatcaartcaagggcatagaagaactggtcctaagaagacggtgcccttccaaaagcacagtgcttcacttgccttttgctttgagtgattttgcacccaaccatgtcagatggttagcacaggtagccactcttgcatgtgtgatggctttgaagccatatgttcatcagatgggtgtggagtggaaggggttcatgtagtatttatgcattattaagaatctcttaagagtgattttgttttggaagtcggactgatgttctgaatggtggaaagacaacttttaacctttccttttataccagttatgctgttctgaatttttagcatgggcatgcgtttctttaataataaaaatactaaaacatgtttgaagtggctgttgtgtcagcactgtgctgagcgctgggaatacaaagatgaataagatctgatctttacccttaagggtgcatattctggtggaaatagacccataaacaataaattgcaatttactgtgataagtgcataatagccataatagagttttgtgcaaagtgctatgggagcaaagatgactgggggacacctaattttgcctgagtgggaggtaaggttttaaagggaagtgacatttaagctgggtctttatacaagattaaaaattttgcagacagaatagggcggggtaggagaaaaggccattagtgcctgtttttaattcttcatatcttgggtcttgggttsatcttaggttgttagcacaatcaccaagctgtgactggttgaacactttcttcattgtctcaatgtctaagatatttggaaccaaggctaacagtgttttaaaatatcagattagattccacatcttagaatgttgtgttcttgtcctcaaactggacaaaggaatctgattttctcagagataaattgctcccctaaatcttcacccaaccaacacacacaatcaagaatgcgcatgcacgtgcacrtacacaaaaccattttaaagcatcactatcttctctcttcacagttaaatctgattagcacaatggtgatgggatttttttattggttattctgtatgtttctgcttttagagccttaacagtggttgtttttggtattttcttggacatgcttctcaaatcagtattagatacaagtatattgggatgaatcggatggttaccacgtatgattaaagcgcgatttttttttacagcagtaagaaaatgcaatasaatattccactccagtgttatccaaacttagttatgccttgccaactggagacagtgtatgtacgctaaatacatggaaatgtcccagaaagcaaagttagcttttaattggttggccctttccgttcttcttgtctaccttctaaataaaagaaaaaaagaacagaaaggatgaaactggggcggaaatgtatgtatagtcagagacagagggagctgtgctctcagggctggcttaccagccagtgagtagttgaagagataccttcgtggtctttcagttcccttctttccttgcacgtaagtctcagcagactgctgtttgagatgatgttacaaggtcccgatctggttttagggtgttgtgactttagaaatttttgcctagcattttttgctaggtagtagagaatcagtttaggaatttcattattttaagacaaaaattaggtaagaaagagcttttcagcagatcccaaatatgccctgagacaaataaatgactatccccagagagtaggaattagctcccttccaatcacctaagccttggtttaatgccctctatgaaagtctccttgatgttcatttggttagattaaaatcttagggcagggagaagggaaaattatatttgccttaaaagctcaccaactttataagtaccctagtacctcttactcaacttaaatccaggtattgaaaatatctttaaagaaacctttgcattccccattagagggaaagacataatttatctkttgttgcaggtaggatttgaggtaatttacacaggggtggccaaattttagcccatgggctatatctgtcctaccacctgttttttatggcccacaagccaaagatggttactacctttttaagtgactggaaaatctaaagaatggtatttcatgacatgtgaaaattatttgatataaaatcttaytggaacatggccacactcattcattgacatattgtctatggctgctttcctgctacaacaacaaagttgaatagttgtgacagagaccgtatagctcacaaacctaaaatatttactctgtgaccctttacaggaacgtttgccaaggcctgatttaggagattggagagaatgtaagcagtgaggcacagtaaaggtcctgtggttgtcatctgcatgccaacttgagagtgttttttggacccttggttttcctggctcaaaggcatacacactcctaaccattgtagacttccagtcacaaagtggatcatttattttccgtccctgcccctttgctcaagctgcctaaaactttactgcctctgtttaaaaactcaatctgccatgtctgtgtccacttaaatcctttccattatttaagtcctcatttggatatcacctcctktctgamgatttctccaacactttcaagaagaagggaagcctgaatatcatgaagaaaatatctgatcttatgtgccgggtcactctctgtatgtctccctccaagcactaagcatcatctagtgtgtgctccaattaatagtgagtttctcaagggcaaggcttcatttcatttatttttatatgccagtatttggcacataggtggtttgcaataagcatatttttcaggacactaaagcaatatagaatctttttatttacctctcttggtatagaagataaatggtcagcattgatataccataaagaaagtctgcctggatagttttcactatcctgattcttgaagtataatctgtctgagttgtctcatccaaattgttctacaaaagtggccaaaaatgagacacaggaagagagaggggagagagaaagagagacagagagacagagagagagagaaagaagcgtagattcagatcaaatcagatgcattggaggcaacagctcccttgtggcagggagggtaggggtgcactttgataaagcatgctgctccagtggrtaggatgggctgatggctgtctagtcagggctagcactgccaaaggcctgagggagaaaatagcttcctgctcttcatttaaggagctgaactgagaaccagcgcccatgttgcaaagtctcagcagggcaagaacgtttgaaaamtgacgaggacatattgcattatgagaaggataaaattgcatttgtgataatggactgacctaagagcactgtgccaataagaaaaagaattgtaggttaaacttacgttttctttcaggcacatttacctgaaggggtaaattgagagttgctggggttatcaattaagttggggtatgatagaatttcaattaaatgtaggtaaggacttaggggttgggtgatagttaatataataataactaatacttactgggtttttactatgtgccaggcactatttgaggggaaacacatatctgcaacaataggaagtaggtactgttattattcgctagacatgagtacaaggaattgtactattcccagtacaataggaagtagtcacaatcattattctctaaattaaagtctagttaagctacttaacctagggtgagaggttaagtaactcacccaaggtcacatagaaagcagatggtagaattgggagttgtraagttggggtctaaaaacaccagacagtttagaccccatgcagttggggtctgaaaagctcagctcttaaccactatattctactgcgtttaggacgctatgacatatcatcttcaagtagcctcaagtttttcctgtatttagtgattgttaattggatacctggtgtatacctgacakacascaggtgctggggatttattcatgatgaaaaccagtcatagcctcgatcctccataagctaagagcatggggcatccactcacgttctgtagtctttgagacgttatgatccaggattcttttcgggaagtagacttttcaaaacccccaaagctaactcattcgttaggagttaattgaaaacatttagaggaaacattttttgaaatcagatgaacatttttaggcaataggtggagtgctggttgtcatggtttaaataccgtaaaaaatgcatttacagaaatctgtatctaaagagacaaacgcttaggattctccttatcatggacattggtgagttgtatttgtgtgtgtgggtgtatgtgatggacatttatacagacacacatgtatctgcttctgcttctacatctatatcataagctatacttatacctgaaactggataatctcattcagtgtctctgctttgtcttcaaattttgaggcaaattctgttatataaggatgcaataaaactgtggagctacttccctgtgaaaaccaggatgcttgccccagtggtatgattaaacaaaaaatttatgtgtacatracaaaatgatgaaattgtgtaaagttcagtaatagtgaaataaggcactgacttaaaaatagagctaaaatgatagtcattttgcaaataatttgggctcctttctttttataataatttcttctctcacctggaaaaygcttctctctatttaaaagttgtcctcttttctcccaaatcagaaactgttttagttagattgtgtgtgtgcacttgctaacttgctgtatttcaccctaacatttaagttgcctgaattcaattggaacaaaatttgaattgtctgaccttgatttattattaaaacttccctgtagccaacttgtttgtatttttaatggactttattatttttagacctgcttaaattttatttatgctcaattgttttcaaaatcatgagtttataattctattttatttctttcttaaaacacttggtgcacgtgggtaaattttcctgcacagtgatttagagtaggacagactttcttaaaatgcagtatttggaccaccatcaagaaagaaaaccaggataataaatggtttttgcatcttttagacaaaaccatttttgtaatctgccagtctgggatgactgacgaaatgtttccttcccagaagttgctggtcttctggcctttctccaggctcctcattttcttcttttggtcatttaattcagtcacattcgctttttctagaattcctggtagtttaacaaacttgtaccatcaggaaatgccaaatatgtttgcccaagactttcctaccaaacactctgctttattcattgcttgccccatctcatctcccactaccacccacattggtgtttatcacgttgtttgctgatggacataagcagagaaatataaatgcttttacacctccccctgcatccactggaagatagagattattgccaccttgttgaagagggagatagattaaatagcaccatgcatcctgatggcttaattctttaaaagagacactgtagaaagccttggtatattgacgtaactattcttttttttcccctttttaacagcgtgatgtggatatttgtcacacatatacccttataatcctgtaaaaaatgcaggcaagtgacggaatgcaaaatgtctctctgtctctatcgtgatgctgtcatttctcaaaattgtgaccactcttatattgataggttctagcaaagctgtgccgaagggggagaggaatgtcaaggagttcagcaggtggagctgttccctatgagacagtgctgaacctggctcttcagctggggttcagctgctcactacggagtgcccaatatggcaaggccatgggctcttgtttgtttggcagaggccagctagctgcagagtcatgctctttctttaaacccaggtggtgttccacagggatatgccttgtatatgatgagatgtgagagttgtgtgcctagctctgtggctgaccattttgatatcaggcacatcatctgtggtcagcaaagagttacaggaggaaggaaagggtaatagttaaaaatatggatgcatgtgcccaacagttttgagttttgtttactaattcttcatctttgttttagtattattaaccctatcatgtgcttaactttctggtagggctaagaacacagaaatagtcctcctctcaagtagttcaaagtctaaggggagaattaaatagttgaaatataatttggtatgtgcaaaggaggagaatctagccaaatgggagtggagtaaggtgagggtatcagcaaaggttttgaagaagatatcacatatgatgtttctggcaaatataaaagataaataggattttccagatgaaaacatgagacaagcaagctctaaggggaaggataagcatgtgtggcccctcagagcacaaaagggaacagcccatgaaaggaagggagaatacagagcggaagatgggatgggagatgaggctggagagaaaaactggcatcttacraaaaagggccttgcaaactagattgaaagagtttggggctgggcgcagtggctcatacctgtaatcccagcacattaggaggctgasgtgagtggattgcttgagaccagcagcctgggtaatatggtgaaacctcatctctacaaaaaaaataggaaaattaggccgggcgtggtggctcacacccataatcccagcactttgggaggccaaggcgggcagatcacgaggtcaggaggtcaagactagcctgatcaacatgctgaaaccccatctctactaaaaatacagaaaaaatagcctggtgtggtggcgcgtgcctgtaatcccagctactcaggaggctgaggcaggagaatcgcttgaacccaggaggcagaggttgcagtgagcagagatctagccactacactccagcctgggtgacagagggagattccatctcaaaaagaaaaagaaaagaaaagaagaattagctgggtgtggaggtgtgcgtctgtagtcccagctacttgggaggctgaggtgggaggatggcttgagccctggaggtgtaagttgcagyragccaacatcgtgccactgcagtccagcctgtgcgayagagccagaccctgactcaaaaacaaaaacaacaaaacaaaataagagattggactttattgtgaatgtataaaggagtgacataatcagcattttagtttggaagaaaagcatatatagcaaaaataaattgtatgggtgaaacatagaaaaaagggagaccagttgcaaagctacttgtaggagtaattcatccattgaactcattttcagggcattgtgtgagtgcctgaccrtggataccgatggtacttgtgatttttacacctactttctcaagataacactatagagggcagggccagtgcacacagtctgtcacaaaatgtgtatgatcaagagtgatgtgatatcctttgtctgttatatactacttcatcctttgcttctggaggtataacatatgtgaccttagcaattttagaaactacatacagggaggcctgtgctaggagtcaggacacgttggtcttggccccagttccaycacaaatttcctgtgtatttaatgatagtaattttagttctctggcttatttccttcatttcaraatgagaatgccagactggacaataaccaaggccttatctgttccataaccctgtcagtgtcaccctacctatgatctagtgatgatggcattgaagaagagctgggagaagaaccrcaggtgaaactggacattagactgaagtactaatgattgagagggatttctaggaatagaaagtatgcatttgagccatactaagacattttaatatagaccagtgcacaaataaaatatataaatttagactgtggataaatcttctgagtgtgatgtttaataaatactcaaagtgaatactaagtagctttaaggaatagaggacatttactttcttcatcactatgcctaacacagtgcctttctcacactagtacttgagaagtgtcatttaacgaagaggatttaaaacattttggagtgtagttgaacacttagggaagaagaacacttgtggttttagctgcttcttgcagcgcgggttctctgtgccacaaaatccaagctccccaccacaagctggcgtttgtaaaaatcagtcactagtaggaactctgctagaatctgcatctcctgggcacacattttaatatcatttcctcctcgcaaacctctgccaaaggctgcacttggaaaccacaagtaaatggagaatggcccctgggaagtagcaaataagagggccaagccagggtccatttccctagaattgaataggaaagccatgggagattaaagtgattaaattgcttggggaggataattcaaggtgccccaatctcttttcctcctccactttatcttcccactccttagaatgaaggagattcaggtgtgttttaaattgccaagaactgctttcccatagcactgcaagtctaggagaaggaattagactattttacaagaaggtgaatgctggtgtttttgattgtgcaatattcagtgaagtgaagggatggtgccacagacagaaaatcactctgctgcctcagcatagttccctgtgtgcaggacatactgctgggactgtgctgggggaagctcctgagtgcaacaggaagccaggcatctagggagtcatgatcaaaggcacaaactcctccttgttacaggcagcctttaaaatagacccaattagggccttaactggaaacccaagggattcctctgccccatgcccgttaccactgcactctgcgtgggacttctgcatacacacagactaggaacagtaataataacttctttttattacatgataatgagccaggaacaattttgagccagtgatctgagcactgccccagagcaagtctgtgttacataactactacctttttgaaaaatagtccaataatccccaytgggctcactgcatacttcctcagcttggagaatatgaacaatgttaacaataggctctggaaggaaatgctgaagtttatgttattagatggaggagacaataataattttaatttgtttcagtattaaataatgtgtgtgtgcccctcccctccattgagttcctctctacaaaagtagccaagataaaacttagcccagggggttgcttagtccagaatcttatgaactctacttgagtgcacatgggtttttgccagacacctttcattccttgcttttccaccagtctgattttggtaaytgagtgtagttaacatgggtcgcttacgaagaagaaagatctctgaggtcatcttctccagtgtcctcattttacagatgagaaatctgaggactgtagagactgaactaaatatgctgtgaaggacttcagagtgtggatgcccttgcttttcataaagggttcaaaacactgtcagtgtaatgtggtagttgaagactgggtttgaattcctggttctgccgtttaccagtcgggaaatattggactggtcatttaatttttccaagatcatttcatcattcataaaatgaaactaatattgtgaccactaacagggttaacttgagtattacaagagatcatgcatgtaaagcattttgtccaatgctcagccagaattaccatgtgtgttatatgttgggatatcgaatgatgtcttgagacaatagagctatagatgtcttgaaagcaatttcttatgggactatgtataggtatatacaagaatatatatacataatattagctattttatcacaatggttggtaagacagctggccttcataatgtaagaattttctactaaaggcaggttgtagaatgcatttcacttaaaaaacattataggcattcacagtaaacgtggaattttagctcagtctgtgacaacatgggccaataagaacaaatgtttgttcatttgtttgaaaactcaacatttacaagtcagccacaaagaagcaaaccacaaaaatgatattgtggaattattgctgacaataaaactgcacatgtcatgaaattagaagtttgaattttaacaacttttaacatagcatacttctagaagtctttgaagccctgtattgctggaatcagtatgtaagaattattgtgatgttgtggtaaactcaacttcatagattctgcaagsaaagtttggtggctgaaacttgagatatttaatgtgtgttcacataaacataaatatacatgtattttctttttgaatggtagataacagaaaaacatgactggctgtgaggtcaagatggagattattttattactggatttaatttgaatgctgttgcagtgttagctttgccctgatgaaggagtggaatatcatgctttagataatcactggaggcccatgaacctgggtttgagttttctccactttttgctagccaggtgacttcaaagaaattacttaaacactctacatctcaatttcaccaaaggcaaaacgggactgatgctagcaaccccataggagtgtggtgaggacatacgtgaagcacttagtgtttggccaggtgcatggagctgctgaatatgatccagttattagccatgtctgggttattaatatcatgtgttggtcattccaggtttttcggaaaggactgcaatcactataaatagttcagtgaagagcttgccaaaagactagatgatatggtttggcatatggagagcatcatagcagccatttggtgatgaaactgcgtcatgtatttgggcttcaccaatctctactgattgtgtatatgtgtcagggcctgactatacctttgagaatctgctgtctgttttttcccctctgtctttccttttctctttctctccctctctctcttcccaatctctctggcatcccctagaatttgctaggagctcactgcagtcaccaattgattgcaggaccagatcacagggtctaggtggcagtgtctttatttcatttagaaagcttttagatagataaatagtaatagaaattgcattttgtcttgactttttttttcttcagagtttccaaataagccaatcttatatcaacatggctaaaactaagtgcacaactctgcctattactagcttggttccagtttttaaaaagtgtgtttctggctttccaagactagtgacttatcctcttttctacctgcaatttctttttaaagaaagaatatccagaagatttaagcaaatgggaatttaattcatcagatttaatcttattttcatgcttagattcatagctttaatctgtaaacaagcacatcattagggagataggtaattacacaaattagattggagaaactttgccaggggagatggattttgtttaccctcatttggttggcaccagaggaatttctcacacaaaactccatcttacgtggctagagaagaggaaaagagtgaaaagtctaggaaaggaatatgtttgtccctgggrtgaaatatcttgaagcaacgaacatttgttccagcctgctcgtgggggtcagtctgcagtgagggacagcggaaagtatggaccgcgtagaggcactgaggcttcacttacccaggggcctggcacatacatttttttyctcaaaatatgttatttggcttcagtgagaaatctcctaaaattttaagatgtactctacacatgaagtgcacttatgaacaattaaattgccttgaaaatctttactcttaaaaataatttctaagcctgaaagaagatattttgtcctcaaagtgtgaataatctacatgagaaataaaatgtaaatgtgaactgatgtctctgtctgcctatcttaracgaagaatgggtaaaagattgatgagtggtgtagaccatcaaccctgggcacagtttactggaaggtaggattactgagggttggagcaagcaaggaaaaataggaggggaaaaactgtgtatgaaaaggatgcagtaagaaaacacattctctttggacagatagatcctcgtaaagaataataaacaacgaatctgcaaagatagttcagatcctagtcaccaagtattgtctttctcttatgtacaggtggggagccagtaaatattttaagtaaagaatgaactaaggaaagtcacatgaaaataagaatggttagtcatgaaattcagaaaggatttaaggggtggagagatcatttaggagatagaggattcattcttttatttaaaaaaaaattaattgaccacctattatgtgstagtcaccataccatttgcagaaatgaaaatataagagaaattattttggctgtgattattgtgataataatggaaatttttccactcaataactcatttaacacatatagaaggcttattatatttcaggaacgtaataggtgtcagagatcctgtaatgaacagaatacacatggcttctgccttcatggaacttggaattgagtagttaaaaaagcgtataaaattaacagtattgaattttttttttttttttttgagacggagtttcgctcttgttgcccaggctggagtgcaatggcatgatcttggctcgctgcaacctctgcctcctgggttcaagcgattctcctgcctcagcctcccaagtagctgggattacaggcatgtgccaccaggcccagctaattttgtgtttttagtagagatggcgtttctccatgttggtcagactggtctcgaactctcgacctcaggtgatctgcccgcctcaacctcscaaagtgttgagattacaggcggagccaccacacctggcctcatgctcccaatggtgcatacttgagtagttttcagttttgggacagatawttttgctatgaatattcttgtaactgacactattgcagaacttttgatacattctagtacatatggaggggatgtaggctagtctggcaggacagtaaaaataaattcagggagttgaaatttgagttgtcggggatggaggatgcagagtctggtcagaaagaatggtatactatatgctgacatccaggacaggatgagattagattaaagtgttcctctaggtcaaaaaagactgggacccagtaggatcagtacagttggcctcggaatgctctggcacctgtgtcatccagtgcctacataacacccaaggttggcttcatcctctgccattcctacttctcagcattctctagtgcctggcttccaggctggaggaatgatggctgtgtcagcaggctggtagctacattaagggatacccttatgggaaccaagagttaaagggcccatggggagccttacgaccacagagccccagattcttctgttggtgaaacatttcctttccaaaatggaacactggacaagattttatctagagtaggggctagactgtggccttacatctgtagaagatagagtgatttgaggggaatttgttcccagatagagttaggtggagctgactggtcctctcaaatttgcaaaaggaagcaggggacggaggggagttctggtggagtgcagggaggctgtcagtgtagaccgaattagctacgaatgtgaaaccggagatcacatagcgtgtgcttgaaacctggtactcctgcttactagctgggtgatcttggccatgatgtttcacctccctgtgcctccattctcatatttaacctggacttaataatcaatgtggttatgaagatcaaatgatatatgtgaggcagttaaaacagcatctgctgtacctaagcactttgcaagtgttggatattattgttaattcggcctctcacttaccagttgtgactttggacaagtcattttccctctctaagccttgttttttttctgcactgaaactctgaggtctccaagaccctttactactgcagcaaacccactgttttcaagctttgatggctatgcaatctgaacatgatgcattgtgtttttgttgtaggctatgtggaacccataacttggctcaggaaagtaaagacttattgtttgagctccgttctctcattctttttggtttttaggatttcagaaggtcacttgtatgaagaaagccaggacttttgtcctctcccctgcatatgggttccagagtcactcctgtgaaaagtctttggtgaaaaacgtcctcctaagttttgcgtaaatggatttctcaatgttgcctccttgattttaagttatcttttcttttcatcctttttttcttccccaattttttttttctacaactgcactctttactactaaacaagggccaccttttcctttcatcttgatggacaatttaaaagaaaaaccagaggttatttatttgaaaacaggatcatagcaagaggtgggaaagaatgagagagagatcaggggctgctttcagttgctataacaaccatatgtaatatctgtattttcttccctctttgcttttagtagcttctctaatctgtcttctggcttttgattctagaaatcacctgggattattttatgaaaggacatgtgattttaataatactttaaaaaagaaacataaacccaacaatggctgtctggtattgtgggtctcctactggccaggcactttactgggtatttaatatatgtcgtttcattataatattctctttcttctacaaaattgtagagaataatgcttggacgtaattgctttctggacaatacggtgttaatcagatacactgatagctggagccattaggaaacttccaatgtatattctatatcagagcttctataaggagcacccttctggattggcaggtgctggttaaggaggatagtttgatcaatgccctttcatgatttttccagcaacttgtgtttatttgatacaattaaagttacgtttggtgacataattgtctgggtatattttttctttgttgaggggaattctgatctatgtgtatgatacttttgcctctttaatgcttaatgagaagaggatatcagccatttttatacttcagtgcatttaattttgcatgtactatgtgcaaagcactgtgctcagtgccatctgggaaagtaaatatagtcttcagccttctggacttcatatttcaataggggagagaggcacatatgtgaataatgcaaataattttccaattgttttagaaaggacataaaatcattaaaagaaactaatgatcttaccataataaattatttaccataacgaataattacccatgtatttgttctttcccacagtccccttttgattatttgaattaaatttcaaatttgaaaaacatttaggaagctcctattatgtgttaggccctgtgttcagacaggacagatcctcacccacatggagtttatgggaaagatgtatttgtacatatttacctgcagaaaagcatgagtgtcattcccacagcacctttttctcctttccaaatctcttccttgtgtgtttcttatcacaggcaaagccatggccactcaactaagggcccaggacatcatctgagcaacgagagttaagtttttgaaagatgcatttgattgttgtactcccattaaaatccttccgggttccctatagtgtatctggaacgataatgacttttcctctgctgacttgtccgatttctcatcccaccccaacccttacattgtggtccagttacactaagctactgtggaatgatggaatataagtctttttttttgagatggagtctyggtctgatgcccaggctggagtgcagtggcrcgatctcggctcactgcaacctccgcctcccaggttcaagccattctcctgcctcagcctcccaagtagctgggactataggcacgtgccaccacgtccagataatttttttgtatttttagtagagacagggtctcaccrtgttagccaggatggtctcgatctcctgacctcgtgatccatccgccttggcctcccaaagttctgggattacaggcttgagccaccgcgcctggccgatggaatgtaaatcttaaattattcacttyagttagaggtagaaagaagggaggctggtcagtaggagttaaaagcgtaaagtttaaaaagttgtgaaatatttgcagtaaaatgrtagttacttcttgatggaattaattgtggccacataattccttttttccttcctgacatcagtttctaactccccctggtccccaacctattagagtgaaagtatgccagttacttttcccagggccaggaagaccctctgactcctttattgtcaccactactactagcactgctactactactagtagtaataatagcaacagtagcagtgcatagggagagaattctgactcacacagaaatgtcagcaatttgtggcaaagtttgttggaagctrtagttctgcatatgttttcttcgttcagcagtcttttgacacagtgtaaaggactgcttgagtaagctatttatgtttgttagacagacagaaaagacagaagaaaatctaaagttgaaagctggggatctgttggacttccattcatttcacrgatacagctagatttgtttttggttggcacatttctaaagttstgaatgttagaaaactgcaacagttgtctccaagtgccagcagttacatacatgcaccaaggctggtgaaacagacacaagggaagaaagtaagaaatgcaatgaggctgaattgtgggttcttcccacaaaggccttccagcagcctgggtttctaactcctgtaaaaacatcttctgtacctgatgttggaactcagaaaatgatacccccaaatgtactgcttcagcacactgagtactctgaaataaaggatattgaaaggcttcagaaatagcctcaaaatcaaggtctttctgaccttctccggcaytctacccttccctcctgaaacacaggagggactttctctgaagttcccttatctaagtaagggaagttttttctgcagaaggaatgcagttgycttgagccccctccctataatatcaatcaaaagattagctcactggaaaggagaccaaaggtccatggatcctgttcttctgaggactgctgcctaaaaagctgtatccacccaaaaagacaaccttygttcacagtgcagttcctcccctcaccttctcatagtttctctgcaggagccttcaagctcctatttattcctgtagttcaaaattctatttaarattcaaccaatctggcctttctttgaatctcttattttgtcagactctgtgaatatgaatgtaataaatttgtacgtcttttctcctgtctagtttattccagaggctgaaccttcagcgggtgtaaggaaagttccctttgtccccacactgataagggggacgaaacaaaattgctctgactcttccaaaagtgtgattgttgtttcaaaggaagggaaaagcttgtgtgtatgttgagttagttgtacaaggtctcgttttttwtttwttwttatttttgaaatatatgagaagggtaatagcagaaatatggttatacacatagagtaacaacggggctgttgaacgtggtaatcttagtgaatctggttaatgctttaacaaacagacaataatcacaatcagcacatcgattgtttgaatggaactaggcacggaagtgctgcttaaaatagtgtgttgattttcacataaagtaggccaaattctctatgtttacagtattaatttgcttagccagccctttatttcattgacagtacggagataaacttcagcccagctgtgactgaattatcgaatcaagaaacaagtatttgttgtctactgttagcgtgctaaagattgcttgccaccatgatgggtacatggtacaaataacatcataactccagttttcaaggagcttgagtctagaactaaggaactactaatttgaaaattaagtgctatgttgtgtaaattaacatatggcaccggaattaagagcagaatgggtgggatagtgctaaacaagaggggctctcactgaatttttaagaataggtgggtttggataggaaaaatgtgaaattgtctattcatagctaaagcttgggtataggaataaataatgggattgcctggagtttataaaacctgactgtcttgaggaggtaaggatgatgggtgggaaagatgagagaaaagagaaagaagaggggaaagggagagagggtgagagagagagaaattgacctgtattcgatgcctttaaatgctaggcaaaagagaattatctataarttcttacttagttgagtctgagaagtttaactttctaggttttactttgctactttcttckcaaagaargaaacattgatggaaaacaaattttctatttttcagccaacagcagtggttcattgttggacggaggctaagggcagtggacaagaaagaagtggaaagaaaggaagataagatttttcccacctatcattgtgcctcggctgctcagtctgtaaagtggattgacgataactcagtcacagaggatttttgtcacagaggattttcatgatagcatcctctgtgtagcagactctgcctagcattattctcaagtataaaagaaagagacttttgtttttgagacagtcttgctttgtggcccaggctggagtgccatgatgtgatctaggctcatggtaacctctacctcccgggttcaagagattcttgtgcctcttgagtagctgggactaaaggcacctgccaccacacccggctaatttttgtatttttggtagagatgggggggttcgccatgttggccaggctggtctcaaattcctcacctcaggtaatccacccaccttggcctcccaaagtgctgggattaaaggcgtgagccactgcatcgggccaaaagagagaggctttcatccaaaatgctgcaacatccaagagatggtctgcagctagactgtgggaacagcagtttttgagggaggctctatagttgatagattagttttagaaaaaagaggtaagacttggaggagcaggagttgggtcagaggataaggcagaaatgtgatgtgaaagatctaagtcagagacctgggaagaggacatgccaataataatgtctgtgtcaacaccaggggacaaacattaaaagaaatacaaaagaagcccaaatgcaagaatgctcagaactaaggacaggtactataaagagcaggagagtgtatataggacctggacacctacacgtggtgtttgcaacaaggaggctttgaaaagtgagttcaaattctagcctttatcacttctatgagttatacagaataggcaaatttaattgtaaagacagaagaaagtagactagaagttactgggggattgggagggaggaacgtggagttattgcttaatggctccagtgtttctgtttggggatgatggaaacattctggaaatagatggtggtgatggttacacaacattttgaaggtacttaccgcaactggattgtacattgaaaaatggttaagatagtaaatttcatttatgtattttttaattccaattaaaagagtaatctaggattaaaaaaaaaaaaagaaaactttctgcgaggaaggagctctggggtccagagtccatagggaaatctgttcaccttcaggtaggrtaagggccaaagtgggaacaaaagatgttagattctaagtcgaaagactttacatttttgtgctcccatccattgcctgtctgctgcacagaagctcttgtcagccatgtgaggccgttgttacgatgttgaactccttttacaactctaaataagttgctcccagcctttgctcttctggatagattttggaaagtttttgattaatcatttaatacctggtttacctctcaaaattatttaacatctgttactgctttagcaatatgttttctactttaaaactattataagtatgaagcttgattttgagaaatgttgattatttgttgctctgcagtttgtaactgtatagcagagtccacttgttccttctgtaaataaaagtagccataagatgagaaacctattttttttaaattttcctctgcttctacataaggacactagagtgactaggttattcagattgtctcattattggtggtttgactgagaaagtttgggttctcttaactcacaatgaagtcttaaaattaggattggaagacagcgattccctccagttggatggtcctttattgcatgtgaaacattttttcttccttgatagtttgttctttttccctagaatatatagaaaacttggacatattgaagacattatyaagtctgctcaagttagatgaggtggatcctctgtaakgcagagcaacatgatttcattcctaatggataaacatacatcaacaagcacagaaactcccacttgagcaaagcaaagcttttgtgaagttaaggaaatgatcaatggtctctcacacagaatccagcaatagcaatagagtgagtgatggggtaactaaaatcaataagtaaaaagagatttcatccaagccatcaaagaagttattaggggcactgagaaaggagaattagaagagcagttgaaaagggtcttaaagatcttcctttgaagaggtttgtttcgaagaagcctttggaatgtaagatgacaagaacacactcccattttcaagttaaatgacaaattgggaagagtgggtaaaatttaaaacttaaattatgctcgtgtgaaatattttcctaattaagacattaaaccgtctccacctggtttctccctaatgaacaaaggcaattatgttattgttcaggctcatgtgcagcctttgataacaacagagttatttgaacattcttttttctcccttctttttatgccagtgagcaattgagcccaatcattgtatttctcttaacgttgaaggaactggcagctctcgcttgagcctgatggatttattctatgttctttcgtcccacggcaactaaattctagttaaatttatttttgaacaaaggtagtcagcctccaagagattctcttttaaatgaatgacagcagacagttccaagaccattcatttgcttatatmtatttgctgtatctagacagctattatcatgcatgtggtacttcagaacaatttcacccagtctgctgtcaatagcaaccagctgaagaagcctgctccagcaagacttgtacttggtgtcttgaatctgaacggaaacttttgttattgccttgatatttgtacgagtttgtgctcagggactggtgttgagaaagagcatccttttttgcaaataatttattggtttaaaaggacttcagatgtgcattatatgtttttaggcagacctcttattaagaagtttgcagaatttaatgtatttttatcagagtctcatcaccaggaatagtggcacgacctgggagtaagacccaggacaccttattggagattgagatcatagctaaagggcagtggggagaaatgccaaagaattgatgttaatcaacatcacgcatcagcattatgaagcaaggagaaaatagaagaagtgctccatctccacgataaaggggtattaggattaatgaagtcccagctaggaaaatgttccttaaggaactaatggtagcagttcttcagcagttccctatgctgtggttcaggtgtgtgtttgagtgtttttgctaagcacattccatgggtttgtttcattatatttaatcatcacaaagtactgttgttacttccattttagaaatgagaaaacgagttcagacacttatccaaagccaaccagctggtaaatgacagtgatgggatcaaacacttacaggactgatgatttcaaaatctagactctattgccccttctgcctttcctccttgcccagcgactgtgaaaggtcactcttgagatttgcaacttccctaactgtgagagcaagatgggacatcatgcaacccgatgttgtgttcacccaaagtacactttaatctcttgtttcttttgtgtaaattctttctcatgaagaacatgatttaggcttagtttatttttttctggaagaagggcttatgtttatctggagaaaaggattacttaaatttcctaagtagaaatggaagtgctatggaatttgtttcctgcctatgaagattgtaagaccttatacttatattgaagagtgtacaagtagtaagtggaaatactggaaggaaaataaaataatgtgttgagatcctcctgagttccagtccctttcatagctattttgcagaaatacttgtattctatctgtgaaatagctgaaatcactataagtgtgaccaatttacaatgaagaatctgaggttccaagatgatacattactggccaaagttcacacagctagtaaaggaaagagataagttttaaagccaggtatgcctgactcaaaaaccagcctttattgccacattcactccattctctcagtttgcctcacattcagaggtggaggtgggccctacctaccaggtggaagaaatctggtaaggctgtgtgcctttgaacaatgccagatggaaaggcagcctttgagcatgagggcagaaggggaaagctgtctatgcaggatggaagcacaagtgaggtgatgcaaaatcagaaaaggcgtgagatgttcacagaggacttgactagagccaattgtttgtttaagttcctctgctatcttcaggaacatgatcccatttccctgctgtcctaagaattaaccaaatcatagacaaagttatgcctgtggggaagatgcacaaaaaggatgcaagaatacttaagaaaatgaacagaaagacatgccaatgacatagaatcaccaatacacaacatgtattctaaggaaatcaaagtagtggaggagtccagacctatggaggcccaaacagatatatcctggaaaattggaatttcaactatggtgctgaaagtaagggagctatattcaagcagaagtgcattcattggttccaggcacataagaataagaaatgccccaaatgacagcatagaatcctgaatcagttagttttcatctagaatctctcttacctaatggcaagatctagctctttatcagcaaacctccttgaaaagccaatgtaacatgagcatttttttttgttttatgcaattacatatctttgaataatcagcctgccacaaacaagattggggttggcatctcatttacttccaaagccatcaaagatctgtaaatcatgttaaccactgctgggctcaagtgagtgggctgggatggaaaggctacttgcctgtggcgctaagttgtatgctgttcccttgctgttgctatttatggcaagcagagtgcttacaagtattctcccaatttactcattagttcctaacatatcttttaggctcgtttttctgtcatggacagactgtgtcccttctgcttgcaactgattcattaatacaattatgttgaggtcacagatcctccctctcaactgggatgcagggaaatgcccgcgattaaaggagataaaatccacatccatcaaaagaagtgcctctgcaatgarcagaactgttgtgtcccctctccttagtgtttcataatgagctgatgacatggagacagactctccacaaatatgcagagaaaggttcctaacgaggatttctgacttcatcccaaaggctggaaatggtatagattaagctaatggaatacagaatmtcacaaggttcttctcttttaaaggtcaacaggaagccagattatttttatttctcattaaaatttgactacaatctaaacgtaagaattttaataaggtagatacctgtctatcgaagacgtttttcttatttatgaatcacagttttctgggtggtgcagggcaattttcaaagatgctgactatatggcttggaactcttggtaagtcatatttttctaggctggtgatctaagtgtttacttgtaattttaaaaactaggagcagacattggagagtgctttgttgtttgtttgtttgtttgttttagataggatgaagtgatcgttggttttcttggaagaggttaggcttaaagtgagcctaaaatgaaaaggattattgtcactcaagggacgcttccaaagcaaagacttattcaggaaggaaagaaaagggccaaggtcaaacagraggtaataaagtcaagcagagataaattgaccttaaataagtatttaattagattgaatcatgtttaatcacgtgttacagacatttgcccaacacgttagcttactggaaaatcaccttagggacaaaaggaaggaaggacattccaatttacaagcattggtagcatttcttctgggacctgaagcatttcccataatgatggtttaatacaatcgtggtcaattacctcttctgagagagctagggatatgtgccactttgctggaaatgttaaaatcctattaaacttcagttattagtagcagagggggaaaaaaagaactgaatgattcaattaagacacaaaccaccaggtgttggtggtactgaattagttttcctgttatgagcaagaaatactgattttcaagttggctagaagcctgttttcccccttatttcaccttcattatttgcttcccagccttctgatgcagtcccaaaagccacactttcagagatttttcccatatgcaaatgcgttaagcaatgtcttctgtatgcaaaaattgtatagccaccactaataagatgagtgagtagtgaccgagtgaatatccatgctcctgacatttctaagatagccttcctggtcagatcaagcacatccakgcagaatgctttaagctgttcccaacttccaaaggtaaatccaaagcagttttcatgttgaagtagtcaaatatcattataatccttgaaaatttctagctgagcaaatttgtgaaacttctaggcctttctgaaataaagaaaatgggcattttgctttaagaaagctgagcggggccaggcatggtggctcatgcctgtaatcccagcactttttgaggccaaggcgtgcagrttatgagatcaggagatcgagaccatcctggccaacatggtgaaaccccatctttagtaaaaatataaaaattagctgggcgtgttggtgcatgcctgtagtcccagctgcttgggaggcggaggcaggggaatctcttgaacctgggaggcagaggttgcagtgagccgagatcgcgccactgcactccagcctggcaacagagcaagactccatctcaaaaaaaaaaaaaaaaaagaaaaagaaaagaaagaaagaaaagaaagctgagcagagtgggcagtgaggtagaattcagctttccacaattgcattttgctgaccaaaaggctgacacttccttgatcaaattggagagatgctgtctgctctgtgagttttgtaaagagaaaattacacgtttcatacacggttgcttttttatcaggtttggctggttttctgtttttcgttttgtttgtttttcacttttgattttgttcttacatgagtcctcaagttgatggatcactgactcatagactcagattacctgtttttcttttatctttttttgtgctgccccactagtgctcagatcacgtcgaccaccagttcccagcaaaatgtttgcagggaagaattgatgccattaatggttcgtttaccttccttttcagttttctgtgctcagttaagagcattttggagctagttttcatagtcaccggtttgggagaaaaaaaggaaaaattaaaacctgactggtcctgattccattttatgttacctatctgacaggtttctaattacatacctaattctaacattggaaccagggttgcaaagggaacaagacttaaatacatttcagatggtcttgtctcaattgcaggcagagatcaaaattaggacctaattttggaacgagtcatgaacttggaggccagctgaacacatatctcttcctagggctcctgggctcagcaagaacaataacaacacatacctgtaaacacactagcactgaagcgtggtacaaaaagttttcatatattatttaattctcactctaaccttcacartttgcattgtctccattttcttttctttttttttttttttgagacgaagtctcgctctgtcgcccaggctggagtgcagtggcaggacctcggctcactgcaagctccgcctcccaggttcatgccattctcctgcctcagcctcccgagtagctgggactacaggtacccgccaccacgcccagctcattttttttttttttttgtatttttagtagagacggggtttcaccgtgttaaccaggatggtctcaatctcctgacctcctgatctgcccttcttggcctcccaaagtgctgggattacaggcgtgagccaccacaccttgcaaccttgtctccattttcaaatgaagtaactgaagcttccagtaggtaatatgttcaagtcccctagctagtaaatgacaaagcatagatttagacccttattttctgtctccagggcctgcaaatttaaacactaagctgtatcctgtaggtaaaagaaaatccttacattttgagttaaattaagcgttctaaaagttatccaatatatcatcttcaactctggacacatctcagtttcttgtttatatttgcagcattaacttatgatacattctatttattgtgtttctctcttgtgctaagtactgggctaattttgacatattccctgctttcaaagggttctgccttgtgactttccatctatccactgcaaggttctgtaattgaacttactttcaagaattaacattcaaataattccagtccattttagtttcttttactgtttattgaacagtatggttatcttctatattgctttattacatatgcatattagttcatctagtctaagctttcaacatcagatgtgggcaaaactgtgaatacaagtaccaattattttattatttactggggagatgcaacatcattgagaatgtttaccatatacccccttgtaagttgggagctgctttggctcttcagacactttgggcttcattcagttttgttgtgtttgttcattttcttccttttttttttttttttttgccagtttgtctttgcctcatgatttttagatgttttaacaaagtgaaaaaaagaaaggggaaattgtgggtggagaggaatatgatttctcatcttaaatgtgaaagaaagcctccctgggaaagcagtaacagtgaacagaaggggcttgtcaaaatgactgatactgtctttgcctctctaacaatgtctaggatgacatcaacaactctgagcatttgcttatcgttatttcaacttgagttttccttccttttcctcttcatgcccaattcttagcttatctccagctgcaaattcagaagagaagacaagtgctaaatyggtgcctcactttggagcctgaaacaggactacttttttttttctttcctgcttttagtccgtaaggagatgatagacattttataatgacacagaggtgccatcatgctattgtgccatcagcatcaaagttaaagaaaattaacttaaaaagctattttatccataaaaataactaaatgctaccgctatttgtatatgcatcatttaagattagggtcttaccttatttccttcttcagataaaagcacagacactcaaatgccatgctatttttatctataattaggttgagtagcttcttccttacctttcctggttaagtgatcagagaggcaagagccacagaaccctgacattggagtggaactcttgctacttactactcagcacttctctttttgaatgggaaaagaaggaaggaaatgaaaatcagacttctaatggttttacttgaaggaaaagtacatggaagaaatagtacatggacgaaatatcagggttgaccaaggtcaggaatggcaggcccttgcttgtattgtgcttagttgtgagaacagagagacagaaataagaatgtcatttgaacgggtattttcccttatgaggtgacctctttgtgccctctggaatagacaaagccaaaaccagtctccggagcacttctcaagactggcactaagtacagagggtcacatctacattcacagcagcatcaggtggctggtgctttttcccttgggacactccctgtccaccaaactaatttttggaggtagatgtgcttgcctccttttttccttttccctcatttgtattattatataataaatacatttttgtattaaaaggtgaaaatggagataaaaatattggtttcctttgatagcccctctccccatgcccaaaccacagacagtccttgtgtcaaaaggaaccactgtgtatttctttcagacattttatatttgttatgcaaagagatgcatacacaagaaaataatgtgtttttgtcccttatcataacaattctccaactgtatgtactgttatgccagttttatcttgtctctaaatgatattccctggggaattgatatgatgttacttaataccctgtgattttttttttttactgtagaatcatgtttgataatgttgttaaatcacagttagccattttacatttaatgcctttccctccagtcttaacaataatgtaataacaggcatcatctagccttctttgttgtactttcctttaaacaacttaaaagcttagaagggatggtcccaaagatgtcattgtatgaattttgtccttgagaacccaagtctttgattgagagcagtggggatgcttcttctgctcatgtaaccagttctagctctgagctcctgctttgcctaggtccatgcattttatggatcttctcaacattctgaaactttttgttttgtcaaaaatggctctcaggattgacagagagggattatattttactgagctactatattccagacaatctcatgaataatcacatggcatcctgtggcaaccctgagaaacaggtggtactgtccgcagtttataagggaaactgaagctcagaaaaatgaaataaactgcttgagattatagacactaagttgcatgttataaatttaaagacttcggctccaaagacacctgtgattttcactgtgccatgttaccttctaacatgaacctccttttcgaagtgctggtcgcttttctctttatcctctgcattttggcatatagaccctaagcaaagccatcctattcccatctccctcttctccttagcatagatcattttttcttgcttttttttcacttgagacctgaaacatagaacctagggatttcctcactgtggtctcccctatgaggagcatgttacaagaagggatgtagtatgggaattaaatgggtttgcttgaatgtggatagcctgctttccrcattttcagttgtagcagtttggtgccagtgatgcatggccggtttaagcagtcgtgctttgcctytcaagttagtcatctttggtttcatggaaagagtcctcccttagaggaataacaggtggaaagatctattaggttatcctgtgcattatgagattgcctacttctgtgaatttcctggtccttatttcaagtgatccatgttataagtctttggtctctgtctataaactaataagtatcactgctgtgatttgcttagtctcgatgtcctcttacttgttttgaattttctagtctaaatcagactcttcccatcagagaatagaataatataatactgtacaatcatgtcttccaggtacttgcctacaggcagtgaatttttttattactttctttattcatgtatttatttattcattcagcaaatacaaattacctgcctgctatgtgcatagcactgtaagagatgctttatgctgtattgatgtataatgtatgatacatttatatatgatrtatgaagatgccaagtagttaacattcattcaatacttaccctcaaaaatctcgacttctaattatttctgacattaaatatattcacttgcaaaggtaaaaccaatttaaagtctaataaacagtaagaatgataataacacaggagatatattataaggcaggccatgatggaaagcctggtagtcatcctagatggcatgtgctttgtgctctgaaaagatattaaaacatataggaattagctggaagaaaccatggaaagcttttctaagtgagggcagatttgtggttagctgtgatcagtcttggctgtaaacggatagttccatagatagagactctcaggcctccttcattttctaccactccattttttggatgatraatactctcactcttttatctatctgaaattaattttgacttaacttgtgacctatctacttgtttagtcctcagaaaatatgaaaaatacccaaattctataggttattagaagacatttttcttagctccatgacatggacaactaggttaatctctctgtggattagacttcctattgtaaaataaaatatttgaaggcttctaataataaatgaactttttccctggccaaagattttcttggattatttaatatgattatctcatcaacactgcatataggtacaatactctccattttcctaataaaacaaaaatcaaggccaagcaaagcaaagtaacattttcaaagcctcagccacagtaagatatttctgattacaaatcccatgtttgtattattcccttgaaagattaaattggattactgctagagactcttgaaatgcaacccttatatacaaaccatagcctttctttaaaactagttgcaatacctcagctgagtgcatgaaatgtacaaagggccaccattctgtaggtaaacaataagagcacatttaatatttctttgctgtttctatgtctatcctagtcactttcatgattcatctctaaacccttaccaattcttttgcagttttgaaagtgtacttcaaaatctgcagtgaaattttgatattttgccttttcctttcacttcctatattaccagtttcagctactttggaggcttgtccaccacttccatttcactggctctgtactcatttcattatggtatatagctttcaggatagattagttgatgctgcagcaaagaacaatatgacctgtgtgagtcatgtgggagttctcatctgcatagttatcactcagggacccaagtgttaaagagtccaccaactgtggcattgctggttcttgagattggaaaagagagctgtggaggacctcacattataagtattctgacctggaagttttacatgtcatgtcttgtctgtatccattgctcagacatagttatatgttattttatggtacccagaaatagaggagacaaccaaaatgtgacatactcagtatatggttattctgacaagaaaaaaatgtagttactattgcaggtatcctcaaagtctgaaaggaagtagaaatggataagggtgcaaagacctgaatagatattatttacctagatatcaattcatctgtatagtcacccatcggtctgtttatccttttatgtaattttttgcaaagtccctcacagatttatggagtgagatagagttaatttttaaatcaaaggacattggatgttagataaatcagtggaggaaaaaaataaagcccaaggataaatgtgtcatgggcatatgcatatgatatgatcccattcaactgatggattgtttcctggatttactgcaaactgtctagtagctaaagaaaaaataaacacattgtcttagtcagttttgtctgctccaacaataacataacctgggtggcttataaacaacagaaatttatttctcacagttttgaaggctgggaagtgcaagatcaaggcagcaacggatttggtgtctgacgagagcccacatcctggttcagagatggctgtgtcctcacatggtagaatgtgaggtagaagggatcttatttatagagtctctttcataaggacattaatcccattcatgagagtcctgccctcatgacctatacacctcctgtaggccccacctttaaatatcattgcactggggataaggtttcaacatatgaattttggggagacataaacattcagtctatagcattctgtccatagcccctcgaaattcatgtctttcttacatgaaaaatacattcattccattccattagccacaaatatcttaattcatcctagcatcaactgtaaagtctaagtcccaagtctcttctaagtctcttctaaattaggtatgtgtgagactcgaggtatgagtcactgtgaggcaaaatcctctaaagctgtgaacctttgaaacaaaacatattatgtgcttccaaaatacaattgtgtgacaggcataggctagacattttcatttcaaaagggagaaataagaaagaagaaagggagtaacagaggccaagtaagttgaaactacaaggcaaacttcatgagatcttgagaagggaaggaattaagggtcaagaataatcctctggctccatgctgtgcctccaagcccactggagctaatatttcaccttctaggcccactagggaagaagtcctgaacttgaaactctactctgcagggttctcacccccagcgctttcctgggtactcatgacctcacagttctggggggccctgatctcacagctttgagaagaggctttctggcctgttgagagcaaagcaatgatcccctgttttgaacctgagaaagcagtcctgatggtctctgaatkgccttccggggtcattgttcttgtattgaagaataatgtctgttctcagatatatacctctctggtcccatgctgcaaaaacaacaaagcctgatagctttccttcattactttttgtttcttttcttttcagttctaactggcagttttcctgcttgggtggtggattaagttcatagttcacacccatattaatcttcttttcaaataggcaattggccatgctttttcactttttgcaatagggataggctaagaatttttcaaatcttcaagttctccttcccttctgcttaataattccctctttaactcatttctctcattttcttttttaaactgaaaattggattttaattctgacaaatttggatatcaacaataattgtgttactctttagtgtattggtttrtatatagtttctatgattattcattaataccaagctcttggaataaaattaaaccaagacatttaataaatctgttgatagcaagattatttcttttatattttaaatagttaattggcaaataaaaatcatatatactcaatgtgtacaacgtgattatttgatatgtgtatactttgtgtaatgattataacaaattaattaataaatccattaccacccttgccatagayttgatccctggaatttgttcatcttaaaattgatattttgtacccttacatcaacatttcccactttcttgcatcccctagtccctggtaacttcctgtttctatgagtgtgattctacatataagtgaaattatacggtatttgcccttatgtgtctggcttacttcacttagcataatgtcctccaagttcatccatgtttttatatatggcaggatttcctttttaaagctgtataatgttccattgcttgtgtatgtacgtatgtatgtgtgtgtgtacattatgtataatacattatatatgtatgtgtgtgtatatataattttctttatccatttatccagcaatggacactttgattaattccatgtcttagctattgtgaataatgctgcaatgaatatggagattctggtatctcttgaagatgcttatttcatttcctttggagatagtcccagggcgagattgctggatcatataatgttgttctacttttaattttttaagagccttcctactgtcttacataatggctataccaatttacattccaatcaacagtggacaagcgtttcattttttcccaccttcaccaataattaccttttgtctttttgataatggccatcctactatgtatgaagtggtatctcattgtggtttcatttttcatttttctgattattagtgatgttgagcacctattcatatttttcaaagaaaacatacaaatagccatttatatgtttcctttgaataaaaatgtctacttaggccctttgtgcactttttaatcagggatttgtcttttttgctattgagttgtatgaatttcttaaacattttggatattaacccttcattataaagctagcttgcaaacattctctctcattccatggactgccttttcactaggtaggttattttctttgttgtgcagaagctttttggttttatgtactcccatttgtttgtgtttgcttttattgcctgttcttttgttgtcatatccaaaaaatcattgccaaagccratgtcagggagcttttaaactatgttttcttctatgagttttacggtttcagatcttacattgaagtttttaatccattttgagttaatttttatatatggtttaagtaaaagaatttaatttttctgcgtatggatattgttttccaagcatcatttattgaagtgattttttcccctcaccgtatattcttggcactctcatcaaagattagttgacgacatatgtgtgtgcttatttctgagatctctattttgttccattggttagtatctctgtttttatgccaataccgtacagttttgatcacatgactttgtaatatactttaaaatcaggcagtgtgatgcctctagctttgttctttttcttcaaaattgctttggctatttcaggtcttttgtagttccatatgaactttaggattttttttttttctgttttcatgaaaaatgtcattggaatgttgacagagattgcactgactttgtagatcacttttggcaatatggacgtttaaacaatattaattcttccaatccataaacacgggatatgtttttattagtttatgtcttctttgatatccttcatcagtgttttatagtttttagtgtaggtatctttcacctgtttggccaaatttatcttaagtatcttatttttgatgctgttgtaaatgggatctcaatttctgtatctcaatttggatatagttgtttgttaggtgatagaaatgcaactgacatgtgtatgtcgatattatttcctgtaactttactgaatttatttattagttctgacaggtttttggtagaatgtttaagtttttctgtatataatattatgacacctgcaaacatacaatttaactttttcatttccaatttggatgcattttctttcttattatcacacaatgtttctggctaggacttccattactatgttgagtagaagtgatgagagtgtgtatgcttgtcttattcctgatcttgaggaaaagctttaaattttttcaccattgagtattatactacccataagcctgtcatgtatggcctttaacatgttgaagtaaattccttctacatctaatttgttgagagtttttatagtgattgttgaattttgtcagatgctttttctgcatatgttgagactatctatgatttttgtcctttgttcttttaaagtagtgcatcacatttattgatttgcatatgttgaatcattcttctgatttgacatggtgtatgatccttttaatgtgcttctgagtttgtttcactagtattttgttgaggatttttgcatctatctttgttcatcaaggtttctggactgtaatttattttctggtattatccttacctggctttagtttgaaggttatgctggcctcataaaattagtttggagatgtcctctcctctttaattttttgaaagactttgagaaggatgggcattaattatttaaamgtttggtataattgaccctggaatttttttgttgggaggtttttgattactgattcaatcttctcacttgttatttgtctattcaaattacctagttattcattattcatcttagtaggtggaatgtttctaggaatttatttatttcctctaagttatccaatttgttggtgaataactgtactcaagtagtctcttatgatcctttgtatttttgtattaccagttttgggtcgcttttataattttaattttatttatttgggctctctttattttctggttaacctagttaaagctttgtctatttatatcttttcaaaaaaaccaactcttagttttgttgatcttttctttttagtctctatttcatttacttcaggtctggtctttattatgtctttctttctgctgactttgggcctagtttattattttcctagttccttgaggtgtaacaataggttgtttcagttctttcttttcctttttttttttttttttttgagatggagtcttgccctgttacccaggctggagtgcagtggtgtgatctccgctcactgcaacctccgcctcccgggttcaagcgattctcctgcctcagcctcccaagtagctgggactacaggcacgcaccaccttgccgggctaatttttgtatttttagtagagacaggatttcaccatgttggccaggatgatggtcttgacctcttgacctcgtgatccatctgcctcagcctcccaaagtgctgggattacagatgcaaggcaccgcgcctggcctttttcttcattttgatgttggcatttatcactatatagttctctcagcactggttttgctgcatctcagaaattttggtatgttgtattttattttcatttgtctcaaatgcttttcatttctattttgatttttttctttgaaccattgattgttcaacagtatgttgtttaatttccacatattggtgagtttttcataattatttctcatatcgatttatagttttataccattgtggtcagaaaatatatgtgggttgatttcagtcttctcaaatttgttaagaattgttttgtggcccaaagtataatctatcatggagaaagttcatgtgcatttgagaagaacgtgtagttgttgctgttggatggaatgtttgctgtaagtctggtaagttcatttgttttatagtgttgttcaagcctactgcttctttattaattttctctctggaygatctatycattgttgaaaaatgggttattgaagtcccctattattatttgattgctgtctatttctcccttcatttctgaaatttttgccttatatgtttaggtgcgtcagtgttgagtgcatatatatttacaattgttatcatcatgtagctaccttttttgtctcttctaacagattttgactgaaaatctatgttgtctgatataagtatagccacccatgctctcttttggttgccatttttcatagaatacctttttctatttttttactttcagtctatgtttgtccttaaggcttaagtgagtctattttaggtagcatattgttgattttttttaacccattcagacactctgtatctttagagagttacattcatttacatttaaagttattgttgatagataaggatttactattgacatttttttaattgtctacaattttgtagttcctttgtttctttcttccactcttgctgttttcctttgtgatttgttgaatttttgtattggtatgctttgttttctttctttttatggtttgtgtatctactagagatttcttcctttctggttaccttaccatggaacatacgtaaaacatcctaaaattataatattttagtttagctgataacaaattaccttattttgcatacaagaactctatgtttgtactgccccatttcccatttttttataaaattgatagcacattttcatctttttatattgtgtgttcattaacaaattattatagctatagtttttttttatgctttttaacttttatactagggttaaaagtgatttgcaagccaccattataatattaggatattccgaatttgactacatacttaagcttaccagtgagctttatactttaatatgttttcatgttgttacatgaaacagaaataactcttttctttcaaattgaaagaatccctttagcattacagttgctgagtataatattgttagttggcagtttttcttttgacattttgaatatattaccttactccattttggcctgaaaggcttctgttgagatgtctgctgttaaccttatgcagattttcttatatgtgacaagtctcttttctcttgctgctttcaggattttctttgtctttgacttttaataattcatttataatgtgtcctggagtttcttctttaggttgatcttagttgggatcctttaaatttcatgaatctgaatactcatatttctccaaaggtctggatagttttcagcaagtgtttctttaaataattctctgtctcttactctctctcctttctccttccagaaatcacacagtttatatatttgtacaattgatttttgtcccataggtccctaatgctttcttcaacttttaaaaatctttttatctttttggtcctggacttggctaatttcaaatggcctgtctttgaattcactaattatttcttctgcatagtggagtctgctgttaaagttgtctgttgaattttttaatattgtcattttatccttcagctctaggatttctgtttgattctttattatggtttatatttctttattaaactttttattttgttcatgcattgttctgatttcatcaaattgtctatgttttcttacatttcattgagcttcttaagatgattattttttattcttttttaaggaaatttgtagatctccatttctttggagtcaattatagaatgttcatagtttcctttggtggtgtcatgtttgcctgatttgttgttatcgctgtagccttgcattgatggctatgcatttgcaggagcaaataccgcttctagtctttacagactagttttggcaggaaaagcctcctcatgttgagactctgagctgatgggattgcctataggattgcagtcttgtggcgattgagctggatcacatgagtccacgaggggacccacagttggcaggcctgttaccagtgtctctggtaggcatggcttttgtctgacctcttggtggacaagataccattagtaccttggccagtagggctggcactgggatgaagaaccacttgaaggtatgcagacagcaggcctgttaccagttgcacaactgggagtgacttcctccaggtccctgggagggctcctcctaggtcactgaatatgtacctgggcaggcagtcctgaccccagccatggcttaaagggactaaaaccaagtcacaatgatatagtttggatatttgtcaccactgaaatctcacgttgaattgtaatccccaatgcagtggtggtggtgggggtggggggagttggtgggaggttttggttatgagggtggatccctcatggcttgatgctatctttgtgataatgagtgagttctcatgagatctagtcatttaaaagtctgtagcccctcctccccaactctctagcttgctcttgtgtttgccatgtgacatgcctattccccctttgccttccaccatgattgaaagctccctgaggcttcaccggaagctgggcaaatgcctgcaccatactttctattaagcatgaagaactgtgagccaattaaaccttttttatttataaattaccttgtcttaggtatttctttatagcaatataagaatggcctaatatagaaaatcggtactaatgagttgggtattgctataaagatacctgaaaatctagaagcaactttgaaactgggtaactagcagaggttgaaaaaatctggagggcttagaataaaaaagaaagatgagggacagtttggaacttcctacagactatttaaatggttgtgaccaaaatgctgttagtgatatggacagtgaagttcaggctgccgaggtttcagatggaaattaggagcttttgggaactgaagcaaagaaactgaacccttkttataccttgctgaagaagttggctgtattgtgatctatgtcctaaagatctgtggaagtttggaattgagggtgatgacctagggtatctggcagaagaaatttctaagcagcaaagtattcaagatatgtcctggctgcttctaatagcctacctatcagatgcaggagcaaagaaatgacttaaagttggatgttatatttaagcaggaaacagaatgtaaaagtttagaaaatctgcagcctagccacgtgacacagaaaggataagctttctcaggagaggaattcaagcaggctacgtagcaaccgcttgctagagaaatttgcataactaaaagggagccaagtgttaatatcccagagaatggggaaaaggtatttcagagaggtttgtggcagcccttctcatcataggcccagaggtctaagtggaaagaatggtttcaggggcagggcccagggcctcactgtactccacaccattgggatgctgctccccacatcccagcccctctggctccatccttggctcagagggccccagatatagctcaggctactgcttcaaagggtgcaagtcatacgccttggtggcttccatgtagtgttaagcctgcagattcacagagtgtatgagtaaaggaggcttggcctcygtctagattttggaggatgtgtgagaaagcctaggtgcccaggtagaagcctgctgcaggggtgtaaccctcacagagaacctctactagggcagcacagaggggaaatctgtggttagaggccccccacggagtcctcactgtggcactgcctagtggatctgtgagaagggggctaccacccatcagaccccagaatggttgatccactggcagcttgcaccatgcccctggaaaagtctcaggcactcaacacactgtgagagcagcctcaggctgaaccctgcaaagccacaagggtagagctgcccagggttttggaagctcacctgttgcaccatcacccccatggatgtgggacaaggagtgaaagaagaytattttggagctttaagatttaatgactgccttgctggtttcaaacttgcataaagcctgtagcccctttcttttggctgacttctcccttttggaatgagaatgtttatccaatgcctatacactcattgaatcttggaagtaacaaatttgttttttttatgttacaggctcataagtagaagggatttcctttgtctcagataagactttgggttttggacttttgagttgatgctagaatgagttaagacggggggactgttgtgaaggcatgatcatattttgcaatatgagaaggacatgagatttgagagggactggggtggaatgatatagtgtggatttttcttcctgcctgaatctcatgttgaattgtaatccccaatgtttgaggtggggcctggtgggaggtatttgagtcataagggtagattcctgatggcttggtgctgtcttcatggtagtgggtgagttcttttgagatctggtcatttaaaagtgtgtggcacctcaccactactctcttgtttgcttctgcttttgccatgtgatatgcctgttcctcctttgccttctaccatgattgaaagctccttgaggcttcaccagaagccaagcagatgccagcaccatgctttctgtaaagcctgcagcacagtgagccaattaaacatcttttctttataaattatccagtctcaggtacttctttataggaatgcaaggacagcccagtacatgcaaggatgcttcaggatatacagctgagactaaggtctgcagtcctgtctctaggatcatagataagtgtgtttccctccagatgcctgggcatgtaggattgctcacaaccaacagctcagaggggttgtagctgagttttagtgccatttcaagatctgctgtagggctgagtttggcaagcctaccctggggactcaggcaggcatttctccctctgcgttcgtggatgagaaggcctcctctctgtccacagctaagagtgtctaaaactgggtttcagagctgtttcagggtctacatccagactcaactttggctggcctgtctgccaatgtactagtgtgcatgaatttttctgggcctctttgctgatgatttttataataagaccaagagaaaatggggccatagctgagtccacaagaggataaagccatttccaggtctgcagtcagaaccatgatcaccaagtctgccatctgggcatgagttggccctctcaaaatggccctactgaatatcgggctcccctggaatttcacaacctcctaaattaatccaaggttcccacaaaggctattttgtctgtgggtggctgaaaaattattgttgctgtgggagatacaattaggtgagctcttattccactattttgctgatgttacctcatttctttcacacttaactataagcagtcaggaggagccaagccactccttcagtgctttgtttaaagatttcctcagcctagtatccgattgccttgctcacaaattctaccttccacaaagcactgaaacacaaaatccattcatccaagttatctgccactttataacaaagattaccttcctccactgtctagtaatatgttccttatttctgtctgagacctcatcagaatgacctttgccattcatattcctaatttcaggattacataggtattttctaagattgaggctttctctgcatctcttctttttttctgagatttctacccagaatcacttttaaaggttctttacagcaatgtaggctttttctagcaggcacttccaaacacttctagcctctacccattgcccagtttcaaagtcacctggacattgttaggtgtttgggatagcagcactcctagttctgggtaacagtttcctgtcttagtctgtttgggctactataacagaatgccataactgggtggcttttaaacaacaaaaaattatttctcgaagtcctggaggctgggaccttgagccccaaatcacttcactagtagattaggtatctggtgagggcctgcttccttgtacrtaaatggccattttctctttgtatcctcacatggcagaagggatgagagagatctctggggcttcttttgtcagggtattaatcccatttacgaaggttctgcccccaagacctgatgagctcctcaaggccctgctctaaacaccatcatgccaggtataaggtttaaacatatgaatttgggaggggagggcataaacattcagtctatatagtacacatatatttctaggattgataattttaatttgattgaaaatatggttaaaaaggagaatctttattcctgatactgagagctgagtgtgatttttccttggtgattctacaaaagccatccccaaagatatttaatagatataatagttttttgttataatgccattcaatatttagatatatagtttgtaaaagaaaagcacttcttcaggagataaataaatgcagaataaataggtagttgtcaggtctggtttgacccaaaataaaaggcatttaatactcatctgttcataacatctatttaacaaacatttactgagcttgtgatatgctagcactgttctacatttgggaaataccagaatgagatactcaacctgtagataaattgattaacttatcgcatgattactattggggaaaagcatcttgcttttgccaaatttggaatgatggtcaagtctgttcaatataatacactcttaagagtgagtctcatttgtatcatctgaatgtacctagtattcagaattttgagaatatttgacaaggagatcctcatccaaacttctcattttcttcacccaccagcagagacataaccatctcttcctttgatcagctctgggaggtccacggaagtccaaatccagtctagcttatgaatgtgttttctgccttcctaacttcctggactattttttatgcttctctcccttctttgcacccttctcatgtggtgcttcagccatcaagaattaccctttccttcctgatcactacattctcagacctaccacaagaactttttatatgtgctgtgtgatggttaatattgagtgtcaacttgatgggaatgaaagatgaaaagtattgttcctgggtgtgtctgggagggtgttgccaaaggagattaacatttgagtcagtgtactgggagaggcagacccaccctcaatctgggtgggcatcatctaatcagctgccagcatggctaggataaaagcaggcagaggaatatggaaggagtagactggctgagtcttccggcctccatctttctcccatgctgggtgcatcctgccctcgaacatcagactcaaagttcttcagcttttggactgttggactyataccagtgatttgccaggggcactcgggccttcagccacagactgaaggctgcactgtcggcttctcgacttctgacgttttgggactgggactagcttccttgctcctcaccttgcagatggcctgttgtgggacttcaccttatgatcgtgtgagtcaatactccttaataaacttccttcatatatacatctatcctattagttctgtccctgtagagaaccctaatacactctgtttgcctttagatcagccttcctttcactctgacttctacttgcctttcatatcttaactgagacaccatgttctgtcctgaggctctcctgaccctccagacagttcattggagccacatctgtgttcgcccccagaactcatttcttcatttaggctagatatgttaagtgctaaacacagttattaactcactacttgctgaatacatgttaactgtttgagtattatgatcggtatcagtattatcagtattacaattttcgtgcacttttcaaatatatgttgattattgagaaataaaattagactttctggccagtgtttctttctcctgttsattcttctgaatataccacaggcattcaggtcattcttggctcctctagttcagttcttccagatcctatttcccacacaactaaggttgtttcacacttgccagctctttgtttcttacctctggcaacaaactgctgacctgttctttcctataacttagaacctcacgtgtctctgaaaaagataagcagtacgtgtggatctagacataactttcctgcactccttagggaatttggtaaaggatggcagagcaaaaaagggagctctttcataccaggatcatgtgaggctaagtacttttccaaattgccaaatcctggaaggtctttcagccatccctccctggaatggacatctctggctctggcctgttaaacatgctttttttttcttttctgggaacatcacacttatgttcctttactgttctccagtctcagtccacgtgtgtacagtagagcagttcccacactccagatcctgaggtgagaggtgactggtctgccatgaggctgaagtatttcccttggctagaaacactgtttcaggagaaggaaggtgacgaaagccagacctttcaagccaaacatattcaatttccagacttcttttggaactagtggataataggaacttctttcaaactagggctgcaaagcagaggaggtaaaattcagcggaagaggattaaacttggtgagaatttgcttgaatataacccaaagcaaggaatgctgagctgagaggtagggagagactaattcctaacagtatcacttagcaccttgaggcagtcagacctggggattcattccttgaatttctcagttgcactggcagtacatttccttgaatatccagtacaattccttgaatttgtcagttgcaccggcagtacattctctttgttgttgaagcttaatacagttgggtttctatcatttgtgtccaaaaaggttctgacgaatctgccatccattaaggcagaagaaaaaccatgagtgcaatcttttgtccaaatagaagagtggcctttgaggcaactcacagtgaaatgatggtctgttataatttgacatttcctggctctaaaatgaagcccacggcagtggccacgggtgcttaggaggatttggtctttgagttttacatgaaggagaacaaaggggttttataatggctactggattcctcattgggattcccttctctgcttcctactgaaatgtaaatgcctgcacaatgcagatggcatatttcattaatacaaacaaaagtccaggcaacagatgctttggggactgaggggaaaggagatctctgtatttctccaacagcaacaactccgatgataaatttctcccactgagcatattgaaccaagagcacagaaatgtgtagttttcaagccttaggcactctacagtatttaaaagtaggaagatcaaaatcagtatttttggacaaagagaccttatgctgaggaagctgcattgaaargcaatgagcaagaaaagctgaggcatgctttgtgaatttcacagggcttggggatgggcaggacttccagtgttctgtttgtctagagagcatatattaataaaccttagtcgggactactgccatccacaatgacaaaagccaggccaggccaattatttgcacatcaagggctgggttagcgtggcttctgttcctttgtttcttaacgttgttttgtgggaaatgtaacgcagagatgattaattgcagagcagatccaactctytctctgcttgtgataagtttaaataaaaatgccaaagtccaaattctgaaactatgtcaaagagtaataattcaaaaatttataaaaattacaccatgctttgtggtcatattctcctgagtttattgtgactatgggcaactgcccgggcaggagtgttggaaggagaaaggtatgggggtagaacgaattagataggcaaaaaatgttatctgcatyattttggtgctatttcactgaagacggaagattgatagcaagcatttggaggcaatattacagcaatttttgtgactcctcagtagggtaagcataatgctaataaaatattgtggacagggattgtaggacatttttctgttcacaaaatgtaaagatttttacattatattttataatatgttatactatatactctttaaaatacttgcccctctaattgtgtgtgcatttttagcctatttagttagcagaatagaaaaggctgagttaagccgaagaaccacagtttatcgctttgcatgtaagatgtagatgctcagagtcttctggttttgtaaggctttttcctcctttcttctttatagtgcttaggtagaacgctaactaaatgcccactgagcataggaagcaaaataaagcacctttaacaaatcatagttagattccctttttatatgtaactccaaaaattgataccattaaaaatgccagccactgacaatccaatatcttgccactgctggaaaccagtcttcacttgggaacacttgtttgttctttatatcctgatccggatcccaacaccttgacattttgcatgacttccctayatccagaggtcgtctcaaatccagcttcaggacagtgagccatgcagcttggcttgcatgagaagggccatacgttttccttcccatacattaaatcctctcatatcagaaccagctccacagtgtctaaatcaataataagattaaataatgaaggctygataatgacaagtccttaaaatgcaatgactattattaaacatgcatttgttcattcttcacttattgatgtaacaaatacatatcatgtgttgmattatgctagtcattaggggaaaatgatgaccaagatagaaatcgtttcataaggtccagaaagctcccttatgtttgatccaggccatactgaaaacacacactaaatgttctatagaaataaacaaaggtaataggcaaagtcattatagatcagagattgcaaactgaaagactaaatgggccatgtaggttacatgtatatacaaactgggccaactgagagttgataaagcatgatagaacttatagctgactggaaaatgtcatacttaaagacatttcagttatttttattataaagactattgagtcaactctccccaaacagaaamacacacacacacacacacacacacacacataattagcccatggaagatttgtttctggaaatgttatgcttgacatacttaaatttsaggttactattttttattcaagcatattcaaccccggtgcattggttcagtcctataatcccagcagtttgagtgaccgagatggcaggatcacttgaggacaggagtttgagaccaggagggagggctgtctaggtgaagcacaggggaattttactttagggaaaatattctgtatgagcctataatggtagttacatgacatcatacatttgtcaaaacccatagagtttaaacacagtgaaccttaatgtaaactgtgaactttggttgatacagacatgtcagtgttggttcattgattgtcacatagtgagaccatgtttctacaaaacatgaaaaaatagaccgggcacggtggctcacgcctgtaatcccaccactttgggaggccaaggcgggtggatcacctgaaggtcaggagttcaagagcagcctggtcaacatggtgaaaccccgtctctaataaaaatataaactattagccaggtgtggtggcaggctacttgggaggctgaggcagagaattgcttgagcccgagaratggaggttgcagtgagccgagatcgcgccattgcactccagcctgggcaatgagagtgaaacttggtctccaaaaaagaaaaaaaatagctaagtgtggtggtgcatgcctatactcctagctactcaggaggctgaggagggaggatctcttgagtccaggagttccaagttatagtgagctataagattgcatcactgctctgcagcctgcrttgcagagcaagaccctgtctctagaaaaatatttttaaaaatacatttccattatttctcatcagaaagaattattattttctcaaagagggagaagtgtaaagtaacattaagaatcttgacagataaacttttgcttttatgtgggtattcccttgttctttctcctgaactgtctgtaggagttagatcttaaaataatgtcaggagagagtaatcaagatccagcccactaaccaccaaagtccttgcttagaactggtgctgcctcatctgagaattgttcagctcaattttcaagctctttctttgagattttcaatacctgctcttttctctgatgtccctagatacaagatagctttgactgtatcataaagtctgcctaagagactatttacttacttttttttttttttgaggcggagtcttgctctgttgcccaggctggagtgcagtggtgagatcttggctcactgcaagctctgcctcccgggttcacaccattctcctgcctcagccttccaagtagctgggactacaggcgcccgccaccacgcccagctaagttttttgtatttttagtagagacggggtttcactgtgttagccaggatggtctggatctcctgacctcgtgatccacccacctcgacctcccaaagtgctgggattacaggcgtgagccaccgcacccggcctatttacttatttcttattacgatttacaaaatgtgctctcatgtttgaaaaactcatatttgaatatatgtgaggtaaaaacatttaaatgctggctgctaaattcacatcttaaaaacctatggaaatttctggaaggaaactttcctgtagttagcatgatggtttatgtgacccagaaagaktgcagcttctcaggaacagacatgtctgcccctttctgcatgtgcaaatgyaagagagtttccatttactgtgattccgacaaaattagaggtaatagcaaataatcacattctgttgaaactgcatgttatattatctgtattccctccaggttttaagatcagtgaggtcagaaatcatgtatattttgctaattaatctcttacttcaagtacaatgcctggcacatagtaggcacttaatacgtatgcactaaaccatacaaaacaaatgaaagaatgaatctagatcacttttagttataatattttattgtattctttatggttgtattagtttaacctatggttccttggttcagtagttttaaggaaacaaatttcaaatgcataccagcattgtttaatatacatttcttcagtgatggaatacctgctttgttcaatattgtagccactagccacatgagactattaatagactattaagtgtgattagtgtgactgagaatctgaattttaaatttaatttaattttaatttgacttaatttaaatttacatagttacatgtggctaaaggctaaaggtctatgcatagcacatagaccactcctttagggaatcttgtttaactgttgattaggtcagtatttggaaatgctcatggaaagggtcacatattaagagatggacatgtrgacttcttgtattttctagtggtctcacactcaaaaatcttctcaatcaagagtccctgagaattaaatttgagttaacataaagagagatatatcatrtactatgtagttaatagagaaagaaaatatcctgtatcaagctgccctgaaaaacttttatctgccaatcaagactgaacccaactttactactctcagaatttttccttctttacatcctctggagcgctgtagaattttgtcaatacctttaacactatatatgtcttcactatagattgtttacagagcaactgaaacttccttaattaatggacaccataatagtgcagaagcttgtgctgggactaattcagtactgtacgcattgttggttgttcatgaagagttattgagtgaaaaatgaaatttggggtccaaagatctgagttctggtcctatgtctgccatttacttagtgaccttgtgcctggaatttaacacctctaagttatggttttcttattcttaaaatgggaatattaatatgtgttttcccagagtaatacatgagagccacatgggagaagtcatgcatgtgtaaagattaccaaaaataaatctaattattgtcaatatggagctttagagcaatatcttcaaggaactaatttcaattccagaaagaagtcattccaaaattgttagaagttatgccacaaaggcattaattaaatttcctcttcccttataaaatagtgtcatctttaacaacgaggtgttggctgagcccagacagaaaacagtaaattctcaatttgatatgcattcctgacacgtgatacatatgcactcaccagatcttttatggagatagcctaaatgctgaatggtggaaaaaaccaaaacaaaacaaaacatacaattattgatttaggcaatagagacagctcaccagtctgcatcaggacaactgactacttcttcagtatggcaagcagctcccagaaacaatagttgtttctggacctcttattgtctactaagtgatgtgctagatgtttgggaaacaggtgtgagactcaggagctaagttggattcacttgggaggaaagataaaagagttcaatatcgataagttggtaaagaaagacatactgagaaacatcataataacctactaatatttggcaacctggatattatgcctgacatagacaacaacaacaaaaactagatattacaaaaattggccactttgcagcttacctaatgattgtctacatgtgactaagacatgacctgcacaaggagaatgcttatcacaatagtgctttgcaaaaaataactgttttataagtaagatttaccagatattcatcgatcaccctactgtgtaacagacataaaatgggcatttttttcctgtattacattgtctcatgtttttataatagctcaaggatgtagatttttgagtgagtcaggattctggcagaaaagagatggcacactcaaatggaaattagaaattaaagataacttaatgaagggactatttaaaagtcagaactaaaggaaacctataagcaataagaaagcacccaggcactagctgatgtgcagctatcacctctggtcctaaagaggctgagagtttggtgaccagaatcgagagggagccataatagcagggagggcacagatgaggagagctgcaggcacaggtaagaagaatatggcctctgytaatgtgtggcctggcagagaggctggggctaggggtggagtgggatggtgggatagagtataaagactttggtctttctctcattccagctttggaaccctagccagttgctcctatgaactcaaacaggcaccttgcaggcccagttgttatagcaccaaaactgccatcctatgacacacagtgtggacatggaaagtaggaaagaacctggaaagaaatggaaatgatccagccagttttgttgcctttattttacaagtagggaaattgagtcccagaataaataaataatttgcttaaaagcatgcaacaaagaaatcagatgaaagatttctgattccaaaaatgtgttttttaatttctccatttctcattcacttgttaaaaataaatcacaaattgggctgtgctcctggatttcattccctgagcacagaggtttttattcagttcctttattgaaaactatgtcctaacactggccagtcatttcccagaaccttgcattcatcacaattggacatggtaaaagtgaatgcgtgtgtttctgtgactttgcgaaaagatctcaatattgagagaggttattctccttaaagcacattaattgttgttcaaaacaattgaagattgaagattggagaaaactagtgttgggatagcatggagaagtgaatgggggaaatgagaygggcaatctacatgaaaactagaaaaaaggagcttatggagagaatcttgggttaagagtgagttgatgatccgttttgttaggaatttggcctttaagaatattgatagggccgggtgcggtggctcacacctgtaatcccagcattttgggaggccgaggtgggccgatcacctgaggtcaggagttcgagaccagcctggccaaaatggtgaaaccctgtctctactaaaactacaaaaattagccaggcatggtggcgggtgtctatggtcccagctactcaggaggctgaggcaggagaatcgcttgaacccaggaggtggagcttgcagtgagccaagattgcatcactgcactccagcctggcgacagaaggagactccgtctcaaaataaataaataaataataaaaatattgataggtgtagcaaagctttactaagggcatatgatatagtaagttgttttgctaaagctaagtcttcatgtacatgatctctgtgttccctataggtaactacttaaccttttcaaggtgaaagaagttgaaagtcatatcaatagtatgtggtaaaacatgatttcaaacctagtgatctgtctacctcatagccagtcccttttaccttttaaaacttgttaaagcaaagcacaaaggcttcaacgtcttattcctcatttgttaaatgccagtgaaacataactgtgactgtttcttgcctcttgcaacaataacttgccatatattatctgcatttaaggtgactgcaaacactggataaaatgcaattcatccattagcaaatcatgagtaaccgtgcccacttagtgctgtgtaatcttataatggatatggttgtttccagctggatggaaatggggaataaacagtgagggtttcatatatacaagaggaaaaatcctggataagttgtaaagtgtatctttattcttgtttttttttaatgcaaattgaattccacttaccaattggaaataactatgttggggctatattataggtttattgtaagcagggcatatatttttcatatttggctttataatattttagctgaatcaccttttaccgtgtttctccttggatgggaggtaacyttttttttaatattcctcatgatttctgccctatacttagccattggtaactttttaaatttttattttactgtaaaattcagcactgataaatcactggcccttacatatagagtggatttaaaatttrtacactgtgactgaggtgggtagaaatataactttatttctgcataactgaatactgcttgctcgccagcacccatttctgcttaaggaaggaatacttatatgccacttgaatgtatcttactgacttccagttaaaattcattgctttctggataaatccaactctttagaacagacacttaaactttcagtggyttttttcctctgctctttcttctttgcttgggttcagggagactatgagtttcatggctacatgcagcatgatgaggtggggaagtggcgtcaggtcartgtgtacccttcggttgtttgcaggctcccactaaagaatgttgtcccttggcctttcatattgactctgtgtctgatgcaactgtagatgagacagattgccttctgtttccttgtctgtgttatgcattggcatcagccctctgatagactaagtccccatcctaatgcttgtgggtgctatattttttcccaagactggctgtgactgccacttaattcctagcttgggccatttactctaactctttctcctccacagtcacttcacctcttgacttaatgaccagccagtgctcttaggtaacatctgtgtcctacactaggccaggggggatttttacatcttgttagcagcatagagctgtcccgcgttggtgagagacactstgaaagactgccttctcccatgttccagaagatcaggcaatgagtttctcttgccgacagatcatcaaacctgtctatgacgcttctattactttcccaaatgaaggttttcactgcaaagagtgaaggggctggctgtgtcagggaccatacttaacatctaaccatgttgcttctcccgttcttaggggtcctcccaccaagtcaaatgctacttttgcttttggtctggcaaactatatcyttatcattccctactcaatgcatagtgtcctctctgatattaccaactactgatatatggagcctttttwaaaaaaattctaaacaaaagccacttctatttcttgtacctaattattgccaatcaaaatgtcttgggctctaaatctgttgtatgatctgtagccttgattaaaaaccattttttgaaagtcataggtgaataatttttattctatagtttatatctgtcattcccccttttttgcaattatatacctcaccttcatagcctatttgtagtgagaacaaagtgcttaaggaaaaatattgtgaaacagaaatatgatttcagtaatatttagaaatgttttccaactgcaataataaattggagtttcttaatgtcagtttggaagaatacttaacagaaaggatttcccagtgatttaagattctctatttgattgaaggatgtttcttagaatattaaagatgatatattatacattcatataataaacaattaccatatgacactgtttgagtgctgggggtgtaggagggaattaaaaaaaaatgtttgccttcatagatcttatattcttgattaaaaaagagaaaatatatacattagtgaaatatataaagggcattatatgatcatcactgttatggagaaaataaagtaagggagaatgttagaaagtctgggagaagtggggttttcgaagttttaaatagagtgataagaattcgaaaatctcgaggtggcatgggagtgagctatgtgtgcttctgggggatagcggtccaggcataggaatggtgagtaaaaagttcctgaggctggaatgaccccactgtgttcaagaaagagcaagaagataaagttacaagagctggagcagagtgaaggaggtagagaacagaaagggatgaggccagagagatcatggtggaagaggtagtgataggcagattgtgtaaggcttctccatccaccatagggaatgtggcttttattctgagggagatttcaaacagggagtgacatgaaagactcagtttttttttttttttgagactgagtctcactctgtcgccaggctggatgccaggctgcagtgatgtgatctcagccccctgcaacctccttgtcccgggttcaagcgattctcctgtctcagcctcccaagtagctgggactacgggcacacaccaccatacccaactaatttttgtatttttagtagagacagggtttcactgtgttggccaggatggtttctatctcttgaccttgtgatctgccctcctcggcctcccaaagtgttgggattacaggcgtgagccaccacgcctggccgaaagactcgctttgtaagtgaattgctctagttgagaatagagtgaaggggagagggtataatgaagagatgtcattcaggatgctatttcagacattgaagcatgtttcagaccggagatgtttcagaccagggatgcagcactgtcggtcaatcgaagtgtgtatgtgctgggcatatatgtggaaatcagtcatacattttgggaaccagtactgcatcttggttaaaaaaaatcatggctctgcagtcaggcggcttgagttcaaattgtagtttgagtgcttactagcaatggaatcttgaagaattccactaaagcataagctgcatgaggcttttgtaaggattaaatgagaaatgactgaaaagtaccaaagaaagctccctagctcataaaacttaaatcattacctggcattattattgctatggtttctttccttattgaacttgagaaaagttggaatcatgaagcagtaaggtttttttttttttttttttttttcatggtcttcttttagcccgtgaacctgggaatattttccaaaaagctgaaagtgcttttcaggatttgtctggcataggtacttagaagtaaaatataaagccttctgtttctcaagtcctgcacttggttttccagtgaaaagccacaaaaagatatacttggcatcttatggttattgagaaaagggtgtaaaaataaagttgtgatagctctctcacagcaggttgcttagttcttaagcctgttctttgctaatctgtagtatgtgtttgattcctgaatgggagctcagtaagaagaatgaaggagcccagcatctgactggcaggcatattggactgcagccttgtcatgtgcaaggcagggagaacgataccattgagagtagagcagcactagctgtcatgcattcagcacttaagtgtgtgccaagccctatgcttgcattgcctctcaccatgcaatatggatgatattatccctcaatactactcagcttccacaaccataaacaatgatctcctgaagaattcttgtctctcatcctggttttcactgcagaaagagctcgtgtcagtcttgggcaacatcagctcctgaagcgttcttggcatcttagaatcacacagaggatgtatcatgcagtttgagagtctctctctttcctaagctccaattttgcagttgcctttagtatggcttccaatccttctgcttagaagcatttctgaacttcagatgtatggatgtacctgctttaccacattttcatagttggcttaagcaagagatctttttatcttccttcmtaaatcaactttcaatattcttaaatcacctttgcagctcttctcggaaatctcttagatttactggcctgttttggtcctgtaggtactctgctagatactgatgtgcagtgtcgtgtactctgatggcattatgtaggagctcattcatacataaakacaggataatcagagagtgagtgatgggtcatgaaactgtgtggcagctacttggccattgcagaatattaagatttttgcattttaccatctggaagagtgaaaagagttgaaraaaataaaatgtagccaaatggatcatttaggctttgaaggaccaaagtccagctgttagaggcacatgggggtctccagcagttactctatcttgaagggactctcaggtaagcaatatttcagaagatgattgaatctcggtgacttattctcctccacctggatccttaatgtagcagcaaatgaactcggtctctggaatttgaagttcatgcccatgcataaaatgttaaagatgactttaaaacagacactccattcatcttcccaagtttatgggactgtcaggaggccagaggcacaagtttggaaacatcagaagatttatcctccaggaaatggaaattaatgtcccatcttaatctcagccatcctcctcctgtttatatgaccacattaaatgatgaaacaatggattgttatcatcagaaggctgactcatagaaaagggagagaggacagcagcatttgctttgaatcctaaggagtcagtcatcaccgatgctggggaacccataagcaggtggtgaggattatgggatttatcagggaaggctcaaatggggctacycaccagctctgttgcataggcaggaagggattagtagaagagtcatgtcagcagcagctgcgtgatgagatttgtgacaaaatgtggtaaaggatgctgcatgaactacttttgttggtattttcccatgatgaaccataacagagggcttgggtctccctcgcttttactttttcctctagacacctcatggagatagagcttttctttcccatgtgtttactctcttctaggtcactggctatcttttctttcatttcactcaccaattgtgtgtgtacgtgtgtgtgtgtgtgtgtgtgtgtactttagaatagatacctggctgtattggacaatcaattctagatccagtgttgcttctgacagcgtctctttctatatcacttccactgggaataacttgggttctacatcccagctcagaatcttactggctaaccctttcagaaatctgcttatcaaaataagggctttggttcaaattatgcgtatagtcaatgaggctgttgtttctaattttaccatctctatcatgcccagaatctcccaaccccagctaagcatctaggcttagtgttggaaggttctgcacagttgaaaaataataggggacatctatctgtagctttaaattttacatagtaattaccttctgtcatttaatatctccaaaaatattggaagatagaaatggtttttattgttatcagtcataattgtcatcattagtactatcattattttactcatgaggaaggtaatgttcgtgaagccgtgacccaacctgaattacaagtccaaactcctctgtgctctctttctacagggacaatgctcaaaatgattagtcacataagggaaacatttgatttctccacaacttacatggtaactggaggctgccatgtcccattccattttcctttctcctttacttcctctcttgtggtgtccaatgagtcctatgcttctccagggttctctttagggatgcataaactaggacaggccactgctggggaaagtgctcgcagtgttcctgccccctgtacaaggaatcgtgaatgagtgggaagagattaagaaggctggttcatcccagagagagacctgaacccctctgcgtggaagccatcaggctctccaccttctttcattctataatgcctctatgtcattgttgggtgagttgcaaagtgaaataaacacaggcttaagggatttggtgggtcgatggatcattcttcctagtgccctcttcacaattaagtctgaaaagagccgcagccatctgagagcccttttaaaaattgtaatgctggatggaataagtattgttagacatgggtgggttcattttgagactgtaagaacttacagtaacttgaatctagttttgtgccatttttcttgtgttcagtgctttatgtggttaaagatggggtttgggaaaatatagatgtgacaaatatcattgtattcattttacacctggaataacctgtttgcctttgcctgacagcatcagacttaaatccttttgtctttttgttaggttattttacctttttttcatttgtttattccttccttaatttatttatataagaactagtttgagtcccctgttcaaggtttggctctgtgctaagtgatgaggatacagcagtgagaaggaaagatattttctgactcgccagaaatagtatctattagatgatattaaagcacatggaaaatatgttttaatttctgcagatttttaaagacaagatagattttcatgtgtctaggataacttaaactagtcttttctgaaggtcagaaagataggctatgtacactactcatatgtgttggatgggaatcacataataactagaatatctatgccactttttgtttaccccataaacagtttttagttcatgtcaagtaatatgagctttactattaatatttgttaattttatgaaaacattggatttaacttttagtttgccttaacaaagacgccagcaaaacaaaattaaaaagtaaaattctaaaaaaaataaaaggtttgtcatatacttaaatgaaaaataaaggaatttggctttgggtgattatgactattgatgttttagaggttagcagttgatcgatccagcctattttccatgaatgtcttttgtatatcacaagattctaagtcagatggtaatggtaatttgaattagattaatgtatctattaatattagtaatagaattaataatagaaacaaataatcttaataacaaataataacttgctcatattagcttaagtagaggaggcactgattggaaattacacagatccttaaaattctaggaaaagctgaacaggaagtttctgggaaatggaggaaccatgacaaattcaggggctacaatagaagttgttcatgaaattttattctaaggccctaccatttatgtaactcaaactctgcatctaaattacagatgagtaggagacacatgctaactgtcccactttggttcaattgtccatatctcttccagtgatctgtgcccagagattaaagacaaaaagccactgatcatccagcagtagcgatcagagctggctctgagaaaaggtgggtgaaacaactgaacaatatgcctactttgttacatcgttggcctgccgtatccatttgcgttatttcccctgtgaactggaaatactctagaataggaaaaccagtcacagacatcagacagagagtgcctgccatgccccacccaatcagggaaatcccaccgtcccccccagggcctgccttcagatgcagtgcattgagtaaaagctgcctgtggtcattgcgtttcctaggggaggtgcttgcctccctaatgtttatcttaattttgtctcacaattctgagatctatggataaaatggtgaatttaactacttccagtgtaactgtgcagagtattcaggggaaagggtgggaacaacaacaacaaaatcaagcctttaaaaaaaataaattcaggccgggcacggtggctcacccctgtaatcccagcactttgggaggccgagaccatcctggctaacacggtgaaaccccgtctctagtaaaaatacaaaaaactagccaggcgtggtggtgggtgcctgtagtcccagctactcgggaggctgaggcaggagaatggcgtgaacccgggaggcggagcttgccgtgagccgagatcacgccactgtgctgcagcctgggtgacagagcgagacwmcrtctcaaaataaataaataaataaataaaataaattcagctggttaggcaaattacccaacccacagcaattgggaaactctagcaaccaaaagggaaacaggcaggagctatgggaagrtttctgcagacagttaggaggcctaagccgatatttattttccctcctcggctattaattccatctttgccacatcttcatggtaaatgttacctttgttcttcaaacgcttgacttctcatgaccttccctatataaggttctagaaactttccagttaatcttgtgctacttgtcaccttctttatcttcactattgctgtatattgagcattgaccaggtggtaggaaattgacttggtatattacatacattcttattcagtctttacaatgactcaagatatggtattatttagagagaagttagtgactattccgttaggttaaaactgtctaatattactgctgggaagtaatagaaccaatcaacgtagatgtatcaggaactttccattatattacattgtcttttatttattaaatgaaaacatgtttctccaggaacactagacatatggatcaaggataaagctacttaataagactggactggccagagccactgtgcaataccatgttttccaggaaaaaaaaaagaaggattgtttgacccctctgataaggctccatgtttgaggggacaagccaaatggtggcaggtgaaatgtagtgagttccttctgttttataggggacaattattttgtctcaccaaagacaaccccaagacggacttaaagtaaaagagatgaagccacaaaagaataaaaataaaatytaaaattgaaaccctcagtctagtgttctttccatgtctggtagtattttgtttttgtttgtttgtttgttttgagacgaagtcacgctctgttgcccaggctgagtgcagtgccgtgatctcagctcactgcaagctccgcctcccaggttcacaccattctcctgcctcagcctcccgagtagctgggactacaggtgcccaccaccattcccggctaattgtttgtatttttactagagacgaggtttcaccgtgttagccaggatggtctcgatctcctgacctggtgatccacctgccttggcctcccaaagtgctgggattacaggcgtgagccactgaacccatgtgtctggtaatattttctaggtggagttaaataatgtgactaacagagtgctgtattcccaaaccatgctggtaggtcacttaatacaactaatggctatatgatgtatgtgttcttccaattgctttaaaaaaagagaaccatataacccaagagataattcagatgtgcctaaagtccacagctataaatggcgaagtcaaaatattgaaaatgttgaatctagacctacttgattcctaattaatggtctttccaacatgccatattatttatagtttgataaatttattatttgaaatataagcaatataggataattttaggatatctcaatattttaagctgttatgtagtaacttctcttagttattaaaaacttgtctttaaatgaggttaggtatccgcccccaacctcccaaaataatccacctgtgtcataaaatgcatcatctgctcacttccaagctttgagaagtggattaattttgcatmtgtatattcacattttttgtagtcttggctgggttttactataatatacaatggattaggacttctgtttgaattgtgaaactattaaatgattccatgtctctggaaagcaatgagccctstaggtattgtgcttagacgagattacacagatgcttctccagtgcccgaattctctccactgtgaaaacaagctttgaaaatccttattttgacagcatctgtgaagtgctttaaacctcaagtcacttctaggctttggacttctttatccaactgcattcttttcaacaatacggcttggaaatttgtttggtagtggggaaaaggccttggtttgttttattgtcaaattccaattgctttgtgagtgattgtacaatgtagagctagtgtcttcaatgcagttgcctcggcgtaatacaaaatgctcattgtctactcttcttgagaaaatcattgtatggttgttgaaaaggattcttcatataattctacagtgttcagccaagtaggatctttaaagatccatcttcaatgtgtcacatatgtttgggtgtcaacaaacttctgtattttctgagctggagtaaatgctctcaggaacttgtttcacttatccaattctcttcaaaactgcccttggcatttttttatcccatatgtcttcagagtgacatctatctcccttattgtagcctttaatgaggatgttatttgatggtaaataaattatttaagtgtttaataaaataaagcacagtatgattgtccataaaaggcaagctgcaaaatgagctctaatcatgttcttctgttttggaagtaaatttcacaagtatttgcataaaactaaccattttcagtcttaatgatgagtcaccccaatttgaggagagccatgttaagtcagtagagatattgtatgttgatactctggccaatttttatttgttgtgtttaaatggtattaccggaggacgaatcaggcttttgtaaaaaggcaatgtagttttcagggtcctcgagatagagtgatttagggaaacctagagacagaagaaatatttagtgacatctctgtctatctgtgtctatctctgtctttctgtgtctctctgtctctttctcttcaattgtgaataggctaaggtacttgtgcttctaagattttatgaatctggaacccaggatctcttcaataaaacaaaagctttgagggcttcacactgctctgaacgctcatcaagaccagacactggtttcagaagctgtgcttctgaaattttgcatgccctagagtttatatctggtagatcatcaatgttttaataagcttgtaatcagagtctcatgaacgattgattctagtgttttccaggaaatgggatagattagagcctcaaataattttggaagctgtagtttataaaaataaactcacagtaacttttgaatacttagtatttgtggttttgtagaatttacttagtctcattatgggtcaggaagttagttaagaaatacatcaaggaatgcattactgtacctctacctttcagatggagaagtcaaagtgtggatttgattagcttgcatttgtaactattgtagactattattaaccattcataaataaataaaaataaaattacattttattttttcatgttctattttttttacgccagaaaattcagtaatctctcttctctctcccctcttttctcttcccatacatatacatacacaaacacatctgcrgtctttatacataccgtggcttaaacagagatttgtcttctgagactgagaaatagtatagttcttgtccatttaaaaccttttcctggccaggygtggcggctcatgccggtaatcccagcactttgggaggctgaggcgggcggatcacgaggtcagcagatggagaccatcctggctacggtgaaaccacatctctactaaaaatacaaaaaaaaaaaaaaaaattagccgggtatggtggtgggcacctatagtcccagatacttgggaggctgaggcaggagagtggcgtgaacccaggaggcagagcttgcagtgagccgagatctcaccactgcactccagcctgggcaacagagcaagactcggtctcaaaaaaaaaaaaaaaaamaaacaaaaaacaacaaaaataacccaccttttcccctactgtggacattcacatcagctctagttaatattctgtatagttttaggtgaatacagttgagaaagttgtgttaggtaggaaatggaaggatatgtcagagtaatccaaacctgagtgaatatccaacagcattccatacatttcaccttaacagcaggttgagagggccatgctaaagccttggtgtcatgttcaaacccttcgtataaccccattccagtcagaatcatagtagattagcrtgagtcatcccactcccctctagggcctccttttacagtgctcatatgcagccctcatcctcctgccctctttcctttaaagctgtgagttccttgtraagaagaaaagctttcacttagaataactgctcacctgtaaggctaggagtaggttaagaatcttctgaaaatgtgccccatttcttagaattgtggaagtaattggtctgaagaattccttgggttcacaaactactaatggccacattttagccttgtaaagataagaaaaaargtatgacccatgacagtcttatcttctaagtggttgtgtcttagtcatcaagggttttaacttaaaaacatgtttagtaaaatgggattggaataataatatgagaaacaatacaaacagacaataaaaatcatttgaaaatcgaatggaaaaaattgaaataaaacacaaccagaagtctaatttgaaatatatgagctataagattgacagtccacaatgattttacctcataggatgttgctttagattttattcttcctttcaaatctgcttaccacagttcctagttctcctcagagacagaggcaatgagccagaagagaaaacctccatcttcattttgttacctttccwttgataataataataaaccctttcaaatactgtattcaagcagttgactttctttttttttttttttttttttgtgagttggagtcttactctgtcacccaggctggagtgcagtggtgcgatcatggctcactgcaagctctgcctcccaggttcacaccattctcctgcctcagcctccccagtagctgggactacaggtgcccgccaccacgcctggctaatttttttttgtattttttctagagacggggtttcaccatgttaggcagggtggtctgggatctcctgaccttgtgatctgccaagcagctgactttcacagatttcttctcacatcaagaaatccagctcttggactttggacttaaaggacatttgtaaaaacaaaacaaaatgaaacaccaggccaggtacagtggcttacacctgtaatcccagcactttgggaggccaaggtgagcaaatcacctgagctcaggagttygagactggccaacatggtgaaacccggtatctaccaaaaatacaaaaattagccagctgtagtggcacaaacctgtaatcccagctactttggaggctgagtgaggcaggataattgcttgaacccaggaggtggaggttacagtgagctgagatcacaccactgcactccagtttgtgcgacagagcgtgactctgtctctaaaaaaacaaaaaagaaaagaaaaaaaaagaaaggagaagcaccacttcttcggagtagtaaacaaaataaaacaaaagtcttcacctttgaacagcactgtgtgaattaaaatgataattaagtagtataaacaccaataacaaaaaactttaaaagcaaagcaaaacaaaacaaaacccaaccaaacaaaaatctcctcttaaagagtaggaaaagtaaagttccaaacattcgaggccatttcattttcacctcagagcctctgagggcagtcaaggccctgttctgacaggtgggaaaccatgccttgaggacagaaaaatctttgctctgagagtttccgaaagtgcaggtgtgattaaaaatcaaacaaatcctgaaattaaattgaaggaaaactaggctattcacaacaaattggacaattaagaaatggtgctattgcttcaaacatgccaaatgggaaactgccactgtctctttggaggaagtctcttatcagttttatagtgattttctttcttcccaaacatacaaacacaatattctgcatgttatctttgctgtgagtccaaagacaaagagagaatttttctagcactttcccgctagttcatgtagctcacagcaatggtttcctttgtgaattcttctctgtggttttctggttcatgctaatacctcatgactgagatagccagaggaagggccaattatctttgagttgttcttgtattttcagttgatgctattcatgcagttacttccttattcttttttcttctgatcatgctttttttcactctttttctttgtgtctttgtatatttactgtctcaaaaatctgctgcatttataaatagactaagtgatagccataagcaacaatacatgaactattagtagctttttctgaataaggagagaattaattgctacagaatgcaaagaaagaaagcagcattcaagggtctaagttctcaagtctctcacccacaggaggcagatttgaggagtagttgagaacagttctctaaatggaaagtcttgtgggtctatgcaacaatggtttagtatagtgatagacatgttcacatcatatataaaaagcaatcaagtcaactttcctctatttgaatgaattatagaaaattccctgtgaagaaattcatggcagattcctattagataattttatttggggttagcctgtgacgtggtaacctgagacgtatttcaggaaaaattttcagatgtcttcttactttaccattatccattgagttgtaaagtttgatgagattggattcttctagtataggtagggaaagattaaagagatagttcagcagagtgtttagagatacagctttttggattagatctgaaactgaactgcagttatggtactgactagcttatgaccaagttggttgacttctctgaacttctgttgattcatgtataaaatgggaatagcaatgatatcttttttttatggttgtgtgactaaatgttatgataaatgtaatatacttaacacagtaactcttaagaaatatattagctataatcatgaaagacagaaaatgcagaatagaaagaagggtcctggtgaggactgacactctggtaacaaaaggtgccttttgagtttcctataagattttattgagatcagttgacaacatgaggttaaaattcatttaagagattgtgtgttattattgttttaataactgggttttaaggatgaaaaagagcagaacttgttaaaaattgctttttgaaatatcatagcagtggaacaactttcagctcttgtatgtaaaatgtctctgatggaagtgcaatactttcttattgtgtcggttacagaactgctgaaggcctttcacataccaagctctttataaaataatgcactgtctgattactcagtggaaaagcttatcaataaatatgttgttaccagaccacacgcgactcagggaagagtttgtgagtggttgttcaaagagtaaagtacaagatttttttaacctgaggacaaaaattgtctttaaattcaaagtattgttagtgttcacagtcccttctggctaatgctggagtgacttggggtcaagggagataatctcattttactagttgcctataggttgcagacagtatttctgggagagatttaatgcaggggaacataacagaaaacgcttgcttggcagtgagaagactacacactgcaaaacaacattatggcttaatgtcagccactcaaagcactggaggttttgtcattcattggaagactttgaggaagctaatgaaatacattagaagcaggttgttcaaaatggtcctaaaaatggaaaagaacccaaatgtttattgcagcaattttattgctgggaaacatgggctttatgaccagagtgtttgtaatatattcatttgtgtctctgaggaatttcagactgctgagaattatttggattgcatgagcataattatgttacaatttgaaagctaaatctctcttgttttttatcatacattttattttgttaatcttttaggtgggagctgctcatgaggaaggttgtaagctagccaaaggcaagagctggggtccatccaagataccttaattattggccagtaaatcctggcttctgtgttagcttggagttctccttttggtgatgtttctgtggcgtgtgtactgacttccacagagctgtcaattttctagggttctagtcagattgattgactcactctgggccttcctggtttgcttctgaagtatctgtggcctcaaatttttatcacccatttttcggaattggggcacaaatttcttctgagggttaattagctgacatcccagcctctagcagcctttctgtgttctggctctttgccttacactggcaagatgtagcaaaaaattgttagcagtgatggttcctagagcaagtggtgactgttcacttctttcctgtcttcttcaggaatcagtactgagatcaggggaagcactaataccaaccctccattatgacaaacaatgtagaatgtggccattttaaatatgtgtagtttgtagtcacttaacaataatggcctaattccagaaagggtctgtattggcacatccatggaactcttccaaagaatggtaaaaatcctatatttagtgaaaggtaccatgtctttcagagtctttctttatgatctcaacaccagtttttttttttttttgagacagagtcttgctctgttgcccaggctggagtgcagtggcgcaatctcagctcactgcaagctccacctcccgggttcatgtcattttcctgactcagcctcccaagtagctgggactacaggcacccaccactgtgcccggctaatttttttgtatttttagtagagacgtggtttcaccacgttagccaggatggtctcgatctcctgacctcgtgatctacctgcattggcctcccaaagtgctgggattacaggcctgagccaccgtgcccagccgatctcaacaccatttttaagcagttaactccttgagtaccttttgtgtaatttgtgaaaaatacagtaagataaaatgtgacagctgacctcagaggatctcaagctagttgcagagagtactttacacaaatacaaccacagtgaaacagtaagtggccttaatattgttaagtgctaaattaggaaatatgggttgtagttttcttggaagaggagaggggtgttggtaagtcaagttcactgatggtcctgaaaaatgatcaagtacaaagctttaggtagttcaaaatatgaagagtccctgggcatagatgggagaaaaatgaaaagaagatctgatactgagggagtgatagagaacacaactgaatggaagaggtgtgtccagaacaaaggcattcattgtttttggaattgttttcatcaccagagaatacttcagcctgagatctgggcaagaagctatgtagaaggcgttcacatgcaaagtcccgatcctataattgagtgtccacaaacaggcttctgtcccttgagtgataaattagcttctcatttctaatcttattttgaattgtctgaaatctgagctagaactaggctaaattgaatgagtaatcttttttattttattttatwtttttgtcccaaacacttctactactccagcatggaacctccttttactgagtataagttatttaacaccgtggtcttagaacatttaaaattactatagtaaaatatttttattggtgaattactgaaaatagacccactgtcccaaagtattttacacagtatttaatgttgtacatcacattggaaggacactttgaaactaatatttagtgttccttaaaattttctaatttctctttactcacctaacactttatattcatcataagtgattaggaaacmacaattccacttaacagatgaggaccatgaatttcccagacattaaatgatggtttggaattgcaaaatcagtgaaaaagattttcctgattttttaaattctcaccctaattctctttctaagcatttgcctaactttcttcctaaatgcccccttcttttctaattaccatatgcttatctaaatctcttcttttccattgccatatgtagtatatttagagtagattttctggaggcagcaaagcatagtggttaatagggaaaactctggagtcagagagatccagtgttgagaactgcttctgtgtttcatagagtaatggccttgatccagggactcacctctgcatttcagttctcttaactgtgaaacggatgtaagagattcttatgagggttaaatgagatctagtatgtgaaatgcttaatacagtgcttgctatataacaaatcttaaataaacatcaccaattattaactgtctttataaaatatgtacgttttcctaagtttcatcctgcacttgttctatgtaaacatctaaaaaaaaaacacagaaaaattatgcctttacatttatgaatttgaaaataactggtgataggtaagtagtagcagttttataagaatagcaagagtttatagtatgtatttcttaagcatttttaagactgagtttagaatgtatacaacaggtaaccttaaatatgtcatctaattggaccgaaaatagttattaaatggtattcaatgttgaggatttgattacttaaataattattttcaaaactagaaaaatggctaaaccatatactggacctcagagacaccacaggagaaaagctagtaacacattagaggggaaaaataaaacagaaacatgtgaaactttaggtcaatagaaacagtctgaaagtatgaaggaagataaaagtgattggttgtgaaaaaatagagcagatccctccgaggtagagtcattagaagtaacacatgcaaataatcaagctgctttcatcttgaaatagcataacaggtaaagtgtgcatatcagatgtgagcactgcaatataagatttttcgcaaaggagttaaatatattgaatcaacacactaactattctcatgatgaaaatgttttagtcattccaatgtcccagactcctcctacaacattgtaaaatgtggcttcggggatatagtagaataacagccaccatcagaacctcagaaaagtaaactccagggaacacctaggagcgtccacttcaccatgatgttcacctcaatgggagctaaaataaaatatgtaccttaatttacccacaaagagctacatgttgttctcccaaaagcccatccctgggctcattaaatgttgactcacaacaggatagtgaattatgctaatgaaccatgtgaataaacaacttgctttcatatatgagtaattactaggaaatgtttgttggatgaattaattaaaatttgtttaaacattgtgtgttgtagtttgttcaaatattgtgtgttactgttttgtgctcgctggtgtattgtgcatacagtttagaagagattactatgagaaataccagtgctgtaaaatattaataggtgttaaccaaaatattaaaaaagcttccaaagtcaaacatgtttgggctatgctggcttatgcaatattaagtagattccttgagtgtaggactttggagactttaacatgctaatatgctctatgaatcaccaagaaggctatagtactaagtttatttcactatagcataagtatttagatacagtctcatagtactaatgttctagcaaatacggtgccgaaaacctagcaacagactttagtattcacagtatcactaacctgtgggcagctggctctcagaagcccatgatctgagataattggcaattttgtcaaagttagtatttgaatttcaagcactgtacagaaagtcacttaattagtagctattccctatattcttgatttttttttggtgtcacccttttgaaataataaagttttgtttcttttctcaaaaaggacatcagaagaaagtcagctgatatggctggtgacaataataaaatgaatgtgaagctccctaagaaaatcgttgcctgaaaatggaaagtgtagagagattaaagagcagaaaattgaattcagctgtagcttttcttgatgggaacacacccaccatgtaatttgtatggaaacaagaaagaatgattgaagaataggtttcagtaagttccccagctactgcaaaagttgctacccatatatatatttttaaaaatttattgaaaggtacaaatttagacaatttctctgtgaatctgtgcataggaaatgtgtaactttagaagcatatgaatggagaaattcaggagcccaaagatayatttctgtgtttgtgaatttgggaattcctgacagtcttcatgattttttctgtaacagtatcaacaatcctgcttctataggataatgtttatcaaataccctctgccatcttctgtgcctagaacatttattccaawgaaagtgttgatgtcaacttcacagaagaggaaagtgagattcagaaggcacttaaactgcatcatagaagacctttgttttcattaggctttgctttcaatccgtttcatcatacaaaagttggaaagcaaaaccagactaattccaaactctcttcactgcatcatgctgttttctaataagcaaatgactttttaaattgggattaattatggagccaccatttctggcttgtgctctcattacctcaagttctcgattttaacatataaaattcaaattcagtatattctaattagttataaaaccaaactgctcagtttacaaaactcccaaagaatatgttgaagtttttttccatgcaaatgtatcttattgaaatgtcaamtcattgaggctgatttatagagatgtagatcatcccacttttggatagatgtgccttgaatatctactgtctaacaaacaataaacacttatcaataaaggtgagttactgttattgatgaaaacagtcagagaatatactttatttaaaaaacatttacaaagaactcttaaaactcaacaataagaacttaacagatatgccaccaaagaagttatacagatgacgagtaaggatatgaaaaaaaatgctgcacatcgtatttcattagggaaatgcaaattaaaacaacaataagataccactacacatgtatgagaatggccaaaattgagaacactgaaaacaccaaaagttgacaaggatgtggagcaacaagaactcttcttcattgctattaggaatggaaaatagtacaaccactttggaaaacagtttggtggtttctcacaaacgaatcatactcttaccaaatgatccagcaattgcactccttgcaatttatccacaggagttgaaaacttatgtccacacgaaaacttgtacaccactgtttrtagcagctttgtttataattgctaaaacttagaagcaacaaaaatgctttctggtaggtgaatggacaaagaaactgtggcaccatccagaaaatggagtattactcagccctaatcagaaatgagctatcaagtcatgaagagacatggagtaaacttaaacacatattactaaatgaaaaaagccaatctgaaaaggctgcataatgcgtgattccaaatatgtatgacatcctggaaaagaccaaactatggagacagtaaaaagatgagtggttgcccggtgttgggggagtgcaggagatgaataggtggrgcacagatgattcttagagcactgaaactacttcgtatrttataatggtggatacatgccattataaatttgtccaaatgcatagaatggacaaggccgagaatgaacctcaatgtaaactttgtactctgggtgatgacgatgtgtcaatgtgggttcatcagttgtaatgaatgtaccattctggtgtgagatattgataatagaggaagctgtaaaagtgtgggagcacggaatatatgggaaatctctgtaccttccattccacctaaaactgctctaaaaaataaattctatgttaaaaawaaaaagtccaagcccaggtgaaatgttattttctgaaagtaaccttctttgctttcccaaccatatagtactggtgtccatagtgccacatgacatttagcatttctttattgtttttatgggaggcaacatggcctaggtaaatacagaggattgggggtcagagtacttggaatcaaattctgcctccagcatttactagctatatgacttggataaaatagcttaaattctctgagcctcgctttctttatctgtaaaatagggatactaagacttatctgccttatagattgttgtgagcatttagcgatttaatacatatcagacattttgaacagtggctgccagcattagtattcagtatgtagtagttgttattgaattcatgtctctaagtctaattgagggtaaactcaattagatggtagaatcccctcaattagagggcagaatccttgagggcagtggccatatctgagtcacctctatttggcaaattataggtgctggataaatatttttattgaagaaatgcattaaatgaatgcctatggagattcatctcatagaattttgctatattttaaaaatgtgtttttaaagtattgtaaaagtcagcggaaatgctccttagaaaattagttgcatctctttatgcttttattcatggtctttccaccttggctgatctcatctctccaaatctttttctatgtttaaagtagtatcattaggaaagaattatacaagaatatctgtgctgtatgcaattgaagccgtagctcattgtaattaaaagtaattgagaccagacagtgaatgggttttaataggaacacagcagacatcacccagacagtgtcctggtgctttcctagcccagtgaactctagtaaccctgcagcgttagggcacaaggggcctttgtatcagtgtcattgartatcgctgagtgccctactaggaaagtggcctttttagaaggagatctggtgtcccgagctggctgtggatagtaatatagagtagttaagagcacagggttggaggtcagatatgcgtttagtttctgggcaattattcaaacattcccagtcttgttatctcggtggttcttttttttttcttttttaatttattttgttctgtttaggaataaatatataatatttattctagatctctagagttaacgcaaataatgcaagtgttctcgttctctctctccctctcgccatgtgtctatatatgtgtgtatatatatatgtgtatgtatgtatatagaaatatatgtaagtatatgaagatatatgtataaatacatgtatgtgtgtatattcagagagcagggaatttgtgttatgaagattaagtgaaattacagattatattaactaaatcgttacactctagagcatagggagtgctcagtgcaggtggcggggttattagccgttccaaggcatctattatgyagatgaaaactttttcaattgctgatttcagaatttaacaaaatctagagacttttcattgagataatttgcgtgccagttattattagctccaaacctacccttctgcactctgctttgggaagctggagaggcctctgcagccttcctgctttgcctgcaggctccctgttaagctctgcaagcagagggtgcttcaggaagactgcagggttggaggaggaggtcagggctggttccttatttgctccctgtctccttcctgttaccctgagcttcatcccagcaacgcatcttcacttgggcagcaggagttctttcctgtagctgcagctgcatccagtttgcagtttttccaacactccaggaacaaattgcmtggtgttccaccagagatgccagaggagccatgctgcatcccatcttcagagttttacctcattgggtctctcctctatatttctgagttttcatattgccaacctgtttccattttcccctcagccctggggtagctgctttctgtagttgcttcctctgtaatatcttcaagttctctttttacatcttcaattatctagttaacaatagtataatagttaacaattcttcaatttaaattctctctgtttaagtaagtgatgtggtttctgtccgctgactggactgactagtgtgagtgttaggacctgtctttgttagtagtgccagttggcaaaatgctaattgaagggtgctttcataagtacagttcttagatccaaggaagtagattaatctagagggatgattttccagggatgtggtgcgcccagtgacaattcaacaaagaaaagatcacatttttcatcagaacaactgtaggaggacatccttattcacattgcaagggctccaggggtgaaatgactcaccataatgcaggcaggtgtcctcgaagaggttcataggttggcttcaggggattcacataagctcccacaactctgtgtaaaagttgagtacacagacacttttcaaaggagaagttttctttttgttaagttttcagtggagccctggcccgtaaaagcttcaacactgttacggtagtaaaggagatatagatggataaaaaaagaagaagaggcttgagaattatttggagagtgaacataaataaaaacaaccacttaaaaaaataccagcatttttttttctgccgtaaaggctggtgctgcggaggacaaccagttttctctgccagggtccatgctccctcttttggcaacttgactctgaggcatatggactgtgactctgactcctgccggtcactgtcgtgtgcccagccttagactggatatagccaaagcaaatgtttacgttttgcatttttgcattatttagtgtcaagcacctagtagatgccacatgaaagcctcctggttactgactgaggtcagtagcaagcctcgtttatgggactatttttttttttaagatatcttaccttctattacaataattacaaatctctttatatagcatagctcttcacaggaraattatatatatatgtatgtgtgtgtctgtgtacatgaattagattctccaaaagagtattcagtaacatagtcattaagtaagtgataatgacaatttttgttttgaaatttttgctttttgaaattttactgtgaaattttgctacagttcaatcacaaacgaggtattatttttctgtattactcgtgttctgtgagagccaatagaatggatttaaagaataaaagaaatggattttataaacgatgaaagtaaattatttgtctttcttggaactctgattttgtagccaccaaatcatagtaggaggcctagggaaagatgctttaaatggaggataagtgcgtgacacttagcttttaaattctgcaattttgttctgttatttttcattaactctttttatctcatagtgcagaaagagaccattaagtgggagtgtaaaagtgtgcagctactgtgaaaaccactttgatagtcactcaaaaagttaagcatggagttaacatgtgatccaataattttactcctagctatgtacaccaaagagctgaaaacataagtccacacacacacacacacacaaactgtttacgaatggtcatagaagcattattcgtactaggaaaaatgtgggaacaacccaagaacaaatacactgataatgggatattactcagccataaaaatgaagtattgatacatactacagcatgaagaaaccttgaacatattatgctaagtgaaagaagtcaggcacgagaagtcacatattgtatgattccacttatatgaaatattctgagtagacacttccacaaagaatacagacagaaagtagattcatggttttcaggggctggggaattaggacagtgggaagttactgctatggggtttcttttggggtgatgaaaatgttttccagttagattgtgatgrtggtcacacaaatctttgaatatactaaaaagcactgaattgcatgcttttacatagtaacatttaggatatgtgaattatatcttattttttaaagaggcagctggtaaatattccttctttgcattgaaggtgataatcattgcataagacattgtttggattctgtactacttctttcaaacaaaaackaatttatctaattcaaaggtgctttttaaaaataggcacatgggccaggcgaggtggctcacgcctgtaatcccagcacttttggaggccgaggtgggtggatcacctgaggtcaggaggtcgagaccagcctggccaacatggtgaaaccccatctctaccaaaaatacaaaaattagccaggcgtggtggtgggtgcctgtaatcccagctactcgggaggctgaggcaggagaatcgcttgaacctgggaggcgaaggttgcagtgagccgacatggcactactgcactccagcctgggcaacaagagtgaaactccgtctaaaaaaaagaaaaaagaaaaaaaaggaaaagaaaagaaaataggcatgtgatttttaaaatgtagtctgcagcagaatttcagaaatatggaaataatagaggtgaattcagctctggaggtggtgatatggtaaacgtagatgtcacagttttgtaatcacatcccctcttctctgggtcatatatctctcaatgcatatccgggatgaccaccttagctggaggatgctgcactcctctggacgtgcttattcaatcaatagtatacccttaatgtcagaataaattcaacacacattttggattgagaactcagtttatagtcagaaaggtggatgaaataaccagctgcaacaacaaaataacaagtatgtgtttaggcaccattgggaatctatcagtgatgtgctgtctctcaccagttaggtttcatatatataattgcttattgtacttgggcgatgcctccctccaccccaagaaaaaaaagatcatggtgaggtttccttttttttttttttttgagacggagtctcgctctgttgcccaggctggagtgcagtggcacgatctcttctcactgcaagctctgcctcacaggttcacaccattctcctgcctcagcctcccaagtagctgggactacaggcccccaccaccacgcccagctaattttgtttttgtatttttagtagagatggggcttcaccgtgttagccaggatggtcttgatctcctgaccttgtgatccgcctgccttggcctcccaaagtggtgggattacaggcgtgagccaccatgctcggcagttcatggtgagctttctgaaatagattatagctcttgaagtttagagtcaggccgacttatgcctgaagtaatgctagttcaaatacttactggttggtcacttaaccttcagaaaaagactaaccatgttagtacctggttcctggtgatttgtcataaggtttaactggtataaggcatgtgtgacttcataatatcctgaggaattagtctgttgttcccccttgttatcgtccactgcttcaccaaatacaagcaggtagtgtgctgggagttcagttgcctcagtgaggaaattgataggaaaaacaatggttgtcattgacagatctttcaagtctttctttccaaaagcccagatcttgagtggattccagatttgcagtaaaaggcttcccgaaagcagattagaaagaattcctccaaactagggaggggaaggaggatgatgattactgaaagcaattcgcatgcctctcagtaacatcattttggtaggggcaagcaaaacctcggagaaagaatgagagagggagtcttaagagggctaacaaaactattctgtaccaagcttgccatggaagcagcgtttctgtttatttttctttgttcttcctcttgacacctttgtgagataggagctttgagtcatcatcatccttaatgttaacacttgagatagcactcttaatgtgccaggcactttctgagtactagcatatatttatttatttaacaaatatgtaatcctcacaacaattcacgtgaggttggtactatttattatctccatttcactgatgaggaaactgaatgagaatcagagaggtaaagtgagttattcaagatcacacagttaataattgaaagaacaggtatttgaactcagtccgattccagttgcttttatgtgctgttgcatgcctctcttaatgataaattaaatcattttatataaaatcatgaaagtagcagtttctaaaaagctgtatttatggactcaatttcatgcctactcttcctaaaaagcacacagcattccctatatcttatcaatatagttatatgcatacaaaaattacaccaattacaccgggatgttttggagttctcaactaatttattttccatttcaaagggactgttgctacctgcagttttgcagcaggaacaagtctatgaggccaatatgatcttttcccagatacacgcaaggattaggagatggttacccagataagtgtctgcaaactgcacagcaacctgttggaaaaaaaaaaaaaagttaagttgaactaagtagccactctttttcctaaggtttggatttgaatccagggaaactattaatatgtcagtaaggagtaaggagaaatgatagtacacatttagagagcaggtgagtccatgaatgccagaactcaggaaaaatgacatcaaaatcccacagctgaaatctctggagctgcttcatctccagtatgagtttgagtttcagccagctcccataaaacaatgctacctttcaaataaactgtctgtggttttactgtacccctcccacattcccaattttttatatctctgagttgttccttaactagcaaagagctgtgattgacacaatagggctagaacttctctgtgataatcccacctctagtattagggttggctaactagtaagcaagattatattacagagggcccaactatggctagaaagatgattttccatatcccaagatgacaagtcaacagtgtcaattctcctttccttccatttatatggttgggaacacactatttattctccctccttttatagctctcaatctttttttagagaactcagtcccattttgagtttttactaaaaggatttggacagtgttaaaaaaataatagaaatgattaaattactacaacaaagtatacatttgaatcttaagatgagagtcaaagyttaatgataattaactcaatgacttgatcattgtacttcattcctcactagccttgagtctccagtgtctagtgcaatagactcgtttgtagagccttgtagcagatggcggcttttcactttcagatagataccatatttgaaaaggaagactaaagatactaagtaatatttctagatttcctttcggcttgcataacacattcccatttcactcaaaaacatttttatttgtaaarcaattgaaggataatgaacatggtagcaactcacagagtagttttctgcctgaagggattagaggctcttggatcaaagtacagtgacaactccagggttaagtgtagaagatatttcatgaataaatggcaatagaaagtgatcatgatgcttggaaccccaagcatgggctcagagctacaactgccctctccattccagaccaaatgagaaaaggagtcaggtagattaatttgatgcaaacttaacacttgaaaaaaagtcataaaaatattagtgaccattaagagttccacctctcttcaaagattcagtctctgtagagactgagtgcttactttatgaaggtttagagaaatatgtttttattagaatgagaaggtattggttaagccattggtgctagaatcaaacagtctgggtttgaatcctgtctctgctactcactgagcttgggagcttgagcctcaactttttaaaatgagagaaattatagtactcatccttagcatttctggcaggattaaatgggattatggatgaaatgttcagcctagggctgggagtggtggctcatgcctgcaatcccagcactttgggaggcggaggccagtgaatctcttgagctcaggagttcgagaccagcctgagcaacatagagaaaccccatctctgccaaaaaatacaaaacaaaaacaaagcaaacaaacaaacaaacaaacaaaactatttggggagctgaggtgggaggatcgcttgagccctggaggcgaaagttgcagtgagttgagatcacgccactgcactctagcctgggtgactgagccagaccctaagaaagagaaagaaagaaagaaagaaagagaggagaggagaggagaggagaggagaggagaggagaggagagggagagagaaagagagaaaagaaagaaagaaagaaagaaagaaagaaagaaagaaaagaaagagagaaagaaaatgttcagcataatattagaagttttgaagcactcagtgttaaccgtggctctttttattaaatacgatttgctgcattctcatggctgagccaaaacattagttagggataccgagtgtgtgcaaagctcgcttaggctctgtggtgttggtagggaaagtgaatgctcattcatgttacagacatttcttggatttctgaaccagaagagatattagaaatgatttacccttatccatcccatccctgcctccccccaccctcaatcaattaatgcatttggcttgactaattcccagtcttcaacaacctgtcagtcaattatatacttttcctacctgagggaaacagtgaggagaagcaaatccactcgagctcatagttccagctgttcccagggaaacagtgcttgggggccggagttgccttccctcaggttctctactctgctttgccactatttagatggtgtccttaggcacaaaccctgaaattcactttcttcctctattaaataaaaatcacagtgactacccttcgtggttgtcttgaagatggatggagatcatagagatggaagctatttgcaaaaatagttaattcttctaatctgttccaggactagtaggcatgtataataaagtcttgtagagcttacagagatggcataattacacaaatatataacacagtttatcaacaccaaaacaggttgctgtctgcaagagaggagaaggaaagaatttagtagatctcacttctggatagatgttcaaaaatacaccttcagaggattaagtatgaataaaactccagcatataaatgcaggtcagtatacaagattgcctacataaactggagcatgatgggaagcagactggagaaaaggcttcgcagagcagtcactttactggttatcacctctggctcccaaacagtgttttcttgggaatagcgggaactgtgagctagagtggatttgcttttcctcaccatttcccccgggtaggaaaagtatatctttgagtgtcaggttgttgaagacttagaattaatcaagccaaatgcattaattgattgtgggtgtcagaggaratgagggcgggacaaataaggataaatcatttctaatgtcccttccagatcggggtttaggattctaagaaggtaaggcccagctgctggtaccgtattcaatcttttctatccctagctaagaaaaaatgtttacatrttaaaatagaaatgacttcaactcctttcaaaaggaaaattgaaaaccacagattgctgtctaaaaggattttaaagatttgtgaataaaaactattagtgaaaggagtggggatagaataggggtataaataatgaagatggttggttaatgtctttcgactcaatgaggcctagaaagtgttgaattctactgaatattttaagtctgatatctttacygttcttcccattctacattcatttcaagtattttaaaatgcactcagatttcaatgcagccagagagttactgtcatgaactctccatttctcattgggaatatgggggaatgaggaagaagttgcaaattcattcagctatgtaactttggtataagagagctaaggattgatgtcacaatcttaccatctgcatccacatgtgctcatataaattgttaaacatataaagctaagtccctktcaggaagaacacaaaaatgaaaactcaaataaccaggcttatcttagactcatagtcagtgagaatttgttttttatgatgacaatgaggaaccatgagattgtgaattgcctttcaaattatcaaaaggatattaaattgcattaaacatcttctagtgtcagacatcctagtgcttgagaattggtttttctggatatggtacacatggttactttttattaaccagaatgggaaaagctaccagcttttaaatgattttaaatgatttgtcctgcagaactttgtcagctttccacaagcttggagtgctctcctctcatagaaatagtaacatacaagtattcaagtatccccatttcttctgaagctttttctaaaacagttttattttaaaatgactacctattttagaaaacatgaaaatggaaaatcaactagagaagaaaacaaagactcccatattccactaatcagaagtaactccttgcatgttgatgcttttccttacctacccatacccatacccatttacttttatatttattgatgcatattttacagatgtgcataagcatgtatgtaggaatataattatactggtacatattcctctcttagctaactttgtggtgtctcacagtcattcatcacagaacctctcacagagcctagtaaggttcttacgagtcaaggaaaggtcatctacttcctctggctgattgtctggctttatagaagcatatttattcctgggtaatttgaaataggcaataggatttttcccccttttcaaagaattatttgaaaaaacaaaaacaaaacagcagactgaaacactgtaaaaaacacctgtgtcttcacacatccttaccactgacttcacatttcaagatgcagtatccttgatcttgttgagttatgggaattggagagaaaagagatactgacgtaagaggaaaggaggtaatagaggcatgtcataaacccaggtgctttgcaaatcggatcacaatagagcagttgcattctcttttgtggcaaagtctccctggggtgtttgagcagctaacttccagtttcttggctctgaaattctgacctcatgtcccagctaggctgcattaattatcgttagctatggtagatgggtgatcaagagttctagcttcctgtggtgatttaacattacatctccttctgttttcatgagtattttaattaaaaaggtgccttaattataattatgtttataattataattataattaaagtaactgtaattataacctaaatgtgccaccacccaaactaatttcatccacctcattcctctgccatgttgtggttgaaatactagaaaacaatactattgaaatattaataaattaaaaatgttaatgttagcaaaatatgctgaagatcaaagggatagcttgtatttttccatgaaatttagaagagattaaattcaatgtcaattctccttataaataaagattattgttataaatttaagctctttgaagttaagaaaataaactctacatattaaaattgtacacaggtagcttcctagctgcatgaatttggayagatcagtgaatttctttatgtgtctcctcatctaaagatgagggacttggaggtggggtgccaatacctgccttagaggatggctatgaagattaattgatataataaagtgtgacatacatttaacagtgtctaatgcagagtaaaatctcaataaaggttagctaccamtatgtccgctcagattctcttctaatatttatttcacatatattattcacttaaccttattctgttaacgtatttctctattgccatgtaatcagcatatttgcagtttttaatgagtcattcatgtgtttagtgtgccctacttatttccaaaataattttaagttattttaacattatatgagagagataaaatgaagccataagttatgtgagaaataaagcaagcaaataatgaaaggagtgaaaataattagaccagaactcaagatctgttgtattggagccttacattttgctctgacttgttcacaaaaggcaaaaaggaaaacataacgagttatggagcttttgctatcatcttaaaaagggaagaatgttggctttttaattatagggttttcttctcttgtactgtagtataaatgggatgtattgcattggcttttacataagagatgtcgaaaaacctgatggatggcatctttattatctcttttactacaaaatagtgtgttctaaatttttaaactattactagaaaatagtcatttttcttctttcatacactgaaagtaagcattttaattagatatgtagttttttgttatgataccatactaatgtttgcttgggaatttattccttttacctttcatgttgtaagtattcattatggatgtttttgaacaagttatttttcttttatcctttatcttttgtttgtatatgttcttccctgatacagatgataagaaatggtaaaaattctcgttaaacaccatcagattactttgcagagagtgaactggttcatttttatgtctaattttctttaaaattgtctttcctttttcttgatggaatacatcactagcatagctcttatacttgtcaggcaaaattactgttattttttactcatagatatatctggctggagtagaaacagaagataaatttttttatttaacttggaaagagaaagggaaaagatatttgaaaatgtgaggacttcattcagtacacatttattgagaatttttaagacattagtttagaggcttgtgattcaataaaattaactaaaatatgattttttaaagctccttaaaaatctcattgaaaagaaagacacggtatgagataataaaggaagtgctaaatgagtcacatttagtacattttttcatgtaaaaagatattgtctaagagtaaacatgactgcaagtgtcaagagaggagaaaaccgtgagccggggactcatggtcacaaatatcacaaagtaagggaaaagggttgttggcaaagatatagattgggcagctccttttcctgagcacagaaaaatgactttgatcccaaggaaggtccttgaggcctgagaggatgttgggaaatatgaggactgaaccatcctgtctgaacagagtgcagagaaggtctggcagcttccatttttaggtttgctacgtctgaggcttcactaagtacatgacaataaaaaattacagcaaagaaatttgcctcactctacattttgctatcctcaaatggctttctcatcttttaattaactttaatctcgcaagaaccctcctcagtactagtaccccacttttacagatgaggggaaaacagattattggatgtgttataaatgattgaaaatcagatggataaaacattctgaagacagcatgtaaacttcagatcctyattgtcatttccatccttctgtctacattttaatattccagtgtgcatgtgtacatatctgatatgggatactgtgtgtgtgtgtgtgtgatgaggtctggcaggcgatttgtcagctagagtacagctatgtgctatcaatgataaggattctgtgtatgaggacacatggtagattaaagaycactgtgtcatctgtcagaagcattctttgaccctcataataatcaaatctctggcattctaatgtacttcgtaattcaattttatttcatttagtagaacgtctactctcaagtctgtgagtagattactgagggtttttttttttaatctacttttgtttttaacatccaaaagcataaaataaagtagggtctctactctctggcttgtggatcataagcctgcttgatggtagaaggatgtgccagacggacttctgaggtccctttcattttacagaattcattactgtctcatctcctgttgctccaaaggtcctttcataataaagctcatagtcaaagccctaaacaggcccatcctgtatacagaatcccttggattctttacaagagcagagctgcaggtccttgaacctgacatccacagcgtttcagtgactttttcttttgttgtcacttatgacctcccaggaaatctgggcttcttgttttactgggattgtgtgcatctcttctgtcatctgggcagttaccaggcagcatagagcctttgtctcaaccagagataatgcctttaaacagtggaaaacaaagcaaagtaattgcttttgtttcaaggtccttatcttgaaataaagaacattgaaaaataagaytgtgtaggaaactatagccatatcatgtcacagtttcagcgaaactagaatgcttgcatttgtcactgttgctgaaagagtgtctttataatgtgtgcgtgggatttgcttttggcctcattctagttctgtggagtgaagtcccttgttttgagcttgttggctggcctgcttgtaaccctaggttctagtgagaaaacaacaaagacaggtttttatgtcttgtgttagagatgatttagattatgctaaggaatttttatatgaacactaatcatagaaacaaattcagatcaatgaaaatataaaaattacttattggttttccatcacaagatgcattatagggaagagttttagcacgtgataaaaacccggtgcagcgctattagcaatgtgcttttttagttggtgatgtccctagttttctcgaaaaagttgcaaaattgtgtttaccttattgccatttgatattcaaacagagtaagatttgaaatgctttaaattgtattacctgaaaataaaatcttaggtaactggaactataaatgaaaatttcatgtcagccagtactttcatataatggtatttagtaattccagtatttgtgattgctaacatttattttttggattccatgtgacaggcacagttctatattctaactcaccaccctatgagataagtattattgtcccattttactgataaggaaactgaagcataaaagtggtgagtaacttgctcaggaccatacagatgggtgacagggctgggattcaaactcaggcattatgcactgggaattcctacttcctgagatagtaagacagcctgragtgccttctgaatcatcgaagaaaattatagtcaaggtaatttctttgttaataatatactaacacgttctaggttttttgaatgacaatccatgttggctatttaaataaaaattatatattagccagaatgtgtattaaccagaaatccctagttctctgtcatgttgaataaaagttgattttaggccaggcatggtggctcatggctgtaatcccagcactttgggaggccgaggcaggcggatcacgaggtcgggagatcgagaccatcctggctaacacggtgaaaccccatctctactaaaaatacaaaaaattagctgggcatggtggcaggcacctgtagtcccagctactcaggaggctgaggcaggagaatggcgtgatcccgggaggtggagtttgcagtgagccaagatcgcaccactgcactccagcctgggcgacagagcaagactccgtctcaataaaaaataaaaaaaaaattttttttaaaagttgattttaggtctcttacatatctttaaaacaaggccagtaaggccaggcactgtgggtcatgcctgtagtcccagtttcttgggaggctgcagccacaggattgcttgaagccaggaatttgaggctgtagagtgcgatgaccatgcctgtgagtagccactgcactgcggcctggggagaatagtgagactcctctctaaacaaggaaacaaaacacaaggtccgtggacatatttccactataggaaggttgttatttctgtcctttgacagttgcattgtgaaaaggatatatgtgttctttttccatcaacagcaacaaaaatgctcggcaaatcaaataatgcagttctattagacattgttagaaaccagatttagagagggcaggaaagagggagagaaaaggagagaggacaacagaagagagaggagacccagtgacagctcaagtgtggaaactctatctggcttagtttaacataagaaagaattacttggtttgggtttggagttgaatgcaattgggcccttgtttgcagaggtagaaattgggaaaagcgagccccaggtttgaggatatgactcccaagagacagagactgatagagttttataatgccaggtatataaagaacagggctttatcttaatcaattcctttctctaagaactaaacctagatactgagttgtgtgtttctgtgtgtataagaaataatacatttgctgaatttataatgatggccccttgtaagtaagatttgtgttcaagaaactcattttatgaataattttttttctggggatggatctctttcataaagtggttatccactgatgatttaagaatcaacagtgctgatctcattcttttctagtctttcatcctctagtggtgtgttttttacttctttgtgtgtcctagccatgctctttgaagttttagtgataacattcaggacagggaaaggtcagtggtcaagcaattgaggatttagaaagcgggaactggatgttaaagccaatcaggaaagtctccgtgcacacggtgacaagaaagccatccagggcacgctgaaagggggacaggcataaatagggaatgaacataaactcagcttaaattgtcttgtttgaaatatatccattacctggcctattggtgacatgaacctctcctacattactgggttagggttatttactgtaaaattatagtaaagttagacacagaactctgactttctctgtctgtcttggaagaagtttgggtgagcagagaacacgttttaccattgcatttgcaaattgaattaacttatctccccatttcttgtcctcttgctttttatcacttataagtggttgagtgagaaagagaaatgttattttgctttccataagtgtttgaattagctatcgatggttatgtgctaattatatgataagagatagttttcctctgtcctcataagttgctgccttctgcaaagccaagtttctgtgcctccagaatacatgacacctcattctctttctcagaaattggcagagaacaattaaaattaaaaggaaagctcagtggcaagagaaggacattatatctatgtcttgcacatggatggctcctagctctccttctgcgtcaccctgcaaggtggggcagtgatcgtgcttcatgctttcccaatgaggcaaaagagcagagttcagtaaatgacttgttctttcagggcatagtgatagtttagaatctctagagtcctgccctattgctcagcttactaaaccataaaagtacattgcttcatctaggctcctttctgaggtcctttctcattcctgagcacattatttataatggttgataggaygtttattgtgattgaagcccccccgacacttttaccctgtaacaaccaatgtctacaagcagctcattctacaacttctcactttttgtttctgccaaatgtcataaagaaactactgggttctgaaattaaatagctttgtttcttcgtggctggagctcaaattgccaaaggggagtctgtaaagaagggcaatctctcaaagcaatccccttaggtgacttcagtmttcagaagaaaaaaggtagttatggactggctctgatagaaactcccttgaacagaatatgtctcctcgtttctgtcctgacatggctcatgctgagctagtctgtgctcttagcagactggtgcctggtatatcctgatctcgtctctatttctgaagaaaccacaaggtaactccaggtgttaattagaaatgttcagctgtattatttttctagtctcttgtccctctgttgggtctcccctccctttgaatcaaatggctgttgctgctgtctggtaggaaaaaaagtgcagaactttgtgtattaatggatgagttctatcacctgctcaaatcctgcagagcacacttacaacagcactcatgtgcccagagcaatattttctgcccactggtgaaaggtaaaaatacaagactggctttgcttttttaaagtgttttttaaaattatctttctgtaagtaataaaaatgtaccaaagtcatcgtcattgcaagtaacctaggaaaactttggacatgtattaagtcctgcctgtmtaacttaaastcactatctattcctttacatcaatgcctgtttcccctgtgccagatctctgcttctcttctaaattctggcttaacmtgagagattactagtaatttgatgttgagtttgatgttgtttagaacacggaaagtaacagggataaaagagctgttgatgtaggcaaaataaactagaagaaactaggaaggtgatgtggtgtgctcttcaaggcttctcccagacacctccttctctctccatgaagacctccctggtcccatgattcaaaattaatcccttccactctgtgctcttccagcattatatttcagctccccctggtcctcagcacattctctgttggatcagaggtatctgtgttcatgtctgtgtctctgactatctgatgggctcttctaagttctaataagagtggccaacacttattaggcatgtcgtattgatgagggctcaacaaatgtgataccactttatctttacctagtaagcctgaggaggaaagttcactattaattgcattatacagatgcagcaaagagatggtaaataatttgttcacgtcaggtcaaaataaatgttggggctgaatttaacaacttagacaactctggttgttggctagcatagctcatgccctgtggtttgctgtttggctattaattaatgaatgtcccagggagtagagttcacagcatttagatgacccatttttcactgcctgccccagactgtcaagttagactttcagcaaggctctgaatgtgacatttccatggttatccttgactccctgttaaaattctagcccttttgccctcagttccagccagactttccttctttctgtccaccaaacgtgtccagctcttttctgtcacataggtgatacatacatgggaatctctctacttggactctttctgtctttacctggtccattttttcccattctttagatctcagctgaagcttcctcaggaaaccccccaacaaaagttcccaattattacatataccttttttaaaaaaatgttattatagttagaattctgcattgttccagagtctgcctcaccaacctatcacagtaaaaatgttaaagtagttaaaatatttgcattgttgttcacattttcacttgcatcacctctgttgcgaatatttttacttctagtttcccctctctgaatcatactgcatattcgttttcaaccacttgttgtcaagtcatttacaaataaattttatctgaatcggtagccttcgacacttgatacatattagattcacctggagagcttttaaaaattctcatagttgggtcctactgatcaattcaatctgaatctgtttgggatgggttccaggtatcagcagttttttattcccatagaggattctaaagtgtgcaataaaggttcaaaactactgacttcaatggtgattttacccccatagggactctgtatagaaacgagtgctgtttgccagacaggcatgtgcatttcagaaatgcagacaaggtgtgtgcagcaggaggtaaactatatgattgaaggagctcttggaaacccctagcagtgaaggaaagaaagcaaaatcttcacaagacaccagggcatctgcttatttgtatttataatgaaacgtattttgcttctgaatcatttgatttgcctcttcttttaccccaggcagatttttgcaagcgttttcagtgaactcagtgggaaaaatttgtattgctatccatatgtgagtttcaaatattgtaactcttcaaagatacaagtcaacccttttttccagttggagacatttttttttcaattgactaaaaattctaattgaagaagaaatatacaactggtaaagaataaatatgtgtttgctcactctgcagtttatatacaactacgtacctaacctttgcctatcatcatttacttctggcaaattgtgacccgtggattgttttgttcttgaactaaatattttaaaggcttccagtaatggcaaaaagcctgctaaaagctgttcttatttcaatataataaatcataagtgtgtaaagtggatttccccggaggtatgcattttaaagtttaagtaggggttacatatttggagagactaatgcatcagtactctgctagcggaaatcacaattaaagagtttaaatagaatttgacttgggacagggtttcttagacagtagagtgaaataattgagtggctataagcgagggaaaagcatggttttggactgtaggcttttgatttacacataggaaatgtattccaaagttagatatatcattgactcatggttttgccatattcagaaagtagctgatatttgatttgtgtggattacatccttaaagtaatagcgagctacatggctttcagtaaaaatggctagaggagaaagagaagagttcctttgattgctgtgaatcttctatggaacacaatgagaaagaaaggatcattttctacaaatatggatttcaggcctttttctatcactaatgttctaataagggcctatttcactagaatataatttacaaatttcaatgaaaaaaaattcccattatagaacagaagttgacaggtagcagaataagaattcatggagatatatgagaagaagaggaaaataaatccttgggagtccagaagcagatttaagatttctgtaatgtcgttgttctgaaagtgtttctgtgaccatggaggttggaatttaacttatgtctgcattatcctttaaagtgctgatacttaacaaatgtgcttaccaagtagtaggtgctcagtaaataatacttgaatctgaagatgtggagaactaaggtgacattcagcctgatttagcctgtagggtttcatcacatttgttgtcctgggtaattatacctcctttaacttaaaaaaagaatcccaataggttgataatttatatggtcacttttcttagaagcagtgagtgatacctctcaaggttcagttacctgagatgcaacttgattagacatatcttgaaatctgaaaatgatccttgatttggactggagtgtcatccctgagtctgaggctgtccatagattcccagtgctgagaaatgataaatgagtctctcgtaagtagccagcaggcctccacagggaagtccagaaccagacatatttaacagcttcattaatgacctggaagagctgtaataagcagcttgctaatgaaacctgcagatgacactaaattctaaattcttaggtgtgggtagcaacaattgaagcatgaataacaaaagatccaagcctaggctgaggctagactgtaaaagtccatttagggtgactttgcaaaacagttctgtgcaacaccagtagtccataagaccaaggcagggtaggacacagagatgatttatgtcactgaaaagtctgtgccaacaattttcttagtccttaagtcaggaagaggatattggcaaggtaggattagcatckaaaaagttgggttcaagtaccagccctttcatgaattagcgtgtcttaaacaactcactgcatctctggaattcttggtttcattttataaatgttaaattattaatgtatctgaaaatgcttggcacagacatgcaagccagtacaaattagttcaatcttattttaagagcagcatcataacactaaaaatcattctaccactctgacaagagtccatgaatctccagggcttatacaaatgggcttcaaaagatccatgaaccccctgagttaatatagtaaatacttagtgtgtgcctagaagcatggatgggtgtttttctggagaaactgtctaaactttcttcatacacccattggcgttgacaactagaaacatgttaagaacctccacactggattgtaaacatctttcaggttccaattcaatattctagacacatactgagctttctgtactatggacttgacaaaatggctctcagctcagagcctggacaattgctcatctactagatatttttatggctggtaagatttcagctccttggaaagatctgaagtattacatcaactttaggcactctctatcccactgccttgttttcttatcctcataacacgtggctgtctgaaatttgaaatgttctcatttattgtttctatttacttgtgtgctgccatccactaaactataagctccttgagaacaatattctagactttcttgcttactgctgtatgcctaatacttaaaagagtgcctgatccattgtaggtgttcaattgttatttgtggaaggaagggagggaaggaaggagggagagaaaaaggaaggaaagaaggaagaaaactttatgtcacacagaacctggctcatactatatattaaacgatttaatgaataaaagactgaaaggatatgtgaatgaataaggaagactcatctagattgttgtaaagatgtggagggagggatgatgcctgagcaatgggaaaattcagcccactcttctttgacatagtagagagcttcactctctagcctgcaaaaccatatatatacttaagaaggcctggttgatacttttggttctaaaaagaaaatacccagtcccatttcctctgtgctgtaagaatggactgaagtgtccattgatccatttcttggaagtacacaggagctttggttcaactgctgacaagatgaacttgtggcatattaaattctatacagaattcagttttgaggagaggtgccactaaagccattttgtgcctacttttagcaggactagaaggttctggaaataaagcctaaatagagtgccattattctcactggggtttctattgaactgttctacaatcaaaatacatccttcagaatcagaaagcaatgtcttagagtcttctcctcacaggaatcagctgcttctgattgtggaaaaggaattttccttatgtctgaagcatacactcctgttctttgattgattcatttctcacatgtgatttttctctgtcaggtgtttaaaagtgaccattttctgtaaaaacctgtcagccctagaaagtaagttgccagaaaaaaaagagaaagaaatctaaccattatgtgtaagcatcagctattaaactgaatccgctaatacctgagattcaggaatacaactaacaaatatatctgttttgactgaatstcccccttaggctaatttttaaagttaagggttaaggtttttggctgattagaccttttctcacaggatcatgttttagtgggccagattccttgaaacacttggaatatgcatgtacacttgtggaaaaactaattttatgcactgatatccctcattaaatgggcttgaagcgaaacttctaagctgagatatattacgtttcgtttaataattattctctcttcacacaaaatattagccaaaggtggaattttggtagcatcgtacatatatccaagacaccaggaaaatttttactcctaaaaatccaaattcatctttagcctcttgtaatttttactgcataattaacaagaatgtttgataccgtcatccacttgacagaatctaatttggagcatctggtgtgatttagccaagacttagttctagtctcccagtacaaaagggttctgattaattaatcgttgcccaaacctgaataatacattaaagacaaacttcaatgctaagtgaaaaacaaaagggaaagttttcttatttaaagaagctggagtttcccagtaatagaaatgtaacaatgaagaagttttagcacttaaacttacgacaggtcccaacccaggcatgtagcagacaaaatattttcttagatggctgaaattttgggttcaggcagcagagctcaccacctgccctggggtgtattttttttattataccttaagttttagggtacatgtgcacgatgtgcaggttagttacatatgtatacatgtgccatgctggtgtgctgcacccattaactcgtcatttagcattaggtatatctcctaatgctatccctcccccctccccccaccccacaacagtacccagagtgtgatgttccccttcctgtgtccatgtgttctcattgttcaattcccaccacctatgagtgagaacatgcggtgtttggttttttgtccttgcgatagtttactgagaatgatgatttccaatttcatccatgtccctacaaaggacatgaactcatcattttttatggctgcatagtattccatggtgtatatgtgccacattttcttaatccagtctatcattgttggacatttggattggttccaagtctttgctattgtgagtagtgccgcaataattgtctgcttctctctcagacactctcttttgccctcaatgtgttgctattctccttttaaagagtccttagtacaggtttctgaaacacaaatttaccgctactgtcattaaacatggccttagtgtcatgtggctgtgtcaaaatagctccttcataaaagccacccttctgttttttggttctgtcccttctatggtttttcctttgggctgaatacagattgcttttctactccatccaaaaaatggtgtcacctacgatgtgaatgggtgtgaagaggtacacttaagtaagcttccataggggagatagctcaactctgaaggtcatgagacgttttccatcttcacgtacsccataaaatattcatttataagtacttattagatattattaaataattcattgaaaaatatttactttgcaaatatcacatccctggaaaagtcctagtcattggggctaccgcagtgaatgaaacaatgccckcctactttggtggaatttataccctaattgaaagacaaattaacaaataaacgtagagtataggatttaaagtagtgttaaggaccatgaagaaaaatgaggcaaagtaagtggaaagacagtgagatgacatgctaaggtaatttatgttgttacaaagaccttgtcaggcattactgagcaccacttatatgtattgctgtatactaaagctcactctctgtaatgcacttactttcagtctgataatcaagacagaaaatacctaatcataactaaaatatggtgttaaaatgattgaggcaataagaaaggtacaaaacagtatcaaaagacttagaaagaaggaaaggccccatccaggtagccagagagtaaagtctttttgttgttgttggagacttggtctcattctgtcgcctaggagtgcagtgacatgattgcagctcggctcactgcagccttgacttcgcgggctcaggtgatcctcccacctccgcctcctgaatagctgggactacagacatgtgccactacacctggctactctttgtattttttttttagagacagggtttcaccacattgcccagactggtctcgaactcctgagcttaggcaatctgcctgcctctgcctcccaaagtgctgggattataggtgtgagccaacgcacccggcaagcttcctaaacaggggtatgagagatgggcttgggtaaagatgggtctccattttcagggaacaactggagcagggacataacattgggaaaatattggcaacgcactgcggtgacaaatggtccgttttggctagagtgcagtaaaagtgagaacagagtgtggagttagcctgtagccaagtgttgaagggctttgaatgctaaagtgagaagtttgaatataagagcaactttaacaaaaatatgtaaagtactttttctgataatcagaataacccattttccttacgtaaaatagataccatgcctaataataaaatttctggtagaaaagtgagttaaagcgacagtaacaaaataataacctatcagggctgtacagacaatcttaaagtggaaagggttgcataatgtcatgtgggcttatcgacatccactatggtagttttgtttttaatgacttgttctactgacatctggactttatctaaaataaaacagaatgctggctgggcatggtggctcatgcctgtaatcccagcactttgggaggccgaggtgggcagatcacttgaggtcaggagttcaagaccaggctggccaacatggtgaaaccctgtctctactaaaaatacgaaaagtagccaggtgtggtggtgcacacctgtaatcccagctacctgggaggccgaggcaggaaaatggcttgaacccgggaggcagaggttgcggtgagatgagattgtgccactgcactctggcatggacaatagagcgagattccatctcaaaaaataaataaataaaataaaataaaatacarcaaaacaaaacagaatgccagatgatcctttcctggaaactttatgaaatccaaatatgtagccaccatcatgatagagggactgcttatgaaataccaagccttctttgctttatgctctttcataccttctatgctaactggtagacccagtgttttgggtcctcatgagaggcttatcctaattcaagattgcatttttctgggaggtttttagatttcagcaactaacacagaaatttagaaagccaaataatcccttctttggaatcaaagcccttcctcttttcagattctttgcctcctgtttatatcaaaaatacacttcttttcccaccctctgacgtacatgaggctcatgtcagtgcccaatgtgtaaagagtttttaaacctctgcattttctcacccatcctttctgggttgtatgttgatttgtgtagaccttaggcacttttgcatttggggtctctttatccataaaaatatattttgattgtatttatatagatatattattagtagtacagaaatatatattacatgtatttattgataaacataaatatgttaaatatatttatcaataaacatattaatgtggccacatacagtcgctcatgcctgtaatctcagtacttttagaggccaaggcagaaggattgcttgaggccaggagttcaagaccaacctgaacaaaatagacaaaaaatttaaaaattagccaggtggccgagcacagtggctcccgattgcaactccagcactttgggaggccaaggtgggcggatcacgaattcaagagattgagaccatctggccaacgtggtgaaaccctgtctgtactaaaaattcaaaaattatctgggcgtggtggcacgtgcctgtagtcccagctactcaggaggctgaggcaggaggatcgcttgaacccgggaggcagaagttgcagtgagccgagatcgcaccactgcactccagcctgacgacagagcaagactccgtttcaaaaaagaaaaaaaaaaattaggcatggtggcatccacctgtagtcccacctccttgggagactgaggtgtgaaggattgcttgagctcaggcgttcaaagttgtagtacactgttgttatgccactgtattccagcctgggtgacagaataagaacacaactgagaaaaaaaaaaaaaaaaaagaagatatatattcacataacacacacacacatacacacacataaatatatatccatgttattaatttaaacatttttctcaacttaaaattttttttcctgactttaaaataaattaaaatattggcatggccccttaaaactgttgtgtgtgccttaggcattctgcaaactctgcctaatggataggttgacccttttccctttctgtggagaattggtgatgagctgaattgaaaaccagaatgcatggctgggcccaagttgtccatgccctgtaacactctacaaatatgaagttcaagtcagatattgcataccctgaaaatacctcccagttgtacagtaggaacattgggaaaggtcagattcattttattgaccttttcattctggtcaatagtggcagctgcaatttcctatttgcagcaaatttaggaaaagtatggacctcagactacttacctgaaaaccaccaggattaattaaaattcagcttcttaggacccttataatgaaatcaggtattttggatcagaatctcagtgtttgatgtatgtaaatcttatgcacacttaagcttatagccactgtcctaaaacaaaagtctgattggatcgctcccctttagcagttccccattgcagaataaagtccagctctttaacctggcattgatggtccttcataatacggtcctggtctctcaaggcctgataccccagactgaaggatctgaagttactcaaatgcgcatccttctcttttggcctaaactccctatctttcagggcactatcagtttcatatgcattcctaaagccttatgtcaaatgccatccatctcctgcagcatgtgttaacccttcaatataaaactgacacccctttccatctatctgatgcagcacctataatacatcattgcatttgtttagttgtcactttttttttttttttttttttattgagacacaatctcactctgtctcccaggctggaatgcaatggcgccatcttggctcactgcaacctactcaagcgattctcctgcctcagcctccagagtagctgggactacagacgcccgccacaacacccggctaattttttgtattttcagtagagacagggtttcaccatattggccaggctggtttcaaactcctgatcttgtgatccacctaccttggcctcccaaagtgctaggattacaggtgtgagccacggtgccctgccaacttttttttttttttttttttttttttacaaattagaatgaawcattttttaaatgcaggacctatttcttatttatttgtttatttcataaattacaatgcttgtttttttaaaatcagggcacatttcttatttatttgtgagttttcttttgtgggggaaagcatgtgtgtgtgtttatgtatttatttatattttgaatccttaaggctaaacacagaatttggccatgttagtcatgcaggatatcttgacttctttcttttccttttccttgttttcttgtttaatgaggtgatgactaggcatttatttggttagataagattgatattgagaatcaaggtgaagatcaccagaaaaatattgaaaacaaatggttaaaaagaaagatctcctgatttcattatacatggttctccatcacaggctttttttgttgtttccagcaggatagagaagagaaaaattagaaaagaattgacattgatggttgtaggcaacctgttgttcgtgtgaacaagaatgggaacaccagcaaggaaagtcacatcccgccaggagaatatcagtatggacaagctgtggaagtcctacttttatggaacattaccaaaaacctagacgtgaagtgagcaggactttcggaaagatgatttggttccattcaatgactatgtgttgaacatagacacagatcttcctttatggagctttttatcttagtggggtagacaggcattaatcatgaaatcccacaatgaaacactccattgccgaatttagtaggcatcatagggctggcagaaggggctggtggtggtgaaacttgaggctgaagggataggacagggccagattgtggcagggaggagggtggcttgggggccatgatgaccttgaacagctgaagacaatagggaaattagatacttagcaagcttgacaggaagggaaggagcgcaccagaatgagtaccaagactygttaacttgttaaataatgttaaagaaaatcagaaaaactgtattgctttgtttgctggagagctgttcttcctaaaactcaatgcagttattgcctgtttcccttatatctccacaaaaagagcatcgttttatctggcaagggagaacattaatcattcagacggcggaatcaacattgtaagacttaccttccaacataaaacctgcaggttgaatgagaacccgtgacagaaaagtcttgttaaaattcccattgctatgtcctcctccctgaagacatggggcaaaacggggtttactttttccttagatgctttccagtttttttacccagcctagatcttaatgactgaggatccagagagaggtcttaacatttccctggaagtgttttcttatgattaaaaaggtttgtcttacagaattctctttcattatttttttccttctgacaaaatttttttagcttaatagtgtatttgaatgggtgacagagcatgaaaaagaatgaattagaagcctgggatctttgggataaattgagaaatctagtttaaatatcttaacaaataaatttattcttgggataaccacagaagctccaacatggccttcttgagctgtgtcagtgtttaatagttcacttccggcaaggctcatgcctgtaatcccagaacattgggaggccgaggcaggtggatcatttaaggtcaggggttccagaccagtctggccaacatggtgaaaccccatctctactaaaaatacaaaaattagtcaggtgtggtggcaggtgcttgcaatcctagctacttgggaggctgaggcaggagaatctctagaacccaggaggcggaggttgcagtgagccgagattgcaccactgcactccagccttggcaasaagagtgaaactctgtctcaaaaaaaaaaaaaaaatagttcacttccccgctggtaaaatcaggggttccctgtacacagcatgagagccacccctttatttgtccatgtgcaaggaagatattgcccatctgtcacaacacattcatgtggaagtaggatggccttaaaaagtagtcactacccaacagatccaagttagcataagagagaaaacttatttaccagcctgattctagatgttccccaaagctctttataaatctagatgatgtgagtctctttgagaattctgttttagaatttggtaaatgccaggccctttcctgccagtgtaaagctattcgttgttattattgtcattccatagttcttgtttttgttgcgctgctggataattctacaatgccagaaatgattacaccagactcaaagacagaatgaaatttatagatacaagttctaaaccacaacaggagatccgtggctgtctgatttgtcatcaccttttatttactgtgataatttcaagcataattacaggagatgtgcttaagagtttgctgtattttagggttgacagcactgtgaagttttaaaggctaccatctctttgcttgaaatagtgcattttaaggttaatgaaatctttattatggactcagttttgaaactggaacaagaatttttaatttaagaaagatttgcatttttccaaaatgccttaagagctgtgcttttcatgttatcaaagcctaaaagatagatagggaacatattattattctcatttgggataaagaaatcgaggcactttaacactaattggtttgtctaggaaacagagacacatgctctgaaagccttgtttcaaatgtagtgccttagcccctctgtcggaccaatctaagggttctgaggtctgtgttctcacttcctcacctttcactagatagctggatttacatactgggcctctatataaaattctgttgaatataggaacaaaaatgtttaaaaaccatgggtgtaggggaaggaaaaaaaactgggagtttgagtgtatttcaattgcaaattaaaaatcacatgtgggactaaaactgactccgtaactagaggaattattgctcctgtaactaaaatgtcaagctgatagacctagcttcaggcccccttggatcctaatgctgaagttatcagaaatctcctttctcgcttttctttctttttttttttttttaatcccctttagaagttgtcctttcttgctttgcaactcaacatttatctaagtatatttcattcttggccaggacatttcagaaagtagcagagatagacaacatcatcaaatgcttaactgcagcagcaagagagaccctgtttccaatgtgctctcctgggtaaatcactatgtgggaatttatgtggtaaaatatatcgtattttactgttttttccctaaattcaaattatttcctattacacatttgttctgaacttgcatttttcttcctgcttagcaataatacatcttagagatttttatgtgtgtcagtacatgtaaatctaccttattctttaacactattgcatagtattacattgtacaataaaatattatttaatgattttgtcaataataggcatttaagttatttgaggatttttttgttatagcaaacaagtattatattaacagcgttttacatgctctttgggctgtgtatgagattatttctctaggatagataccaggagatacatctgctgggttaaaaggtattgacatttccaacgctggtaaataccatgtaactttcagagagtttcaccagtctcattagttttttaagtgctaatgatgctgctgctgctaccaaatccttttggctactctgccaggtactatgctaagtgttcagtatacatcatcttatgtaatccttacaacaaccctaatcmggtttctttatgagatgcatgctgatattaatcatgatcattttgcagaaggggacattgaggcttagagagttcttgtcactggcctaaattcagaaaggtgcttttcttgtctttataaactaaagattggctttacatactaaagttagagggtattttacttgtgacatctcagctgctcagtgaagaaatttgtccttgagtcttgggccaaataccataaggggtgaattcacaaatgttctgtccctgtgttctggatatgtgacttggattccatatagtatttctgcagttattatctggcataattaaatgtggagtgcaacccaaagtcaataaaggaaaattgccgctgacgttcctactgatctgagcataagcccccagagaaattaacatggcaagaagaaaactaaaaaaaccccaaaaccctgggccattagttaaagcaacacacatatcatagagtagggtgttactctatggagtcattgcctattgtgtagcatggttagtgcggtgataacagtaacttgggaatcctggaaggatataaatgttatcactttgccactgtcttactaggtttagtggttacttatttatttttattagagttggggtctcaccctgtcacccaggctggactgcagtgttgtgatcctgattcatggtggcgtcaactcctggacttaagcaggagcctggctaatttttttctttttaggtagaaatggggcctcactatgttgtccagattggtcttgaacttttggcctcaagtgatcctcccacttcagcctcccaaagtgttgaggttatagacgtgaaccactgttccggggccttagttgttagtaagtagccttattttactatattctgtgaagaaatgtttatttaaccttcggttattgtggtcagatgtctagttctatttaacatagattgcagtggtggaagatgtctagtctctttaaaaaacagatcagctgctgagctcttaggaggtggttaattggtgactgctgagactgagaggctccccatcccttccagctgatcccgcaggggagccagagaggaaagaaggatgcttcttcctgctgcttttccagaaagattgggctgagctcagttattctgagaagcaggaaagaatcagaccagaacatttaagtgactttggctcatgctaaagaatattaaaatattcttggcacatttacattttagaagtttctacaggacagacaagagggcaacattatatagggccagaattttcagttagtttggcatactttcagaagtttgtcatcctttttttttttttttttttctttatttgagatggagtctctctgtcgccaggctggagtgcagtgacgcgatctacgctcactgcaaactcctcctcccgggttcacgccattttcctgcctcggcctcccaagtagctgggattacaggcgcccgccactacgcccggctatttttttgtattttattagagacggggtttcaccttgttagccaggatggtctcgatctcctgaccttgtgatccacccgcctcagcctcccaaagtgctgggattacaggcgtgatttctttttcctttttgtttacaaagaaagtcatcctttttttaattttacactgtttagattactttcatattacttagcttaattgtgcttagtagtttatttatgttttgctttgtaaatgactcctctttattttgcattaactctaaaggtgatcccttggcatttttattagcattcaggattgaaagattatcatgccataaactttggttgaagttcggttttggtaacttttctgttagtctccaaaaaagaactaattgttgctaatctatgagcagggattaaaagacagagtataatattgaatattaaatgtgcattatctcatttagtcctcaccactaccacctccccgccccctgcccagggttgggggtgggcagtgtctactttcctctttatccccattttaccagtttaaaacaaagagaatttaagcagtttgcctgagaccacatagttactaggcagccgattcagagctggaagtcacctctgattttttcttttattatactttaagttttagggtacgtgcgcacaatgtgcaggtttgttacatatgtatacatgtgccatgttggtgtgctgcacccattaactcgtcatttagcattaggtatatctcctaatgctgtctctccccccccacccaccccacgacagtcctcygtctgattttaggacccgtatacattacatggctaagtgcttgcttgcttttccttctcagctgcttctccctacgtttttcctacatgttttctacagctgtaggagaaatttgtttttcttttcgttttccccatctagggaagcttatgaagcttcaattcagtctttgatgaatctccgtttttcctctatagctttgtttggtgacacttggctgtaaataactacatggaggaattaaaaacaaataaagggccgggtgcagtggctcacgcctgtaatcccagcacactgggaggctgaggcgggcagatcacctgaggccaggagtttgagaccagcctaacatggtgaaaccctgtctctactaaaaatacaaaaactagcaggacctggtggtgcacgcctgtaatcccagctactcaggaggctgaggcacaagaatcgcttgaacctgggaggcggaggctgcaatgagccaagatcgcrccactacactccagccttggcaacagagtgagtcctagtttcaaaataaataaataaataaaaatcaataaagtgacctcaaaacaaagcacatagaaagtttctccctttgaaatttggtttggctcttgatgagcaagtttctcctattagcctctctagctgaagcaattgggactaatgatccttttctggtgtttacctcaaagggatattataagaattggatgagttatttgcaggaaaaacaatataatgttcagtattctgaaaattgcaccaagtttctccacaattttgcctggaactgattttatatgagaaagatgctgggtttccccactcccacagctcatttataaaatgtgccaatatttattcaagtttctttgagtccgggagccagatagaaatgcaaacatattatggttgtttgattcttattaagctatcagggctgtatgcagttctgaaatgagtacattggcctactgctcctccccaggagcttgcggtagcctgccctcacacacttcacagccagttacataacttgtgtcaccatggaagcatctcaccatcactgagctttttggtagactgacttcatatatttggttcctaattttttgttttgtttcttgagacagtctcagtctgtcacccaggctggagtgcagtggcgcaatctcagctcactacaacctccgcctcccaggttcaagcaattctccctcctcagcttcttgagtagctgggattacaggtgtgttccaccgcgcccagctaatttttgtatttttaatagagcaggggtttcaccatgttagccaggctggtctcaaactcccgacctcagatgatccacctgcctcggcctcccaaagtgctgggattacaggcatgagccaccgcgcccagcctggttcctaatttaaaacataaatgatcacatagaaaacaagcaagaatggagccttctttataaatagaagcctgaacgataaggaggatgattatagcatccaattaaatgttttagaatttggcattttcttaaccatgagatttccttcactcaaatgagagttgggtggtggtctgggtacagatattttcacagagggtattcgtgagatgcaggatgagaaggaagcgctgcttaaaaaggtctcagtgctttggatctgaggcagtagcctgttctatcaggtatagctcttacgtgttgaaatctctgttaagaacagtcccatggaaccagctcagggagatgcaatgactctttgggccaatcaacccaaatagcttgatgagatcacctctaggcttggtgggcagaggacttaagttcacttatgccagtgtcatcaactctctcctcaattatcataggtctgtattatatgtgtctgggagcatagagaatactggcactggttcaagactcctcatttctatctcacgaatgcaattgtccctcagtatccatgagagattggttccaggaccccgtgaayaccaaaatctgcagatgctcaagtccttatgtaaatggtgtactatttgcataaaacctatacacattacattaaattatctgtagattacttagaatacctacaatgtaaattctatgagaaaatagttgttatactatttttattcatattattttttattgctgtatcaaaatgaaaggatctaataactcaacatttcttatgaccaaagtgttaaaacattttcacattttccccttcaagcaggctggatyaaatgaaactatacatacagatgggcttttaatttctctctactcctagcaaatacaacgttatgggatactagaaatatgtaggctcaagaatcacactgtctgtgttcaaatcctgattctgcacttacaaacaatatatatattgtttacaaactatatatattatatatatgttataaacataatatatatttttatatattgtttgtaatatataatattgagatataaaatgggaactatacttataaggttgatttcataggatatttgtgaggattaaatgagaccattcaagtaaagcacttaagagtgtaagtattctagaagtgctgtccctttacctattagtctgttctaaaacacattagtgatttaatgatcctcaaatgtgaaatagcttttaagtgagatacgagcttttccattgacaggcaaagcaagttagaagaggaaaagcccaaattgtaggtgatgtttgcaatcagtyagtgagccctatgcctcatctgtagaaaatctgattgaccgtggagctccagatgatttaacactatacatagttctctgattcacttttaatttgttactaatgataaatatgagagttttttcactccattctgcaaaagcatggttctgctggtatggcgttgcttgaatggtagggcactaagctgcggggttcaggtgaaggtactctcatttaatcatgtaatgggaagtcacattcttgatgagaagcacagcacctgattcactatgctttcctccaaagagaaccatgcgtaatgttacatgtgaagtttttctgtgttttttttttttgtttttttttttttttgaagcttcactggaccaaatgctctaagttgccttagaaaaacactggcacagaatataagtctccacatctaaaaagatgtagggggcctggaaatcatctggatctgggtcagtgtattccatctaatctagaaatttcttgggattaaaaaaaaggtggtaatgaatatactaagcttttttatattacagatgcccaattaaaattgtacatgcatttgtgttcttgattatacagaatagccaagtcattccagcttttagatatttcttcaactggataatgattacattgattatatcaccatgatccagagatcaggttagcattcttgtataatttagttaaaaatgagtgaatagattaaattattttatatttgattacgaaaataaaacataccgtttatggggaaaaattgtaaaaggagttctggtgaaaaaggctgggagtcaatgtccaactaattcatcctgctgggagagatggttctttcattctttaggttttagatggagctgcagagaggctttgtttcttctatgaacattgttttttttttttttttttttttttttttgagatggagtttcgctcatgtttcccaggctggagtgcaatggtgggatctcggctcactgcaacctgtgcctcccaggttcaagcaattctcctgcctcagcctcccaaatagctggaattacaggctcctgccactaaacccagctaatttttctatttttaatagaaatggggtttctccatgttggccaggctggtctcaaactcctggcctcaggtgatctgcccgcctcggtctcccaaagtgttgggattacaggtatgagccaccatgcccggcctattagtgttgttttttaattgatatatgaaggaaagaaaggtggaaagcgcacaaatgcctctcacgcacacttccctgatgaagcagtgtctgtgctcctgactctgggctcttttctgatacttggagcatggccaactgtattgactgactagccttcagctccctctctacccctccccaccatttgtgtttatgakatcttctttactacccaatctaattaagacttaaccagggtgcttccagatgtgacaaataagagattttcctgtkgaattgatcagcctatctctgttctctccaagctgtctattggaagcctctttccaaatgtgtttgtgatgctgattaacagttttcccrccccactaccaaygaactaggggattagctggcttataattgtatctcacttctcccagagcatcaggagtgattaatgtgccacatgcagctgccttgcttaacgctgtatttctttatgtggaggctcaccagctctaggctccctcaccccacatggctggaaagttctcctggaagcrgaaacccacttacttgtactagagatggcagaattctgaaaataagagaatgggggtgaggatttaagaaaagcagcaaaaacttcgataagcctcaaggaggggaaaacaactagctagctaaactctagccgctttctttatactgttaatgggagtatttaatctctctgatctgtagtctgtaaaacaagggaatctctatcttattgaactgttatgtggtaatttgctaatttaattggagtaagagcttagcatagagaaattggtgtttacttttagatgaatatgtttctgttygagttctctatcatcacctgtttgctatagagatcagacactttgctcagcctatgctatgcccctgccaagaatcatactatttattgtgtttttatagctgtgagactgaggctttatgaaaaataagatcgggaaagcatggcacattatactggtttttagaaacatgctgatatgatttggctctacgtccccactcaaatctcatttcgagttgcgatcctcagtgttggaggaggggcctgatgggaggtgattggatcatgggggtgaggttcccctttgctgttctcgtgatggtgagtgagttctcacgagatctgctgatttaaaagtgtgtggcacttcccttctgcgcacattctctttcctgctggctgtgagaatatgtgcttgtttctcctttgccttccaccatgattgtaagtttcctgaggcctccccaaccagccctcctgtacaacctgcagaactgtgagtcaatgaagcctcttttcttcataaattatctagtctcaggtagttctttatagcagtgtgagaacagactaaatacatatgccgtcctttaaaaaagaagatggtgagctcgttgtacaggcagatttcagggtggacaggttcagtggtgattgtggcaaaaatccttgcagtagtcaattcttgttgctaggttgatgactgcagcagtaagtgtgagggtatcatgtagtttaagtgcgcagagtgaagagagggtgggaaggagccttaattgtgttgtttcagccctgaatgattgcctctttcagtgaacagtttcagcaataacagctctgttgtcatttccctgcggcattagatgctgtggagaatcgcccaactcacaagacccctcttttctggagacatctccacatatccatagggcaacaaggggaggttctcagcaggcttatttatagcaagtgactcagctcttctaactcattgctggttgatatcagatttcccaytccaggaaactagaggtagaattgaggggcagcagctgtttctgtaactaacagaaaacagaaactctaggagttccagggtggacctggtctacccagaatgtgaactgaagagcgaaagaaaggraaaaaatgcaggtaagcaaagagaaatcaaggaaaaacatggacaatgarcactgcggggatcttgatggtttttatgtcctaatttcagccctcaaggcttttgatccatgccatgcctctttataaatgtaataacttccccttttttgccctttcttgcttaaattagtcccagctgatgcctgttaattgttgcaacaagagttcttactaatggacatgtgtgtctacgtgtcttttatttatttatatatatggaatgcagcttagggcaacagatccaattcaaactgcaatccttcagagtcttagtcccacagagaagcagtaaggctgtctgttcttggctctatcaaaaggttgcaaatgctaccactgagtcctatgggcactcttttcactccactggtatgccggactgtgcatatgtctgggattctaaacatgatggaataacatatggagaagaataacatgtcagtgttagtccagatttctggctttggaaagcagaaacacagggtcctagtgaagaaaagttgggaatgggagctaaagagaagcagaaaagatgctgagttttagtgtggaacacaaatatggtttgaagtgttagagaggtaagctcagagaggatgtcattttggccaggcatggtggcttattcctgtaatcccagcactttgacagggcgaggagggaggactgtttaattaagttcaggagttccagcctgtagtgcactatgattgtgtcactacactccagcctgggtgacaaagtgagaccctattcccccccaccaaaaaaaaaaaagagagatacaaattggttgtcattcacattttgaggctattaatgcaatgtttttcttttctactaacgtaacagaaaccttgcagaaaagtcagtctttttcaataagaatggaaatagtcattcaaggcggtttgccaagtgatgttactctgtgcctccaagccctaggcattgattcttgaaatggctataggcatgatcagttgctttcagattgctaatttggtgattattgtgggccatggctagaaaaaaatgcattagaaatggaaaaaaaaatctggcaagggttgaaaaggatcactagaaagttactttttgatgaaaccaaatgaaggagcttagctataaatgaaagaagaaactattgacacatgtaataattctcatggtccaggggttagaaaaaaggagattgttctatcaatattttcaaaccaagatgagaaacttctgactttttttgtctaattttatatgtagacctctgcttccgtctgcatgaataccctccacataggctgagctgtcccttcagaaacaaaccagtttctgagaaaagaacagcttgagaactgtgaacagtagtttttaatctratggtttctctaagaacggtaatgggaagcatgaaattctgagacttgggtgaattgcagaagagttggcatctcctctgccctctacagtgggacccttttcattcattcttctgctgtttgtcctgttccttttttgtccttgtgattttgtcattttcttagttgtcatccaatcagttttccttctagtatagctttcctctttatttccatttccctttctttggtttttaaaaaatcttttcagttttaaactcggcataatgtaaaaatgaggcctgcctttaaaatgatgacttgtattaattgagaaaagttttattcctgttcaaaatcaagtgagttttgccactactgtgttttttcattaactttttaatatgcctccaaacaaagaaaacaccaagttaaattgctttttttacttctgtgaaattcagctttaaaacctcttatgaatatgtgcctacacctgttgtatttgtgattttcctttgtccagatagcagagctatgggtgtggagaactgagacataaagtgtgggacacaggcaaaagcgtagagaagttagaatcatacaaattggggtttacaaattgacctcagacaagatatttaactgcattttcttatctgtcacttagggacaaaaataatgcctacctcagggtgtagatagaagatgagtattagatgatggatatagagtacttagcttagaactttaggcattctcaataaatgacagctgttacttttaataatgctattattatgcttctctgcggtcacctggtacttaagtattgaatgtggagactggcactcgacccaacaaaagagatgttcttaaaacttaaaaagcaacatggagtagaccactcctgatgtctttaattttttttcaagtagaaaaacggttaaaatacttttagaacctctaagttattgtgcgacatggcactgcttgctgcatgtgtctgtccctccaaggctcactttaggctcctctactttccactctctgccttccaaacgcatctgccatcaactctttcattgctgtgatgttccttcctgacttagagatgtcacatacactgttccctctacctagaatgtggcttatgttttcaacactagtaagtccctaatacaagaaagataaagggcctggctgccaacctaaaacttggataggagtgagaaaatagaatgagtttgtatgcatatatacatgtaggtgtgtgtgggtgtatttggtttgtgtctcttccccattcttaattgtaatgtctaaagtatcaatggcctaatttatttaccttctcccgtatctagagtacctaattcttaccaaaataaagtttcaatatatgtctgttggattaattgaatgatgcattgagaatttaggcaataggattaaaatgaagtggctctcctttcactcttaggattttgctggaagggagggagctaacatttactgaatgtttgctacacactgtggttatggagaattgcaggaaaaggaataccaagactgatatttgcagttgaatgcgtgaatgagaagtgtatggtgaggaggatgggagctcccacataagtagatttagtgggaattcttttgacgaatgtgctccaaaacaggtaaacccattcttctgactagtgaaagagaatattggccatcatgcaaatgcctttatggtatcctcccagtgttacagaatgatgctagcgtgccagtgaatgaccaaaacatcctcttataaaaacaaacataaagtcaggtttgtctaggaatttgcttaaatggaagtataactattgattgacattccatgagagagcatctagcaaagtatctgtacatgctatgggcttactatatagtaatcttcccactaaagcaaagttaagaaaattatttgkcttcagttggtttaatagtttttaactggactgacttaatgatttggtatctaggaactatgagtactcctttcctataatcacaaaccattgagccaaaagacccgagagattgtctagtccaactgattcattttaatgatgaacaaagagaagtcaagcgagattaagtggcttgcaggggtcacacatctacttccttcttccttgatttagaagtaagcatatgcaatctgtgatgcccttcagtgaaaaggagagagataatgagagactgaattgcttacagatgaaaaccttggggtacaccagcagatgtagcacataattaaaacactgtttccatggttggattgttggttggtttctacaacagtgcttgattgaattatgaaggggttcctgaggatttaaccaatatagcccattactcccacaaaccaaatattgctaatctctctaaagagaaccgattgattaaaatgatgctcttactaatgagcacctatgaagtcccaggcaatatgttagaaactttacactcagcgtttcacttacactgtattgtagtgactaaaattgcatgtggtctagattaccactctggttttacagataagaaaacagaggctcttgggaaaccaagtctggcaaggttacagaaataggaagtggtgcagatgggagtctaacccaagtgtgtttgaatatgagcctctttctgttccctgatgcccatttcacaagaggaaaaggatggggaattgagcatttaagggtagtcatgtgagaaactatttaatgctttcttccaatatatgttagtgtaaacgctggaattccttttcaaccatctgagtggctttaccagcttaagatacagtggccactgatttacctggcagaagttaagctagaaagcacctccttcctattaagaactgctcattaattcaattcatgagcgataaaatacgacaagaagagaagcaaatttaacaccaacttctgttttctttctttgataaaataaccattatctcattcaccaaaactcattcattcattctttcactcattcaccatacatattttgaggacttctcttgtgccagacaccaggtagagaactgtgaatactgttcttcccatcaaggtgttcacattctcctgggggctgacaggcaggccaacgagtaattgtgatacagtggtaggggtaacttgacagaaatccacagagataatttgccacagagataatggtttgtgtttggagtctcaagtaattctgtatatatggacctgccacagaagtggagaaagggtatctttccctgcagcagctgatgactgaaacttctgcggtgcccttgctgatcctgctgataaatcaggctggatccagagtgtggttttccatggctgtccttgaggaaaggtgtcatacgactgctcggggatgagtgtaatggtttatgacttcagcacctgaagtcctatcacacagcaagttccctggagatggtgatcatacagagcgaatattgcttagctggtgataatgtcacgctgccacgctgagttacacggattgcctgattcctgcagctaaaaactcctggctgattaatcccaatgtcatgtaaatagagtcggtgtcaaggagatcataaatgagaaaatggatgctcggatggggacattagtgaggaatggagagccaccatcaccctactcatccctcagtcagcccctaacaacatcattatccaggtgagaggaggcacatcactcagccagatcctggagggcttccaaatcttccttgcctatcccatcccctgattctattttaaacagtgaatattttacgaatcacataaccaggctttctctttctcgtcatgccttcagagagaagttacaggaccattccattttatatatacatatatatatgtatatatatgtatatctgatatatatttatattttatatatttatatatatatttttatatatatatatacacatatacccctgatagtcaagcaccttaattaccaactagataaattggggcatgatttattcatatttttaaagacgcattagagagtccctttaagcaatgctctcatatttgacttacagaaatttaattgcacatgtaggctaggtttcaggtttgttgacaatccgctctttaactggtttatacccagagatgtacaagttgactcatgtcaattatcttgtaatttggtggctttactgtcaatgtgaagggtcatggcatggcagggtgtcacatcacactcagcacagctccgcttcccccatgacacttgctctcctcttttatcttttttcttctctctttctctgcgtctctttctctttaacaaaaccaaaaaactttttttttttttttgatggcatctcactctgtggcccaggctggagtgtggtggcgcaatctcggctcactgcaagcttcgcctcctgggttcacgccattctcctgcctcagcctgctgagtagctgggctacaggcgcccaccaccatgcctggctaattttttgtatttttagtagacacagggtttcaccatgctagccaggatggtctcgatctcctgacctcatgatccgcctgcctcagcctcccaaagtactagggttacaggcgtgagccaccatgcccggccaaaacccaaaaactttcttttaggagtagcctctactacaagctttaatcagggcatctctttcaaataaatttattcctcttaataaatgctttattctgctcacctaaagaaatccaggtgaacaacattttttctccatcttgttataaactttctgaaacattccaatgtgtaaaggaaatttaacccaaattcatttgaaaatctgcagatttgggtcatgtattccttacctccatgcctgtgatttccttttgatgtgtgtggggggatctcaatcctgcaacctatggtggattttcaggttggaattcatggggtcctggatggcagagacaagagcttttgtgttgtgtgaagggaggctgatgtagctctcaaggctgacattcagttgaccttcttcaaccattccagggcttatctcttcatgtcagcattatttcagcaatccctttgctggtcctcccacttgtgggctctcacgcttgctgactgccgttgtcagatgcaccttcctgaagtgctgtttttatcccatraaagactcccgtggttcctactgcctgtggaattaagttccagctccccagcctgacatcaagggtcctccagaagttaacctttgcctgaccatctgaatttatcttcctaaaacgtgtcaaagtttttaaattctctttggagtacccttgaaacagaaattgaccattttgttttaccctgtcatcagttattttgttttggggcttgtatccagtgtatctgatttgcttcatcttctctatatgcaaatacactaaacatcatgaaacaatagcaccacagctggccctagtttaaccctctaaatagcttccaggatagtttatttcatgtccaggcttccattgtaatttcagtcacctgattcaaaagagaggcactatccatgaaaggccacagaggttacaaggtttagctggagtctgcttgagccttcaagaactgtttatacccaagctagcatttattggggttgattccttctttcagactttgacaggcagatagttctaaatctgttttagctagaactttcagctggagtgttagaaatttatttttctttatagactaaccatttgcagggttaaaggttttaacattttcagtactttttactacctaagcaacccatttataagactgtgcctttcattttttagattttgatgtgtgacccttgatataacacctgacagaagtcattggacataattaatattactggtaacacactgtgtttcacatcaggtgatttkgtggttgattattcagcttcacaacactctagtactgataatactaacccttagccccaagccagctagttaaatctctgctgattcttccaaaatagagtattgtcttctcccttaactgtctaaatccttctgtaatatttaataatagtcataaactactatattttaggtgcagtaaatgttttgcagccattttttttaaaggaccatgtcttttaaagatgtactctgtgaaaaaattaccaatgtagtgatagagtatatgggatttcctttaaaataatccaaaaataaggggagaaaatgggcagaggtacaaataaaacaagattgaccaggtattgctacttgttgaaactgggtgataggtacttttgtgctcattatgctactacctctcaaagcctacacacaaatcatgtgatcttattaaaaatgtagattcctgttacagaaatctagagttggcatggaattctgtatttctaccaaattccagtgccgcagtttggatatttgacccccagtgttggaagtgggacctaatgggacatatctggatcatgggggcagattccttgtgaatgtcttgatgccatcttggtaataatgagtcctcactcattagtttccatgagagctggttgttaaaaagagcctggtaactctcttctcactctctcaccccctctcttgccatgggatctgcacacaccagcccttacccttctgccatgaatgaaagcagcctgattctcttaccagaagaaggtgctggtgccatgcttcttgcayacccttcagaaccaggggccaaataaacctctcttcttcttttttttttttttttttttgagatggaatcttgctctgtcacccaggctagagtgccatggcacaatctcagctcactgcaacctccacctccgggattcaagcgattctcctgtctcagcctcctgagtagctgggactacaggcatacgccaccatgcccggctaatttttctgtctttagtagagacgtggtttcaccatgttggtcaggstggtctcgaactcctgacctcaaatgacctgaacctctctttataagtcacccagccttaggttttcttttttatttcttttctttttgtttctcttttttttagagcaacacaaataaactaagaccttccaggtgacattgatgtggctgatcctctgaccacacatttgaaagctttaggaagtaagaattataatagtttctcttaatttgtaaatatttgaaatttttcaaaataacagcaaattcctctatttttccttgcttgactgaggttccatgacctttttgacatcttttcctcccattttaggacaaattgacctctccttgttttaaacttcattagtccttccggtctctactatatattaatatgtaatcgtgtactatcttgaattattagtttgaatttgtgttatttttctaagactataaaaattcttatgtcacaagctctgctttgtgttttttggatacctgtgccctctagcacatgtttatgggattaaatttggtgcatgaaaaataagggtatatattgactaaaattctgcagtgctaaaatgaatacaaccagttaaaatccccagagaagtggtttggggacagagtggcagaaaaatgaaagaaaagttattagcctgagagggagagcccttgatcgtttcggtttgatgcaggaatgtcagtgtttcctggaaatccttgtgtggcagtgaaaaagcagtgtactaagaataaaaagccctggggttgggtcctgattctgcaatagcacaccatgtggccagcagctaatgatggctagaattacatacatacaggctctggactcagcaatttacatgcattatctgatgtaactctcacaatagcactgcaagtagttgttatgactccctctctactgaacacatactgcaccgtgaacttggactgaccacttatcgtctctgaacatgtgtcacatccagattcagatccaggcctcccactatggagccgaagcctttcatttactggggttttactctattgaaaagtgcctcaagtgtgttgtgctgtagcagagggaggattacccagtgtgtttcagctcctcccatcttacaccttgaatcagaatcttggaggtaagacccagaaatccacattttaacaagcaattcaagtgctttctttaccctaaaccctgaaccactgctgtgttgttcttctgactggtcaatttattatgcatttctgtagaccacagttaacccacaggcaaaatgaaggtggagttgaactatctaatcaccagtgtttaaccttgactacagagttaagtcacttgtttggtactgctctatcacctgtgtccgctgccttattgttagacataacagtggaggtgttagacatgctaatgactgtaggagatcttgagctcactactttgtgaactccttgagtccaaggagcttgccttaaggatctcttatgccaagcatatgggacctagcacataagggacctcaatgattgttaattaagggttgtttctaaagctaacattcggaaattctgctaaataatctttcacttgtcctttacagctgccactggacctcagtcatggttccacttaaagtcttgatttaagattggtctggactccggaccagtgtgtgtcgtcatttgtgttgttctaatgagaatgcaagttaattaacccggccttcaccagagttctttggaagaaatgaacatcctaaatagaagagagaagagatgcccaaattttgcatatggcagagggtatgccaagaaccacttgcttgtgggttctgaaacctccgtattccttcccttcagcccctgcaatcctcctccatcctggaaatgagggagagggccgttaaaatttcatcaaaacttctcatggaaagataactcaaatgttaattgctcaatattggagatcagagcgatctccacaagtaggagttggcagagctattctgcttccatgtttgygacaatatcatttctctggtttttaaatcactacatcttatttaaaaatcttaatataaagtatttataaaacacagcttccaccaatcacgtaaagtagaagatgatatttgcttaaacmaaagcaaaatgtggttaatatggaacttcaggaagccatgtaaataattgatcaggctagtgaaaaagtttgaaatttcattgaaagatattttaactcttagggaagatactttatcaattgcctataacagtttgaaatgatagaattaggtatcaagactaagcctacctgactctaacatacttgctcttagtgaatttttagatcaagaaggtcacaaagaaacatgaaatctctaaaactgccctgcatttgggaggaggggttgggataaatatgcgtattctttttttttttttttttttttttttttttttgagacggagtgtcgctctgttgcctagactggagtgcagtggcgagttctcggctcactgcaagttctgcctcccgggttcacgccattctcctgcctcagtctcccgagtagctgggactacaggcacccgccaccatgcccggctaattttttttgcgtttttagtagagacggggtttcaccatgttaaccaggatggtctcgatctcctgacctcgtgatccacctgcctcggcctcccaaaatgctgggattacaggagtgagccaccacgcctggccaaatatgcatattcttaaattcacgaacagtttttccacatagccggtcttccttcccaggtgtaactactgtagggacacacacacagtttgcatttatagtatgatcccaaatgcaagtctgttgcttcatgcagtgtattcatgtgtgcacccaaaccctatgcctgtctctttgtatgcaaaatatcaggaatacaatagacattcaataaatagcaagactttctccctttttaaaattgtttccttctttattaaaaaaaaagtggagaaagtttaattacccaaatgaatgctctatatctataaataaaagcgtgtacaatgtatatagagacaggaaaagtgaagttgattaagttgagaatttagtgctgtagaaaaaaaatattttgcttagaaagtttagggattgctgctctgtgttgtccaaaattccttaaaataacatcctctgaataaaccacccaatcaagtctgaaatttttcatagcctccaaaattctttagaaaggtctgtttcttgatgagtagggaaagctataacaggaagaaaaacaggacacacaaattcagcccatttattttcccacactgcatgagggcttgggttcaaacaataaatcaccaaacagaattccctgaaagcaycttttgaggcatattgatcactgttaatagattatgtttaaccacaaaaacagctataaatgctaaatcaagcagattttctccctaaagctttgttctgtgtctttagtttgctaacatctatacgaacaaaagttaaattcttcaaacttatggatgccagcattccctcttcctccttccccaagggctgaagaggacagatattccagataacacttttgggtatcagatttgaacagaattctacaggcctactcattttgagtttgttctgattctgtactgcagtctatttactacatgcaattctaaagaaaggaacatttttattttaaggccattagtgaagtcctaagattagaggctgtgcatttggttagcataaaaggtaaagacattagtcctattcatatcttgtttttatcattcttgtctgggcacagtgacttggataatttgaggtaaaagcacttatcccaaattgacttcatctcagaggtcattgcctttcatggtcactgcctaggaagaaggagtgggatggccttggctcattgaattttaggtccatatgtttaatgatttcattgcttctaaaactccttgtcagattttctgtagttcacagtgattgttccttccttggggccccagagcactcactctgtttgcagctcttgctctggcatttactttccttgtctatccaacagacttctctgcagtagctgcctccctaagtagattgtaagtttcaaaaggacagagatagtcatgccccaatgggctcagtacagcacacctcacgaagtgcacgtctgacagatacctgctgttggaaataaatgtacagcccatctgagcatgcctttggcatttctgaaattatagttatacmttttgattgaatggcatttcccctgcttggacggttagggcattaaatgggttgcctgctagaaggagcctgcagagactgaactatgcatcacaggaaagaaatggcagagtgaatgagctctctctttctcagcagatcctgaactaaaagttcagtctggaactttgcaatctgattgagctttctaatttagacgagcttttaaaaatcctagcaataacattttctgtggattcccaactcatatttctgtggtagtcattctgtcaataaaaatgaatgatagggactatgctgagccagagtacatggtccattgaaaaacagacactactcaacctttactcagctgttgtcatcaggaatttgagccaaggactgcatgatcgtctaatatttaatagtaacttgaaaagcaatgtttatgacatctgatttttcaaaaatgtttattttttaaaaaatacaggccatatataatggctacaggctagatctacaatctacaaatacagtttacccactagtctgcatcatatatttatgtgatgcttrggagtttacaaaacagttcacaagtgtaatctcatttaatatttacagctgagatatgagctgggatcctcttcacagatgcaaaaaaacaaggctcagattgttaaagtgagttacctaaaattgtatagctattgaatagcagagctgagcctagaagctggaacttcaagttatttggtttagtgttgcttccaccaaacggtactgttaaaagcctagattatttttctttcagttttaaaaacgttctttcttattaaagtgtaacgtacatacagaaaagtgcacaaatcatgaagtcactgttcaaaaagttattataaaagaaacatttctataaaaccatcacccctatcaagaggcagaacattcctagagctccagaaaatcttgtcctgctgcctgctgttggagaggaaagttgtttttttttttaatttttttccttctttacctattgctaggttcatggctgaggcacttataacaaaaaaattgattaacaaaagaaaagcatacaagcttaatataagttttatatgacataggagccttcagcaatgaaaactcagagaaacagggaaccctttgtattttttatgcttaggtttaataaagagtggagagttggctgggcatggtggctcacacctgtaatcctagcactttgggaggccaaggcgggtggatcacgaggtaaggagatcgagaccatcctggctaacacggtgaaaccccgtctctacttaaaatacaaaaaaaaaataaaaaaattagccaggcgtggtggcgggtgcctgtagtcccagctacccgggaggctgaggcaggagaatgacatgaacccaggaggcagagcttgcagtgagccaagattgcgccactgcactccagcctgggcgacggagckggactccgtctccgaaaaaaaaaagtggagagttgtggagaagtgtgcttggacaaagggcatgtgatctaatgaaaatcaactagggggaacttagcaagaccagtttattcagattcttctctgtgccactgtgtctttagagataaggacattcatttcctctgggtatagggtgggcacctgtctcatgagagtcttatgagctgcttcagaggaaggtcagaaaatttttttgtgtcagggcatggtggttcatgcatgtaatcccagcactttgggaggccaaggctggtggatcacttgagatcaggagttcaagactagcctgactaacatggtgaaacaccatctctactaaaaaactacaaaaaaacaaacaaaaaaatagccgggcgtggtggcacgcacttgggtgctactcaggaggctgaggcaggagaatcgcttgaaccagggaagtggaggttgcagtgagctgagatcgtgctaatgcactccagcctgggtgacagagtgagacgctgtctcaaaaaatatatagaaataaaaaatttaaaacttaaaaaaaattattctgtggtctgctttggggaagaaggcaatagaagatcagagagtgagttcctgcttttgttgtttcctcaaatgtcatggtactatattttggagtagtgaatcctgaaccccatcattgccttttctgtcaaagctaactrtactcctgacttcaactccgtagattgttgttgcctgtttttgttccatttgtaaatagaattatacacactattattttgtgtctgttttttgttttgtttgcacagacttgtgattctgagatttatttatattggttatttcgtgtagcggtagtttgctcatttcattgctttataatttctattgtataaatattccagagttaatttatcagtttcatggtttatgggtgtgtgaattgtttccagtttttagttgctacaaatagtgctgatacaaacatttgtgcatgtcttttaggctcaaatatatgcatttttgtcagttacatctagaagtggaatttctgggttatagagtaagcatggcttaatgttaactctcaaacacttttgcaaagtagttaatgcaatttacagttccatcagccatgtaggagagttccagtrgctccacatttcaccaagtcaatattttcatgtctttctattctttgctagtctaattagtatgtacagaatatcactgtgattttcgyttgtgttttcctaaagaataatgaaattaaacatttcaaaaatgattattagctgtttagctctcctgtgaatttcttgtgttcgccctcttttttctctgttaggctatcttttcttttgattgaaggattctttatatatttatggtatgagtcatctattacttatatggattgcagatatcttctcctactggataccttcccttttcactctgatagtggtttcttgtgttgggtagaggtttccaattttaaaatagtcaatttaccatgtttttgcttttatggttagtgcttaagtgtcctattaaagaaatccttgtttactccaaggtcacaaagattttgttttatatgatcttctagaaatctcattgtgttgccttacacatttaaatgtacaatcgacctataattgattttttttttcttttttgagacagagtcttgttctgttgcacaggctggagtgcagtggcacaatctcatctcactgcagcctccacctcccagcttcaagtgattctcatgcctcagcatccccgaatagttgggattgcaggtgtgcaccactgcacctggctaattgaattgatttttgtgtgtagtgtaacttaacagtcaggattcattttctgttttcccatatggacgtatccagttgactcagtgccattatagaaaaagccatcttttctgactattctacagtgcaacctttgtcatatattatgcacgtatgtcttgtgagccaatttctgagttctatgttcttccatgtttgtcaatttgtctattcttccatactgtcttatagatttattaaaaatattcatatctggtagtgtagctctctcaaatttttattatttatgacattcttaaacctgctcggccaattgtcttttcctattaatttataattgattgctaatagtctatttttaaacatttgttttatttcaataggtttgtggtataagtggtttttgattacacaggtgaaatgtatagtgataaagtcagagattttagtgtccccatcatccaagtcatttacattatacccaatatgtagttcttatattaatagtctattttgacttaggtattttctattccaaagttgcttctttgagatctttacaaatctgtcacctttattcaaaattatacaaatgaactcttctaattcatcaaatgttctcaaggagataatggggaaagagtccttgcaaaacatctgtcctcattgttgaagactatagatcattgagagagccaggaggccatgtgttgcatgatattgtattattatagtttccattttgaaattatttgtgactatggatattgttttcatatacagcatcaattctcagtattttgattccagaactgtcactctccaagacagggatgtttctgcttttgagcctttgtactcactgtcccgctgccttaaatgcttttccctcagttactggcatgcctaactccctcatctctgtcaactctttgctcaaataccaccttctgaatgaaacctaagaacatcactttaaacctccttgccctgctctatttgtgtgtgtgtgtgatggcaataacacaagtcaccttctgacataccatacaatgtacttactgagtaaggcccatctattttctatctctccacaacagcagaggtcttggctttgttggctaacatatcccaagggaagaacagtactatgtatacagtaggtgctcaacacatatttgtagaatgcgttgaatgaatgatttccttcatggaatcatagggttaagcgtaatctgtttctaccggtgatttagatatagggtatactctggtgaaaggttgtagctgccctagagaagtcagtgttcacaagggtctgaggagcctccttgcaaagaattcatcctgaccctaagcatgggatattgattcagtaatatattctcttagtagttgcaagggaagggtgatcctgaccatattccaaccacaattggctattccttcctttaggaattcatatcagcatccttagagggagaaaagaatgtggtttaagaatatgtacatattcaaactcatcaaattgtatgcaataagtttatgtggtgaaaaggtaaatttaaaaaagtaaaactttttttctctagaaattctgtaaaatatcttcaaacgtgaatgtccatcagagttatttggagggctttttaaaacacagactgctgggttccacctccagcatttttaaattttggtattggaccagacaatttgcatttctaacagattcccaggttatgcagatgctgtaggtccaggggccgcactttgagaactgctgctataacataacagaaagcaagggaattcggttccattttggctgtgacctaaaggaggaaagaagcattttggcaattcctagtttctcattttgccatagaaaactttgcaaacttttgacaccttgaaacattttaacagctctaaagtatccacaaaaatggacagtggcccccacaagagggctgatgccctgcaacactaagcaaaggccagaaaaaaagctggaagatgttttcttccttctcccctattttgtttctttctctctctctctctctctctttttttcttttctttttttttttttttttttgacgcagggtctccctctgtctggtccaggctggaatgcagtggcatgatcttggctcaccgcaacctctgcctcccaggttcaagcaattctcctgcctcagccacccaagtagctgggactacaggcatgcgccaccacacccagctaattttgtatttttagtagagacggggtttcaccatgttggccaggatgatctcgatctcttgtccttgtgatctgcctgcctcagcctcgagtcctgggattacaggcatgagccactgtgcccggccttttctctctttttaagccccctccaagggtagccagaaataactgggtgggccttctctgtggcaatctagagattctaaattagcaggaactagagtcaagagtcacttgggtgactcatttttacagaccttttaaaccatgataagcttgttagaaacaaaatcttcaacaacctggttctgtatccttgtagcatgaggaggtcagacacgctggcaggaggagtcctggagggaatttatggtgtcatygcacagtggatgttttatttaattctgtcttccaaccactggccaaaggtagcctacaagctgaggtggttctggatgctaataaatatccctaaagagctctttaggtttcatctaggcttaattacaatgtgtaaatacaaagacagccccattattgatgttaatcctactgatactgcaggaagggagagaacagcaatgaaataaaatacaatggacaatggtctcttattagcctactcaaagaaaaagtgagtctcctgctggctatctgtgtgtgactccaggttaacccagatctgattaccttctgcttggtgtcaggttccatctcagtgctcagtggagttcctggctagatctgaaacctttccacgccatttattttaacttctgcaaggtttcttgctgaatttcagtgaaacctggactcggttaaatgtgacccacattacccaacttttcctagtagcttgatcccttgccctacctcttccaaacatacttaaggcaggtgaattttagttttgtgaagggagcctgccaaaagccaaggggcagtgttcagactttctatttgtttatttattcaacattaattagctaccaactgtgtaccaggtactctacaagcccctagggatatggaattgaatgctgtttcctcgaccttaaggaactccaccaagggagaaaattggacacattgacagataataggaggccaagacatgaagtggcattaaggaggtgtagaagagaaacaagcaactcaacctggaagagacaggtgcagacatcttagtggagttcatagcttaggatgcatccttcatatttggtaagagttaaggaaatggggaaagagaggagctagccaaaacatgcacaatgttataaataaaagtataaagatgataaatcccatggtatctgtggggaactataggattaagaaagtgatggaggaaaagggtcacagtgagttaacagtccttctgtaccaggttctgtttacaaagtagtggtggaacatgtggacactagaggcagattaccttagttccaattctgattgttccatgagctagttctatgacactggacaagtaacttcacctctctgtgcaggttccttaacctcttcatgtctcaatcttcacctgtaaaatgaggatgatgatatctttctcatagctatggtgaaaataaaagttaatatataaaaagtgctagcataataaaagctaaatgaatactagctattattatttattatcaaacacttatgtatcatgtccattattcccaccaaaaatcctatgagctgtgagcatccctgtgtgaattttttttcctcaagcctgttcaactccagcactttggcttttaattgttatactacactgcagttctgcaarcctctgctgacatatctcaaatgtctagccataaagatgggaagagggtgtgagggatgagactggattgatacccaaggctattccttgaggctaaaccacaacttggaaaatggaaggaaagcgtgaaattgcaactaagcaaaaatgtccctgtttcagtcttagacaaggtcttggaggaactcaygaaaaaaaatctgctgcaataacagttgattctacctgttgtctgggcacatttgaacatgttatcttcgaggaactgcttctgatgttaaaaattactaaaaaaatgataaaacagtaaacatacttgtgggcttttcttttcttttagaaataaagatctccttatttcaccagtccttacaaatataaaattgtgatatatcaatatttaaatagacaaccttgtgatctagtgttttataacccagaatattccaggtatggcaaattagctggttctttacttaggatctccatggcatacagtaaaacagcctggggatagagaacccccatatacagcaaatggcttttggtgtttggggaggttaaaaataagtaggagaattgtaaggagaaggtgaaacattctgtctgttctcttgtattatctgacaaatctctaggcatctcattggtctccagttttgcaagaggtaacttgtccagttctttggagcattggaattctgcaaggagttgtggatagctgtgaagtaaaccttgtggctgttaatgattgaacaagagtccatgtagcatctaatggagtgatcattgggtagcttgcagggcagaagcaaagacacagcatttacaagagaaggagagcaattgtttgaggtttgcatgaatttgtctggagacaaacatgcttttctcccttttatgtggaaggtcgtgtttcttatcatctgctcttgatgagtttaatcactacattccattgcagactttcaattattcccccataggaggcggcattggcataagaagtgaaaagtggtttaaggaatacgaactgacaagttttcaatgctgtggataatgctctgtgaaagggagagtgggtctaaaacagacccaagaaagagggctttattttgtccacagccaaaaagttaagaggtccataaaggaagctgctatttatcagtcacctgtcagcattacttggtgattagggcagaattattattattttctttccttctgaggttcctgtcctcctgctcatcccagtgtgtgggaattgccttcatccgtctaggcagatcttacagcatgttgaagaatcacaaggcttggctccatgtggttcagttgacttatgcattttctggtggagcatgtgaaaaaatcactgtgttcctgtctcagtggggtgatatctggtttgaaagctctgtgagagaaactgaaattatctgcaagacacattcactatagcggaaaagaagccatgcaggacacctctgccaatagacactgcgattgcctgttatctccattggaagctgcttatgaactcggtcttacaaaaggaaggggaccgccaacttattcagagatctgaggcctctcaaaatgacccacaggccccacggttagctcagttgttcaatcagctcctattaactttcctgagttgggctgatggtccaagttttgtgctttgtggataaggcaaacgcctgatgcagcttgacgtcacaaagcggtggagaaacacatctgcaggggagatgaactgagtgatggatgttcaccgatgcaggatgtttaactgaatggcattttcttttccataaaatggaagaactcattcagagaaactacggaaacaaaaaaaataaagttatgccttgtgagcaagtaactaggcctcaactcagtggagcatgattaagcatggctgggattttctttcatattctgtcctgcagagcgactgtttgaaaatttttctggcccagtgggttttcaaacttatttagcagggaaccaattttataaatgaaatcttttgtgaaatctcccctactccatcctttagaaggtattaaaacagcrtttcatttaacaaatgtataagttcatgtgcttacaaactccatggcttcaaatattgaagttatattgatgaacaaacatttgaaaacaggtgttgtggatgactgttactaattttagaaatacgtttgatgcagtgattagattcttttttcagaactgagactatactggcttccatacatagttccacatcataagtttttcaacagttcaaatttcaatcttaagatatacttcagtttttctactagtcttctttccatactgaatcggtaccagatacacttctgagttctgacttgtgaccctcctgggtttcttttacttcattacttatattacgtattgtctccctatgcacctattctttgtcgctctgataataattatttgcatctctcaataggtgaaagagcaatttaaaggaagtcaaaaaacaggtttcttagtaagtctaacattttcgtcagaaaatacttttgtgcatattatgagattgtgatattttcaattatatatatgtttttaaatcttgcgtattttggtgcctgtcccagcaactacatgaaacagaagaatttatttgctttatatgttgagtacaaacttaactttgaatgtcattccagataytttatccatagtcctaaactcaataacattgtgtcctgtgttatgcttattttgctactaaaaactatattctattttaaggagaaacagaaaagtagtgatttctcttctcaatttaaacattcatacttgcccttcgtgttgatcagaagagctgaacacttcagttaaaaaataaaaatctggaactctctgcccaaataattctaaaatgtctgtgatttgtgaacagtatatattgtattgtctaagcaactgtaattgaaaatggtgctactccatgcaacacacaaaaacagcctgataatatctggggaatagcttttataagggtcacaacattttacagtttttcctgttgttgctttttcaacgtctatatgcagatgtcactgcatttttgccatacttgatcatgtatttgaaaaactaattcagacccttcagaattttttttgcatcgacgtggaataatttaaccaaataacaaatcttcctggtatctctgtatgaccagaacttaccaaagcaaacaaaatagagagttataataaccatttgttttgtttagttttgttttgagacggagtctcgctctgtcaccaggctggagtgcagtggcgcaatcttggctcactgcagcctccacctctcggattcaagtgattcccctgcctgagcagcccgagcaactgggacgacaggcacccgccaccatgcccagctaattttttgtatttttagtagagacggggtttcaccatgttggccaggatgatctcgatctcttgacctcgtgatccacccgcctcggcctcccaaagtgctaggattacaggcatgagccaccgcacccggcccatataataaccatttttgagtgctgttgaattctgatggtctcatataacccagacttaagcaaatttatccagtatgcagaatgtactttcttagctccatctctgaaatacattatcaaatattgtttctaattgtaccgtttaacacaacctattcatcaatctacttatttcaatgacaatattagaggcattaactttttgtctgttgtgggaacatctttcatgtgatgaagccatttatcttaaatgctacaactgcattttaatcaaggtatttgaattatctttgcacgctcttttaaataacatttacatgtttagtygtcccagagaaaatttagaatgtatatttgtgttttatataaaaatgaccttgtgacttggcttgaacactgctttgcataattgtactgcataaattacattgagggyttggacttctatcaccttaaaaatggaaaccaatgaaattgtactgtcttttygagtggctttatgaaaaatactggcaacwctactattttatgtactattgaagttgtcactggcactagatgaagaatcgtatgatgttagtatagaaaaaactgccctctcattttgaatctaattgatgctatcacagtcttttttaaaaaagaatttattaaactaatactccatttctaatgtgaataattaacctacaatagacaaataaataaatctttagacaacatacaaagcactttataatattatcatgggaggagctgaaatttagatcagcactgaaattctacaagagtatgttgtatattcatcacctcctggccttttggccaagaacaagtgaagaatatgttgtatgttcgtttgttattgcacagctatcaagtaagcgtaattgggcctgagcctcgcatggtattcaatgggatgtggcctagaggtgctgaagtgtagttagtgtattctctactagaaggctcatgtgtgaaggacaaacacaggtctgagtttttataatgttttctaaagattcatccagaatgttctacttacctatttctgtgttaccaactaccctaaaactttatggctaaaactccaacatatctttattttggtcatgaatcttcactttgggcaggacttgccagtggcagttgtatgaggcgtgaactagagaggctcagcgggggctggaggatctgttttcaagatggcttacccacatgactggtaagatggtactggctgttgcctggaaactcagccaggggacatctttccactccattagggtctctccaaagggttccttgggcttcctcacagcatggcagctcggttttaaggcagagtgttccaaaagacagaagtggaagctaacagtttgttaatgcctcatctggaaaatggcacagtgtcactcctactgtggtctattgtcaaaacaagatcctgcaccagttaaaagggacaagacaaagaccccctctctgccttgggaggaggccaaagaatgtgtgactgtctttaatcaccacacacagttaccactttcatagtcaatgaaccttttgaagacatttcaaatgattacacagggattgcaggggaagttttagaccaaggttaacacaaaaactaattactacaaaattgagaacaaactagatgctaagcgtaggtctagtcgggacatggagatacaagggaaatgacttaacctagaaaaaattaacacttcgtctctggaatgttaagatttgctataagcgcatttgagtatgtaaatttgtttataatcattgaaaaatgaaaatataaatttaaaaggaatgagaataatagaagaatctgcagttctgtgggaggtactatgaaagtaactattttcttttttttgagacggagtctcgctctgtcacccaggctggaatgcagtggcacaatctcggctcactgcaagctccgcctcccaggttcacgccgttctcctgcctcagcctcctgagtagctgggactacaggcgcccgccaccacayccggctaattttttgtatttttagtagagatggggtttcaccgtgttagccaggatggtctcgatctcctgacctcgtgatctgcccgcctcggcctcccaaagtgctgggattacaggcgtgagccaccatgcccggtggaaagttactattttcatgttctcttctttgaaagtccaatttcttttgccttccagaaagaaacagttctgacttactacttattacccttctggggttctttcacctgttcattacttatattaaatagtgtttccctgtgccatctatttattctcttgttgctctgatttaatacacctgtttttcctccctgtcttccttgtttctttcattgaacagctgcttttctagtacctgtcagrtgctaagcacagggctagctgggatacagacacaaggatataggttaagagctttttgtcatccatgcctccctctctcctgctgcattgttctaccaggaggacctagaatagggtttatggtatattaaggtgtcaataagtatgtattgagtacataaatgagagttcagtcttcaaataactcaaaatctaataggagaggcataaagaaataaagctgctgtgctgtgatatgtattaaattggacaatgyagggaaatatgaaggggaggtgggtcaaaatacagcctaaagatgacacacctcagycctcaacaaattaccacaaaatcaagaatgggcaattgatataattttctatcatggtggtatagaaattgaaatatttattgattccaaataattataggttctcatttggatagttatagttaggtgtcaacaaacgaataaaaatgggactgaaatcttcatataattttaatatcacaaaatatgtgagaatcatrtgcctatttttgtcattttaaaatattgtayggtcccacctcattaaataaaatttccccatgattacaacagtaaaataatcttattgtggaaaatacatagggtacagaaaagtacaaaaaaggaaaataaattgtgcagaattttaccaagagataattatgttaacatttattataaagtgtacataatatgtaggtattcatatggaaaaaagggaatacaacttttagaacataatgcttgtgcagtttttaaaaaattcctgtctttcagttaaaattttatcttcagcctttatttgtgaaagttttcaaaaaaaaccataatttctcatatctatatgattccacatttaaaatttctgtatttagaacaatctctagtttttaaagtttacatagtgttcagctttttctccacccccatccctaccccccgcccccgaaagagacaaagtctcgttctgtctcacccagcctggaatacagtggcacaatcatagctcactgcagcttcaaactcttgggctcaagtgatctctcaccccagcctcccaaagtgctgsgattataggtgcgagcaaccaagcctctcttggcttttcattttctattataaataatgccgtgatgggattcccttatgcggagatctttgaccatatctcaattatttccttagagttgattgctgtagctggaattttcttagctgtgaccaccccggggctcttactctatataggcatattgtttttcagtggtttacattaaaatatctttccatattggcaggcaactggagaaagtttaatcagggctggatgacttgctgcttttgttttgtagggtcactgctttggctttctttagaaattcactgtcacatacacgcacaggcccacccacccacacacacataccascatatttatgggaatttataattttgtcctttaaaaatgcctcgactagagtgcagatgaaaagttttatatttttaatgatgccagcctgcagcccaaagtatggacctatagaagagtattgtaaggagggcttcccagaagagtagccacttctggtaaatcacgaggtttaatcaggaaatgatatggtttggctgtgtccccacccaaatctcaccttgaattgtaataatccccacaagtcaaaggtggggtcaagtggagatgattgactcatgggggtcatttcctccatactgttctgatgagaacagtatgaataagtctcgagatcttgtggttttataaatgggagttcccctgcacaacctctcttgcctgctcccatggaagacatccttttgctcttctttttctctccaccatgattgctaggcctcctccaccatgtggaactgtgagtccactgaccactttttctttataagttacccagtcttgggtatgtcttcattagcagtgtgataacagactaatacaggaattaccaaagaagggaactgaaaaatgattgtagagacctgtttaggaatacaaacttggatatcaggagttattacatacaatgccagtagtattctctgcttttttttttttttttttttttttgagatgggatcacactctgtcgcccaggctggagtgcagtggcgcaatctcggctcagtgccagctccgcctcccgggttcacgccattctcctgcctcagccttccaaactagctgggactacaggcaccagccaccacgcctggctaattttttgtatttttagtagagacggggtttcaccgtgttagccaggatgatctcgatctcctgaccttgtgatccaccctcctcggcctcccaaagtgctgggattacaggcatgagccaccgcacccagccgtattctctgctttaaaaagggatttgttgtggattgcttttgaatcatgagtttctgttattccctgcccccttccttcttcccaactattcagggccatgttaattatgtaacaagaggcacactagtcctgagccagaggtaggatcttctctgtgagatgccttcatctcaggcagcctccttcacaaggccagagactccatccagaattagaccgacactgcagataatgtcattaccctaaggattacagtacaacatgatgacatgatggtgcatttttatggctagatttttagatctgaaatagacactaagaatgcattagatccaatattctgccttaggcccttatttaaaagattaatattcttgttgtatgagatagctaagaggaagtgagtctgtggattactacacacacacacacacacacacacacacacacacacacacacacttatgggaatttattattctctctatacacacaacacatgcatactttggctatacataaatatacaaaatattcttatattgctaccccattggaaggatgctgatatgagctgcaaatatattacttatgctgctaagtacctattgtagaacaacttttttttttcctttttgagatggagtctcactctgtggcccaggctggagtgcagtggtgtgatctcagctcactgtaacctctacctcccaggttcaggcgattctcctgccacagcctcccaagtagcggggattacaggcacccaccaccatgcctggctaatttttgtacttttagtagagacaggtttcaccatgttggccaggctggtctcgacctcctgaccgcaggtgatccacctgccttggcctcccaaagtgctaggattacaggtgtgagccaccacactcggcctagaacaactttttatagtaatgagtgggcccagtgatacaaaccaaagctgatttctgtaagactgtcagtcccctaatggaatctcagtaacaactcccaccttgaatgatgcatgtcagcaattagtaggacaaaaggcatctggcacttttacatctgtgtttaaaaataacccttgttatttcctctaggttttaaaatcagacttgttccattatgaagagacaatcatggaacctaccggttgcctcttggtggacacatacgacattctctgtgtggaatgcagcctggattttctaggcacaattatcttagtttgcaggtatgcaattccagcaaacatacaattcatgtaatatagcatattcaggaaagctatgctatgtgttcttacattctcccaggttttgggagctatagaaatgagaactcattagctatagtttttgcttcattatgtgctatgtgggctggagacagttgctcacagtgagagagacaaggcatctaatggcccaaaagagtggctgtttctcaaagcttcctaaattagtctcaggtaggagctttcccaggctcctggtctgacacagtaattaaaggagactgggaagattcactcattccataattatttttagttccaatacggtctgaccttactaattcagaattattgagagagatattagtttggcttaatgagaagcatgaaaaatgtaacattttaaattgaatcatggctttattacttagggctatattcaaaaccacaaagtaatagcttaacaccttttgtggtgatgctcctgggcctgctttaataatgagataggatgatttttaatttgctcagggccgttcttgtccttggcatacaaattcagtggtcttcgctgtgttcatttgctgtgtaacacattttttaagatttatgtattcttggatattttttccttcagaatcataattgtgacacattactactgtaagaacccaaaggaaaggaaaatatatgaagaaagaaaagttaataaattccttctctttcaattcaaatctcacatataaccaataataacagattggtgtgaatccttttagagccaggtttaactgcctttgccggagaacatagaagatgcttaataaatagctgttaagctgacttgaagcaaatacctgcttataaacagtttatttcagctgggtgcagtggcttacccctgtaataccagcactttaggaggttgaggcaggcagatcacctgagggcacgatttccagaccagcctggccaacatgatgaaaccctgtctctgctaaaaatataaaaattagctgggtgtggtggcacgtgcctgtaatcccaactacatgggaggctgaggcaggagaatcgcttgaacccgggagacggaggttgctaaatcgtttatttctatctcttacaatgtcctacttccttccttcctattactcctatcccagattgaacccccatgtctttgcttataagtagattactaaaaagccttctaccaggcttcttcaccagcaaacttgacccccctctgttctgtatacgatgttggagtaattggtctgaaacgtgcctcatcctacatttccctggccaagagtcctcccattgcactccccactgcctaaagaggtaatgacatttcattttagagacctttacatctggcaccagcccaacataaccatattccctttacaacaatccctgtcacacatcttaaattccaggcaaactacacgtttaaaaatgccttgtctacactctgccccttcctgcctctctgcctatttttatgctgagcttcattttgggattcaatttaacattaaggagctcctctgttcaagacttgggctagtcactccagagactagcctggtagtcattaggaaaacatttttattatccttcaacccaaagtggcaagatgtcaagaaatttatacaaaaaaattctttacatgatctctattaaatctcccactatttttgcttctacaaataacatccatcttctagtgttctctcaaaatagtcactgatatcttcctttcctacccttccctaaactggcattgccccttcccctcacccctagtctcacacttcatacttggcctcatattatatttatttgagcccatatgttgaagagtatcttagatatatgaatatcacttattatcttgtatttatttgttcaatcttcttgcctgtaaaaactaattgaaacctccattttgtgtaagccaggtattagcttgaagcatacagaaattcaggtttgaggtaaaattgactttttttttttttttttgagatggagtcctgctctgtcgccaggctggagtgcattggcacgatctcagctcactgcaacctccacctcccaggttcaagcgattcccctgcctcagcctcctgagtagctgggactacaggcgcgtgccaccacgcccagataatttttttttttttttgtattttagtagagacggggtttcaccatgctggccaggatgatctcgatctcctgacctcatgatgcacacgcctcggcgtcccaaagtgctgggattacaggcatgagccattgtgcccagccaaatggactcatacctaaaaatcttcccaacatttcagccggttttggggggaaagatgggagcatgttctcaggaccactttgacatcaactgctgggtgtgcattgcacacagaaggtacaaacttctctctgttttttacagtaacaacattttaaaaaattatttatttcaaatcattgttaattctgcggacttaattgctgatggggagagggtgatgtggtgtcactgggagtacagttttctgccctatcataggtgagttctccccttctcccacttctctgcttccctcctcacctgattctttctggcttgcccctagaaaccccaaactttccctcctgtgatgcctggcccagctgacatctgctgagatttttttttccaaacaacaaaccatgatccaggtatattttcaaccaaatccaatgttactcttaagaagaattctggtatcagttattaagataataaaatttccccttatcctgttacacttcagaaatcccgttttcatcatgaggaagtaaatttgagcccagcccctggctgaatttgtaaaacctgaattaaggaggtataatctggaggctagtgcctgatttggaaactagaatggctcagaagtccctgaagctaaattattgtttgccagagccaagcttctgctggtgcaaatggaaacagtttgtcttgtaagtcaactcaaagtgatttctcctctgacaaagtgaagagatgagagaaaaaatgtgtaccctgaactccagaatcctgtttcttctgtgtaatttaaggccagggactaagcacgttttcttaaatgaaacaaatggtgctataaatggtaatagcaaccatgcatcttcactttttgatgtggctctgatgagctcctgttaatgaaacaggacacagcagatgcaaaactgtcagagtagaagatggaaaatgagattccatgtgaaatacagacttcagtgcccagagatctgatcttagagaagacaaatgatgtttgcctatttgtgtgtgtgcatctgtgtgtgtgtatgtatgtttkgtggtggcagtggtgtgtgtgtccatatttgccagtttatgtgtgtgtatgttcgtgtgtgtatgtttttagttgttagaagtgctgggcattacctgtttttttccattaaacctgaattacgtaaatctatattttaatgcaggctcttggaaggcattttaggacctgtcttcatttggcaaaatgtggtactttagaagttttcttactacttattcctgaagaatttacttagagtcacctctgaccaacctcagattccaagaattattcagcgccaaacttctgtagtcagcaacaaatgggagaactgaaaaataatacaaggacatacttcttaattgctcatttcttgtctttgcagtctgattctactctagagactgttagctttactaaccacagaaattaatctttgcaaagtcctaaacttttggagctcagtgtatcagagaggttatttttagaggagatataaccaccagttttttaaaatgaggtattggtgtgtgtatgtggtagggggtggattggaaacatttcgtgctaatgaataattcagtttgatttactggagaaatgaaaggggatggcattctgcccttctcttaatgtaaaaaagataatagtggtttcgcattaactgtatatctgaaagtatctaatacagcttatttttgttccaggtcaagttgtcagcctttaaaatagtttaagactggttgtcatgttaaagtgcacctttaagaataaaaggagtgtgagatgaaattgtgccatttgctccattatcccacccctacctaggtctccttgcaaaaacaaaatgtgtttcttaattgaacatcaaaaaaatgaaagaagccagaggttgggagtcctcatgacaagaaaggccatcgtgaatgaccctagtagttcaggtaatcaagccagctgtatgagtgctgttattttgacactgcaaaggcatgagctttcagaagccgagcttattcttgtagctattattttgcatgaatagttacacactacccttagctcaggcacttttaaataagaggccaacgaattatgtaaaagcagcggatataaacatgtgaatgtatgtattagaatatgtttatgaaattatggggcctgacattcgcacaaggaggctttgcacattaagcttctcttcttctatttgcaaggctgctcgtstgttgcatttaagtgaggtcttctccttaattagaagcagacagtgaacaaatctgctgaatctgggaagtaaccagaatatatggtcacgaatgcaaagtccttcctctttcctctccctacccatgcacctcccactaggggaagtggccatttgagagggcggttactgggaggtggtggagaaggagcttgggagacagtggagaaagaatgctacttagtgtgttggagagaagtggttcaccaaggagaagcatggttttgaatttatttactgtcttttgttgttgttgtttttctgcaaaatggccaggttatactcttacccttgaaaccacagtgtctatataaacattttaggaaagccattagtagaggagtatatatttctctcatttctgatgctactttgaaaggtttcctaagtaaaggaaactctgtctggtcttgtttatagttttccttcagatgacttgcaacatggcttctatgtggatgagtgtaacatgcttagagatgagatgaattggggcagtgttttactgggggctgagttggggagaattgttctgtagcagcataagtaatttagtatagtccagatgttgtcaaagagaaaagcatttggtcaaaataagagaatctgtggcagcagtgaagtgtcaggagcatatcaaagctgcaagcatgggaaaatgagttgtaagttcagaggcagtgacagtcagggacacagaggtgagggcaggcacacagagtgtggctcaggggacaggcggagttcaccaactatttataagacacccactgtgggccagacaaggtgctgagtctaaaggtaagtaatggatggttcttgccttcaggggagttaaaattaccaggagaaagaatatcagagaataatttaatgtggtacctgccttggaatggcagcgctatatgtaagggcttaaaggaccaggctaatctggtgcagctttataaagaaaaaaaaaaaggatgttaaagagaatgttatgcagtcctcctacctctttccttttccctaaatgaagagaaaatccaagaaaaaaatagcaatggaaattgagtcccatatgtttctcttgtgattttagacatatttcctttcatttttagaaaaaaaaacatggatattactttataactgcaagataggcactaagcaaggtttcctgagtattggaaacattgagtttaagtctcttacaaattgggctgtctcatcttcccaaagagtaccagcactaatcacattatgcaggcgacacactctggtcatatcatccagaatgatcagcacttttcttgcctgctgtgatatcattgggatgcctcatttgcaaatgggaaaattgtagggctgaaaacaatatgcttctgatttttttggtacgacgaaaggcaagtggtggtcaggataatgtctgagagaacttgtgcatttgactttcatgtgtggttataactgatttytaaggatcctaggggccaaggttgagctcaaataattcactggtatagggagaaaaatgtgcctcagcagaaaaatatgcattttgtctgtagcatacccttctggtagttatctgattctatgaaagctattttataattatttaaattgtagatgaatgatagcagtgcaaaataatttttagctatagacaagtaaattctgttcccttgtatagaggctcagttgactcccctgaccccaggtagttttgcctgcatttgtacattcatttctacattctattttttttttttttttttttttttagatggagtctcgctctgtcgcccaggctggagtacagtggcrcagtcttggcttactgcagcctccccagttcaagcagttctctgcctcagcctttccagtagctaggattacaggccaccatgcctggctaatttttgtatttttagtagagacaggatttcaccgtcttggccaggctggtcttgaacttgaacatgatcacagggtggtcctgatctacccgcttcggcctcccaaagtgctgcgattacaggtgtgagccaccgcacctggcctcatttctacattcttttaatctgtaaaaagtggtgctttttgaacttctcctttgactggtcacaacatttgccaggttcccttgttayaagtaaaataaaatctttgacccaaatcctttttatgcctgtatgaaaatcatgattttgtttttttttaaattatcacttascattgtattattattgttgctgctactgtcactaccactgctgctgcaattgcttactgtttctaccatgacgaatattttttgagcaatgtcagtgctcaacttcccatgtagccctaacttaggaagaaaagagcaatttgatgcattagaaaagcaacacttcggataacttttatgaacatgtatctcacccagtgaagtgaaggcaaaattccacagccacgcaggacgtttttttccccataccttcccaacttgtaggataacctgtgggtagcttcactttgataatccatgccagagcatagcagaaaaaaacaaaacaatacaacctgctgaacaaatcccgttacttttcctgcccatccagacagatgtagtacctttttattcaaactcatttctaaggctgttcttctattctctgttaccctgttcttactttttttttttttttgagatggagtctcgctctgtctcccaggctggagtgcggtggtgcgatctcggctcactgctagctctgcctcccaggttcacgccattctcctgcctcagcctcccgagtagctgggactacaggcgcccgccaccacgcccagctaattttttgtatttttttagtagaggcggggtttcaccatgttagccaggatggtctcgatctcctgacctcgtgatccacctgcctcggcctcccaaagtgctgggattacaggcgtgagccaccatgcctggccggctgttcttactttttaactgctaatatccactctcctgtatgttttattttccgacgttcagttattactaatagtcattctgttgacaaggtttccatttaacttttatgaggaaacggatagattcactttgctttctatgcagaaacggtggaagggcaaaatacattttggtgcctgcctctaggaaatgtcaactcttaagccagtttgctctcaatgagttattgcctcttcatcttctccttctcttcaaaaatattcagcaccatttcagaatgttatatcctgagttgttaaaccttcaccagtattttcacattcaagtaatgctaaatagcacgtttgccagcaaaatttaaattgaatctgaaccattacttttacttcagggcagaaacagctcagtggcatatacttctgtctgaaatagttttaatcaactgctaaaatcaaaattgccatttaaattgatagcattttcaagaamaaaatggtttcagagtccttttccaaactgtctgttggcttaaatatgggtcaattgctatatttgtgtctatgccatccttatttgatacttctatggtataatcctatttttttaattcccggattacttagcactgaattacatactgaatagtaacatatactggtagacaaacagatacctgattatattactttctttgactcctaatttttaagacattcagcatattccagacagatttttgtcrtgctgtagtcattttacataaagagctgaccccccaaaaatcaattttgtaggtaagagaatttcagtatcatgcaggtttcctgaaagtccttgggactagatttaattagttttaatgggcttgtattaatagcaaagtgggtttattgtttttactaagaccatgaattatgaatttgtttgcttctcattttcttttttttttttttttttttttttgagatggggtcttgctctgtcacccaggctggagtgctgcagtggcacaaccttggctcactgcagtctccaccttccaggctcaagcgatcctcccgagtaactgaggctacaggcatgggccgcattgcctggctaatttttggtacttttggtagagatggggtttcaccatgttgcccaggccgrtctcaaactcytgagtcaatcaatctgcccacctcagcctcccaaagtgtagggattacaggcatgaactacggcacctggcctcattttcccttctatatatgaaaatttcccttctttatgttayatccttggaaaaataaaatttactttgttgcttttcaacttttaaaagaatattttttttccctcatgtatacattcaaacaaagtgttgacagtttcaactgtgaacaytggggcatgatactgtrcctgatttgagctaatacttgttacagaatgaataaaatmctatctagtttttagctttaagaaaataaktttttaaaagaaattcctgcatactcttctggaagtcaaaaattctaattcagagttcagcctctatcatgtcctttgtgtccttgatagttaagtcatgtatctctttgctactcaattttctcacctgtaaaatgggactgataaaaagtagcagggatgctttgagagtgatattcaagtgtgaatatagtttgcactgagatgtaataaaaaccaccagtgcagctttgtgtaaagctgatgtcacaaacaagtgaggagtctactgtcagagcccatgcacaaagatttcctgaaaagacatgtatgggtagggtttccagccctacttgggcatctaaagagttgcttagaatgttgactcgagatacagtatctaaacctgacatgaaagccctgtaagaaattagccaggcccggctgggcgtggtggctcatgcctgtaatcccagcactttgggaggccgaggccggcagatcacgaggtcaggagatagagaccatcctggccaacatggtgaaaccccgtctctactaaaaatacaaaaattagctggacgtggtggtgcatgcctgtaatcccagctactagggaggctgaggcgggagagttgcttgaaccagggaggcagaggttgcagtgagcctagatcgcgccactgtgctccagcctggtgacacagcaagactctgtctcaaaaaaaaaaaaaaaaaaaaaaagaaagaaagaaaggaagaaagaaattagctcrgcctggtgtagtggtgcatgcctgtaatgccagcactctgagaagctaagatggaggattgcttgaggtcaagagttccagaccaacctgggcatcatagcaagatcccatctctacaactttttttttttaattagccaggtgtgatggtgtacacctatagtctcagctactagggaagctgaggtgggaggagcactggagcccaraaattcgaggctgcagtgagctgtgattgtgccactgcactccagtaccttgggcaacagagcaagactccatctcctaaaagaaaagaaaaagaattagttggattttagagtggactaraaaaagggggtctgcaatatagatcattaggaactacctataggttttccatcttggaaaaaatgttagtaaatgtatggtatttttttactctgtcatgatctattgcttttaagtccaaaaccagcctctcttttcctggcttgagcttatccagaagaccactccacttcctcattctcatgactaggagaggaagtctgagcactgtgaatattgggacgaatatacggaagtcaggggctcctttgtccaccatgcctgtgcttttaagctcatgacgaacagtgcttgagagaggtgtgtaccgagaagtaaatacaaacaagcatccaacagcctgtccattgtgatcctgtgttgattgctcagtcttcacctttttattttctatatctctcttcactcttaagtttttgaggcaatattcacaacgagtcacattataacatgcaaagtttaattgcataaaatatttcgtctttttcagatctgtcactggtggaagtggagataaaaaagatccaaaagagtaatttacttttacgctcagaatcagattctaaatgtagaaattaatgagacgtttacatagttgtaaaaggaagctrcaaaaggaaaatgcaaaaatgactttatacaacctcaacttcatcctccctcttcttgtctctcctctttccttgtctgtcttttyctctttactgtctttctccctattcttttccctttcccmcttctagtgatttttgtaatgtaccggggagttaaaatccagctctgctccaggagtaatawttttttaatcaaaaacagataattattagtgatattcaaagccaaaaatcatggatttacccattcttggttctgttgactctgtttcaaaaggcataactacttttgtcagtgaagctgacaggcataagtagaggactcacatggagaagatctgttcagagaaaatcagttttcaagtaagaattgcccactataattgagatctgtgggctttcaaacatctcaggccagctcaccagttaaatccaactagaagtgctctcattgttttatgttttagtttcatttatttgaggaatagaaaggccaggatgtgggtgtcatcttcctatccagcttgtcaaacatgtcactgtggggagaattactgagccatttgacttctgcaaccagaaaacatgaaagctgaaataacactctggctgctagaacacgtgctgaataggcactggtgtggatggaaagctctcctgtatcccgagggccttccgtgtcaaatataaaatgtaagtcgaaggcaatggaacataaagttctatgctgtacctggtatttgacaaatgggtgaacataagcataagtcagattagttagtatcatggaatactgaacaggtgaaaaagtggcagctttcttttcaacatgatgtggaagaactgasctccagtaaccaatggctaggcatgaaggttcctttaagcaagattattttagctgcattataactgtgaaatcacaaatttaaaatcattcattttgcaaaagagtagtgtgcctcaaataaaagaagtatttatacattttcttaagttacaacctcttttaatgagattttattttaattggtggtttttgtctgtttaattttaacagtgtactcacaatttttcagaagtagaccttatgcattaactaagtaaatgcgatgcaggtagaaatggaaaatgggagatgtgaaggtctacattttctccgatctccttaagtcctgtcattcttaattacaaacgtttggtccccatttgcccttgtgatttgtactatcacacgtcatgacaaaaggaccagcattcgttctgaagaaagaaaaagttggctgggtgtggtggctcatgcctgtaatcccagcactttgggaggctgaggcaggcagatcacttgaggtcaggagttsgagaccagcctggccaacatggtgaaaacccatctctactaaaaatacaaaaaatagccaggtgtggtgcctcacacctgtaatcccaggtactcaggaggctgaggcaggagaatcacttgaacccaggaggtgaaggttgcagtgagccaagatcacgtcactgcactccaacctgggcaacagagcaactccatctcaaaaaaagaaaaatttgaaatagcagtagacttccaaatctgttagaaggccttgtttttagaatagggcaaatgtttgctttagtcagagcttgactggatgagatatgttaggagagtaacagtctcctcttgctacttgtttctgagcaggtaatctaaaaaggaaagccctatactactccagaggtattttcattgcaaaagaaatgtttccaaggtggcccttctttgcacctgttcaataaatgacctttaacattaacagcaacatgaatcaggctgaattaagaaaacatgggtaggccgggtgtggtggctcatgcctgtaattccagtactgtgggaggccgaggcaggtggatctcgaggtcatgagattgagaccatcctggctaacatggttaaaccccgtctgtactaaaaatacaaaaaattagccaggcgtggtggcgggcgcctgtagtcccagccactcgggaggctgaggtgggagaatggcatgaagctgggaggtggagcttgcagtgaaccgagatcgcgccactgcactccagcctgggcgacagagtgagactccatctcagaaaaaaaaaaaaaacaaaaaaacaaaaaaaaacagaaaaaatatgagtatataaagagaagttctgctttggaatggtttatataaatgtatataaatgaagggacacagtgcctgttgctgcaaccagaaagccctatgcaagaagggggagaggatgaggattagaaagtagaaagactgctgggaaaactacattgtgagtggaccttaaagtgtcaaaagtgccctgctgaatggaaacaaggaacrgatcatgcttgaagatggctagtagagaaaaggagtgagagttaagttcccatacatcaagtttactgctgttagtggacctggcagaatcaaggtactaccaagggagatagacagcctcgaaggaaattttaggaaaggcattggagtattcttttttttttttttttttttttttttctgaggtggagcctttcactgacacccaggctggagtgtggtgatgcagtctcagctcacctcattctctgcctcctgggttcaagcgattttcctgcctcagcctcctgagtagctgagattacaggtacccaccaccacgaccagctaattttttttttttttttgtatttttagtagaggcagggttkcactatgttggtcaagctggtctcaaactcctgaccttgtgatctgcctgcctcagcctctcaaagtgctgggattacgggtgtgagccaccgtgcctgggaggcacttgcagtattctaacaccatttacattagaggaaaaaagcccctcctagggacgtttgatcyttgtctcatcagtacaagattctattttatagaatattctctaccactttgcttagtatactatagttttaagtgatgggacttctggctttttcccctgggagtttattacaaattctgaaaatatttcagtgttacaattgtgttaaaaagtcacattttgagacctgattttttatttattgtagagcattgcaaccatttatagtgctatatragtgttaaataytaatgcatttttcctactctgccaattcccaggcatcctgcgagtgtataattctggaaaggcagtcaaaagatttctaggmgctgtcccacattagccttaaaaggtgaccttcttgcagaattctaaaaaaaaaaagtaagadtatttactcactttttgacccagtagcttcctggataagggattctytccagaaggaggcagattttttcagacgctaagacgtccaactgagagactgctgtaattctcaaccctctaattccaactaatgttaagcagtcttaccttagccagtggtagtgagagataatatatttttcatccaccagccttcttatcagctgakatatgaatgctgtccttcctctgttacacatctgaaaaaataacaattttaaagccaccaacgttttagaacttggaagtaagtggctagattcctttgctccccaggtggaagtgagtatggcatgactctatagaataaagatgctgtccaaagttggcaggtgagctagcgatcaacgtctgcctttcccactacttctgttgatggcttaattggtcacaatacagaaaagtcacagggcatggaaagaaatggcagattgatagcttcctatattcttctgtaatatagtgagagagaggaagatgagtctggtgaaatggcctttactataacagggtcagtatatttctgtttttatcaatttttgttaaagttggccctgagggaattcaccttggataaattcagaaaagaaaagaaaaatcttcctaggacataagtgaacaagtgattttgtaatataataaaaattattatcttatttaaaatagggttaagaaagtagacagaacttgaaaaagacagggttgttattttaagaaggagccccagagtgatagtggaacagcttattaccaggttttctgcaggtaataattataaattctgaggaagaagaaaaaaatctttgagggcactggagagggatcagcmacagacagaaactgaatgggttttaatccatgaaagaggagaacctcagtaggcgggaactatgtttatacagtttctcccctgagggcastgcccggtccgtaaggcattgggtggctatgcgccaagaagagagctgctgcacacaggtgtccatgggtagaacgtggggcttccagagtagctagagattgtggagaagtcccaagaatgaagaagccatggaagttagagcctcaaaatctgagtsaaatacttgctgattcctgaattctaaggagcaggtagaaactactgtcaagactgaaagagctgagagaggatttcagtttctgatcactgcaggggaaacagactttggagtttgaattctgccatcttagaggagcttagtaagtagctgagccttccatgaaaacacactttacaaataaagactatgtaccagaataaaggaattttccagaagcctaagtgaaaatccaaagagtctcatccaaagaaaatgtaaagctaagcctctgcatgttccaggttatcagccagtaattttttaaaagcctattaggagtgaaaaaattattcagaagaagaaaagatccagttccstgcaacatcatccgtaaggttcgatgaacaatcaaaaattactagtcatacagagaaagtggaaaatgttacccattgtcaaggaaaaaagtagccaagagaaaccaacctgaagatagcccagttgttagagctaacagcaaagacttaaagcaactattgcaaatatgtttaagggcttaaagaaaaagatgagagaatagatgggggtcacagaagagaagtggcaactctcatgaaaaaagcaaaataaaaattccagaagtgaaaacatacgatctaaaatgaaaatatttattgaatggacagagtggagactgtgtaaggaaaggtcattaaacttgtagacgaatagaaattatccaatctgaggaaaaagaaagaataagtctcaaaaaataagcagagctttagtacctgtgagaaaaatatcaagcaatttacaatctgtgtacatagagtaccagtgaggaaagagagagatggggtataaaaaagttacacactcacagmcacacacacacacacacacacacacacacacacacacggttgtatatatattcttaagaatcaacttcatattaggtaacagtcttgtctaaaataaattatggaaataatgaatattttagcagtttgactatggtatggctaagtatggtttcctttatatctagcctactttgggtttgttgagctgttgagcttcttaaatatgtaagttttttaaaccaaatttggggatttttatcatttttttacacgtgtgtttgtatatatatttgctgtacatatgtatgtgtatatataggttatacatatatgaatatacatgctgtatgtacatatatatcatgtatatgttaaaagtttccaaatttgttttcaaaaaacttaactcatttaagatagatatacaggaacccacatttagccatatcgtaaactgctaaaacatagtattcattgttccacaattcatttctgacatgactatcacctaatatgaggttgattcttaacttttaattgttacatcatgatcaccactagaacacaagcatgtggaaggagcttactagatctatgaagagatagacaaggattgggtcctgtatcttacacttaatgactgaacccttggggaaaggggtactctgtgtcacatattcatcatctataagattgccaataaccatagggctgttgtgaaagcttaaatgagtccaggytcggtggctgatacctgtaatcccagcactttgggagaccaaggcaggaggatcatgaggtcaggagatggagaccatcctggccaacatggtgaaaccccgtctctactaaaaatacaaaaattggctgggtgtggtggtgggcgcctgtaatcccagctactcgggaagctgaggcaggagaatcgcttgaacccgggaagttagaggctgcagtgagccaagatcgtgccactgcactccaacctggtgacagggtgagactatctcaaaaaaaaaaaaaaaaagcttaagtgaaataatagtacatgaatagacttcacgtgttgtcttgaacatagctgacactctgtagacattcatttcctttcctatttccattcttttcttcaaggcatttagagtgcytttaagcrtaattctgggttttctatgtagcataagacataaggatatattttataagagaaaaaatacacttcgtaatttcaaatcaacttcaacttggtttataacgtatttcatgtaatgtttccactcaaaagtcattggaggatatgcatggcaatcacagaactatgactacatgatttgctcaccctrtwttatttattttttatttatttatrtattcattttgagatggagtttcgctcttgttgccctggctggagtgcagtgatgtgatcttggctcactgcaacttccacctcccaggttcaagcgattctccttcctcagcctcctgagtagctgggattacaggtgtgcaccaccatgcccagctgattttgtaatttcagtagagacggggtttcaccgtgttggtcaggctgatgtggaacttctgacctcaggtgatccggccacctcagcctcccaaagtgctgggattacaggcatgagccacggcacccggcctgcttgccctatatttttcaacaacttaatgagaaggtggttcatgtttactaatgttttcatcatattcctgtgtccatgaggtttcaggattgaaatcagctgtgaaataagtataaaagtgtgtgtctataaagataaaatttaatttcatgctctttactaccacaygaatggtggtgataatagtaacttttacaattaagaatggtaggccaggtgcagtggctcatgcctgtaatcccagccctttgggagacccaggtgggcggatcacgaggtcaggagataaagaccatcctggctaacacggtgaaaccccatctctactaaaaatgcaaaaaattagctgggcgtggtggagggcacctgtagtcccagctactcaggaggctgaggcaggagaatggtgtgaacccgggaggtggagcttgcagtgagccgagatcgcaccactgcactctagcctggatgacagagcaaaactctgtctcaaaaaaaaaaaaaaaaatggaaatcactatttaatttctgagaaattaagtttagctctgtctaaagtcttgcaaaggaatcagaaatgctttagacatctgttgggcaatttccttgtgagtaaataagcttgtgtccgtgggaaatatgtaaaaaatataaactaatcactcttacccataagatgccatgctatcttcctaaaatccgactttctgattattgagataatacttcagtaggacgtccttgtctttatggttcccttttataattgactaaaatatgtcagccttttaaaatatgtggttcaagtcctgtgatacataacgtgtattgttaacttccattaacccaggaattggtaaaagccattagttcctgcatttacaattttttaataactggcttttctttaaaatatttcaccagctttcttattaattatcaccctacttctgaataccaagttagatatgacctttacaagttgccattaaggccctagacaacttaaaggtaacaagaattatgctgtttggtcctcctgctagaaaatttcccacaattgctacggtttaggtgatttaggctccagttttgctggtgctgctcttccgtgttaagttcttcaatttagtgttttgtagtaaaatcagacacagagatggcagcgtatgtttgaacttaaatctttaccagggaacactattccttagtgttcctggctactattcctggctacaaaataggggcaaaatctggtttcagagaccatgggcagtgttgcttacgggacctctaatagtgaagaaaagacaaatagctccttgggaaataggaagcacttcttacttagatagctgactcttcaattattgtatcacagaataaaagcaaggctgatagggtcctcattgtcctgtggaaagagaagaatgatttcctctgattttagaattctacacattaggttgtctactacctatgaggtaaagtatataagaaaataatactagagtgtaactgtaaataatacaagcaactatatatatatcagaatattatcagttttaaatttacccattaatatgttgcttccctagtgttaatttctaagaatagaaatatgtatatgtatatttatatatagaaatatgtatatgtatatttatatatagaaatatgtatatatatttatatatagaaatatgtatatatagagaaatatgtatatttatatatagaaatatgtgtatatatagagatgtatatatatttatagaaatatatatatatataacctcctctgagataatgaggaaataaactgtatattgatgccaaaataaatatttaaaaatcactcatttgcatgtctttttttttaagcacctttggtatatcattcatttgatcaacagttattaaatctctgtgccaggaagctaggcacttgtgatataaggtgaatatagtaagatctctggtatcaaaaagctctcaataggctgccttcaggactaatcaggtgttctttatttggttattttcctattcttagaaattaacactaggggagcaacatattaatgggtgaattttaaactgctaatattctgataatgttggaatgcagttttagtaaactgcagccagcaagccaaagctttgttatttctagtatacttaatcatcctggctgtatcttttacctgtaatagtgattcctttaaggaactgagggcaaagtcaaatccgtaagaaaaacaaggcaacagagtttgtcttaacggttgaatgccttgaaaagatattgttcttaaatgttgagttcgaatagatttctggaaatggtaatagtttggtgaaagacatgtgccccctactcccccttaaaatctaaaccagcttgtcatccttgaaactgggcacagttctctgtttacatttctgcatttcacggactaacatactgtgaaatctcaagctaagctgtcttggctaatgaatatacagtatgttgaaaaagtatgatccttaccatggaaggcagaagtacaattttgttagcaatttctgtatgtcaatatttacttagctatatgtatatacacacacatacaaattaatattatccttacaagtcagcacagtgaaaatcataggcatcaagtcttggttgagtctaaagattatattttctttgactaaatttcagtaatggcctatcttgtggttaaaggatctaattcaaccttttctacacaatctaatcgaagactacgttccaattttttaaattatacctgagaactcctaggtacctaaatccttaacagaaataattactgtgcctcggctaatgtatggatgcctgattcttggtgacctggaacttggaactccacaaaaacaatgaaagtcaatatgtttgaatgggtgttggggtcagaaactcaggaacccgcaatggatgttttgtgcttgcactatttcgtgggcttctcttaggagatccatgaagacttcaaaccctaatagacaccaggagcatcgagtagttgggaggacattcacaggaaagagggacaggaagaacaaacaacaaaacagtctgttatatgctccttggcaatgtgatgaggagccttgtcctgctttcttcttttggatattggttattttcctgagcacggccattttttagtatgcctcaggctattgttggagacgagaaaaaaaatcctcaaagatgaaaaatgcagttattcttttgagtcctctgagattataagtacccaagggaagtgattacatcatctgcctctgtgctctattttgaaagaatgttggttgtatgagaaagataatctgcatctttataattgaagttctttacctagagttaaataaatgaactttagaaagttgtcccagcattttgtttgtagttggtgtttattagaagtggtgtatgtcgcatccatagctctcatcagacactcaaaaaagtttttaacctcaaaaaagagccaggtgcaacaagctcagcactcacaattgcactagaattcagatttaattactctcccaaagaaagcatttggacagactcctggtggcagacaattaccacaaatgcattcttgcaaacagattgaaactcctttagctttcagtattcagtgttttcagcaacatttccttcctgttgtatttatttatttatctggagggaggggtaagtgttaagcttcttgcatactgacaacctaaacacattttctataacactacactcctggaaaatagactttctgagtcattcctatctaaattgtgatctttttattggttcagatcccttgaaacttaaggaattgcttgcattgtgtcacccagttgtttttttttttcctcataaacaaatgaaaccttcagttcaaagttcaaggaatcaagcttaaacgaaataaattaaagccccctggggaatgagtgttgaaggagaagaatgaagaattgatgacctgttaacagttataattctccactttgaattattgacagcatgtgacattataaccttacaaattgcaatctataaagcttagaaaatatgacctttgcattacagttggtcttataaagctttcagcatattacaaacagctaccaccagcatattttcttgtaggctgcggaaaagaggaaatatgtataacaggagcactggatgctatttagacagagctcagcaaggccacttacaggcagagtgatagatggtgagtggcagaaaratttctaagccagggtgaaggtatgagaagtttgcttgtcattgatttgcagtcacctaatagaaataactaattagtgaaagttggtcgacttagcactttttctcctccacttttgaaacaggcagggactgagaatttataaacaggacagagttgctccagggtatttttgccagtatttctacctactattgttctccaagatagaaggcaactaaaagtcatcaaacttggtttaacatgtggcctggtttttactgttaccagtggtagaataaatgtttataattcctttatgtagctttggcaaaaaaagtagatcacaggcatacaattattacatgtttgttccaatgtgctacgtttgggcataacccatggaaatggttagacacattggcccaacatcatctctgatttgctttttttgtttgttttccttcttggttcagggcatgcatttgttagattttacaaataatcctcaatgtatttgtggtggaatatgctcagggttttggaaattgctctagagtctttggttctgccaccaactgccaatgtggacttgggcaatttatttaactttttaaaaagctttcattcaccataatgatgataatcacaatatctaacatttgaaggactaccatgtggctgggcttcacatacagtatttcacttgattatcatcgtaatccaatgaggtaggagctgacaatgttctataccttcatgatgaggaaactggagcatctagaggttaagttacctcccacagtggcagagtgagggcaccagcctggcagtctgactccatagcgtattcattgaaatcagcctaaacaaacttaaatgcctgagagggccacacgagtgatggcagagggctcctgtgactgaatggagagcccatatccttcaagcagcaggtagctgccacactcttccagctaattttgttatgtgggaagataagcgcagtacctccagatcttccagttttttttttgttttttgtttgtttgtttgtttttgtttttttagagaagcaaaaactccagtctgatatttttcaatgctgagaactgagccactttattttagaaacatactgagggctaataatttgtaggacaaaccaaacatgatttgaggccactgttgtttgctggtcagttcatctgatacaatataaaatgaactaaataatctctaaatccccctgtagcaccagaattctctagaattctgtgattatcttgactctgggttccacatgcatatcttttttaattactgtcttacaaacttcctaaggaagtttttctggagtgggtaactaagaagaccttgcctgtcaaaggtgcctttatgctcccagttctctttgtttaaaaccataaaaagatattgttcattctcttaccttttcctataaagtatgcaattattcaccctcttttttcctggaacaacttttcttttttggctccatttcaactcccaccaccctgggccaagcctccaaaattttataccagtacatttaaatagactcttaaatgtcttctctaccacttatgtctctagaccaggagttggcaaactacagcctgagagacaaatctggctcattgcctgttytgtaaataaagttttcttggaacatagccatgccgatttgttgacatattgtctatagctgcttttgtgatacaactgcagcattgagaagtaatgacaaacatcttgtggtccacaaaccaaaaatacttactatttagtctttttttttttttttgagatggagtctcattctgtcgcccaggctggagtgcagtggcactatctcagctcactgctacctccgcctcctgggttcaagggattctcctgcctcagcctcctgagtagctgggattacgggtgcacgccaccacacctggctaatttttgtatttttagcagagacggggtttcaccatgttggtcaggctggtctcaaactcctgacctcatgatctgcctgcctcggcctcccaaagtgctgggattacaggcgtgagctaccatgcccggccactatttagtcttttaagaaaaactttaatacttgctaatccgctccttacatggctgtcagattaaactttgtatttctagtactgtatgtgtcacctctgtgctcaaaaatctataatcgttttccatactttattatacacataaagactcctagggatttcttagtctggaattagagaccactcacaaaggccatcctctatcttttcagtcatattttctaacatcattctgatctcccaccaggctggttaaaatgattaaccacaggccaggcatggtggcttacacctgtaattgcagcactgtgggaggccgaggtgggtggataacctgaggtcaggggttcgcgactagcctggccaacatggtgaaaccctgtctctactaaaaatacaaaacaacagccggatgtgatggtgggtgcctataatcccagctactcaggaggctgaggcaggagaatcgcttgaacccaggaggcagaggttgtagtgagccgagatcgtgccttgcactccagcttgggcaacaagagcaaaactccatctcaaaaaaaatgatgaaccacaaacatatcatgcgcactcgaactctgacattttgggaatgtgctaccattttgcaaagcaatttgcagttcaacattctttatgatatttagtagacatttatgatttggactaaacaaattatttatcgaagccgtactatgtgtcaaggttgctggtattccagcacaaataatctcatttgtcccatattggctcatatttaaaagatgcatatttgtatattgtgtaattgtcagtaatacactgaaaatatactggtgctttctttatgtcaggtgctgtcctagcacaagaaattataaaaacaaaacaaaattcagcgggaacaaattaaaaaaaaaaaaaaaaatccaatgaatgacacaggttaaacaaataatagaagtaatttgcttcagtcataatagaagcatgatactaaagaagcacagatgattgtctgttcactgatgaacagacaacctaagaatgggagaaaatttttgcaatcgacccatctgacaaaattctaatatccagaatctacaaggaacttaaacaaatttacaagaataaaacaaccccatcaaaaagtgggcaaaggatatgagcagacacttctcaaaagaagacatttatgcggccaaatatgaaaaaaagctcatcatcatggatcattagagaaatgcaaatccaaaccacaatgggataccatctcatgccagttagaatggcgattattaaaaagtcaggagacaatagatgctagcaaggctgtggagaaataggaacgcttttatactgttggtgggagtgtaaattcgctcacccattgtggaaaacagtgtggtgattcctcagggatctagaaaccagaaataatttggcccagcaatcttgttactgggtatatacgcaaaggaatataaatcattctactataaagacacatgcacatgtatgtttattgcagcactgtttgcaatagcaaagacatggaaccaacccaaatgcccatcaatgattgactggataaacaaaatgtggtacatatacaccatggaatactatgcagccataaaagagaatgagatcatgtcctttacagggacacagataaagctggaagccatcatcctcagcaaacacaggaacagaaaaccaaacaccacatgttctcactcataagtgggagttaaacaaagagaacacatagacacagggaggggaacaacacacaccggagccaattgggggtgagaggcaaggggaaggagagcattaggacaaatacctaatgcatgtgcggcttaaaacctagatgatggcagccgggcgcggtggctcacgcctgtaatcccagcactttgggaggccaaggtgggcggatcatgaggtcaggagatcgagaccatcctagctaacacggtgaaaccccatctctactaaaaatacaaaaaattagccgggtgtggtggcgggcttctgtagtcccagctactcgggaggctaaggcaggagaatggcgtgaacccgggaggcggagcttgcagtgagccgaaatcgcgcagctgcactccagtctgggtgacagagcgagactccgtctcaaaaaaaaaaaaaaaacaaaaaaacctagatgatgagttgataggtgcagcaaaccaccatggcacatatatacctatgtagcaaacctgcatgttctgcacatgtattccagaactgaaaattaaaaaaaaaaaaaacagatgaagcaacagatttccctgtcaaaagaggttgggaaggcttcatggaggagatggcttttttttttttttttttgagacagagtccaggctggagtactatcgcatgatctcggctcactgaaacctctgcctcccgggttcaagcaattcttctgcctcagcctcctgagtagctgggattacaggtgcgccaccactgcccgccaatttttgtattgttagtagagacggagtttcaccacgttggccaggctggtcttgaactcctgacctcaggtgatccacccacctcggcctcccaaagtgctgggattacaggtgtgagccaccatgcccagccaggagatggccttttaactgtgtattggaaattgagaaagctctgggggcctgaacattcattgtggttcaaagaagagcaagaaggtcagtattacaggattgcagaattgcaagaagtggcagcagacacaaccagaaaggaaatatgtgctatatagaaaggactttggatgtcttattgaagaatcaggagttaatcctgtaggcaagggaaccttcagtgtttctgaagaggagagtgacaatcagattctacctagactgtaaattactgcatggcagaaattacattttgtgcatttctttttctccctcagggtctaccagctcttccttgaacatagtaaaccttcaatagttagttgttccttgattcatttcttcccaagggtgaagcatttctggctggcttgtagccaacagcattttgagttttctctgagcccgataaaatgctgacaccaacacagttttttaaaaagcagcaaatatggttaaggtgatgagaagcgtcagattcatgacatttctcagtgcctgtcaccttcattctagtagccagaagtgttgttttcagctttcagcaaaatgttggcaaagttgaaactacctaaaagaaactggaagtttgttctcatttaaaccatttaaggtaaggttgggaaattttggatctctaaactctgagggaagcatgctgttactattattatttaaatcagatggaaattagataattgagaaactccctgaagtagttgacagaatgggagggttttgcttttcctccagatgtgtaaaacccaagcctttggccttctgtgttgtaagcggtaggaattatcagcctgcactaactgtcaggagttgccaggagtgatggagggctgcaggcattgctgatgtgaatgttagacctcaggttttgtttgtggcattgacaatttaaaaagtagagacattttgagatttgtcatgtgaggtagtttagctcccaaggaactgttttgtttccgcccttaacaaaaccttggattgcattttcattctcaaaactgcgtaaagctgggataatagagcagctctacctttgacttgattttaagaagagtaccagggtccttctttcttttgacctgagccagtttctcctactgtagttctgctgcagacagggttggtaattagcagggctgataagtaatagcttcaaacccttgctttggagactgaatctggttttggtttctggtgtctagggccaatttatccaggggccacagcctctagagcgtgtgaaggtcaccctgcatccttgtggatctcttgttaagcttctcctgccacccttctctcagtgccatcctccccatcactgagttgtaccacatcaccatattcactctccacccaaacatcactgggcttcacatttgcattcctctggtctcacaaagccttctgtattgaacatgcttcacattttccagccttttggctaaataggcctggatacagtgaaaccatctttataaaacctttccagattcccgtctccctactaggcattttgcatacacttctatcataatacttatcacattatataaagttgtctgaagaccccaaggatcaatttaagagcatagaactcattgttttgttgcaatggaatatccccatcacttaggccccatgtttggccacagtaattgcaatcataaaataaataacagtagctatgatgtcatagcaagttaccctgtgctagtcataacatcaaatgtagtagcacaagtaggtgctcatttaacccttgtaaatggaagaaaaagcctcatgactgactctcactccaccctatcctactccagatccaaacaaattcctgttttgcaaggacatcacctttatctttattgtgcctgcctccctgccaggcactgccattcaataattctgccaagtggtatctttcctcctgacagaatgctaaacagtgatttattgcttgaatacacattgctttcatggaagtgatttgtttaaaacaacgtaaaacactaaataaattattcattccatgctaattcttcacttttatgtgctgtagtaagtgtcaaaatgagcagcctgtggggcattttatttttgccacattaatcttggacgatttaagggggaaaaaaatggaaggaaacctaaaggagaggttcaattttcaagaaaatagattttttttttctagagccgccagcagcagcagttctagcagacatgcttgtctctcctgcccccaggggctctgtgagtcacctacaagacccccttgcagtcttattccatgttgtgaacagtggctctttttcttggcagagagtgattcacaatggccccaagccttgtcacaaggccaggaaacaagtggattctttcctgggagatttgcattttctggagcagacagggtgttgggtttctaaatttcactggtgtcttgattttggattaagggattataaagtgagagaagcagcagggacatacttacccattcctgcaacagagttcccacttggaatagaggtatcatttgtttctagccttccttaaccttctttactggaaatctcctttctttgaactggggacattggagtgattttcagtttaggaaagtcttccctgagcagaggagaagacagatggtcttgttgtaaattcttgagaagcttcactcctcttttctgaacatgaccccttcatgttttatacctgctgagggtcgagcaagggtttgtgctctctgcccgtggaatccacggagatctcagtgaatgtgatacaaagatgacccctcagcctcaatggtagaagagctagcacaagccatccttcaaggccgtacttccagatcagaagccaagaagatccaggattaaatacatactacccaagccccagccagttttcatcttctgtaagagagcaacaaaaaacatctccccattgctatagaatggattaaatgacatactgtgtgtgaagcacctagctggttgtaagagattgaaaaggtccctacctgcatctagctagagattgtccccttctctttattcccatagtaattcatctctaaagcattcaactcaaacctttcagcttggtgagtctctacacagctatgatgggtaatgagagcaggtgtctgtttactcttgtctacggcactgagctttggactcagactgttcagattcaaatctcagcccccccacctagctgatcttgggcaagtcactcaaactttacggccaaaaaaaaaaagaagaaaggtaagacatattgctgtaaaggatagttgagaaggatagattatgttattcagaatgcttaggagaatgacacaaatcaaaaataaagtcaattagtgataatccagttagaaggggaattctaattttttttttttttttttttgagacagagtctcgctctgtcacccaggctggagtgtagtggtgcgatcrcagctcactgcaacctctgcctcctaggttcaagtgattctcctcctcagcctcctgagtagctgggattgcaggtgcatgccaccatgcccggctaatttttgtatttttagtagagacagggtttcaccatattggtcagactggtctcaaactcctgacctctggtgatccacctgcctcagcttctcaaagtgctgggattacaggcgtgattgattacaggcatgaaccaccgtgmctggcctggggatttctaattttatcagtcccctttaataataaaaacaggttaaatgaattaactaaagtcatacaaagtgttaaaattggctctgtaaccagaatccagccctttcaacctcttgcattagccctcaccctgccaccatacatactctrtttggccttgctcytattacacagaagaagagattttgagagtctcagaggaaatagctgaaaaatctggaattcagactttgattcaaaatctgcaccctgttatatttgcactgacccagggctgtcttttcctagatagaagaaactgacagaatggaaagtggatctctgcagtgtcctggccaaccttcaaaaatcccacagagctgtgcatgaaagctaacactcttgaacgaaagaacaggaaaatcaataaacctttggattagatcatagacatgttttacaactactcagccctcacaaaagagttacacagcattgaattatgtgtaacatttaatcctttaatcagcctaagctttcaagaggaaattcaaagtatttggaatgtcattcctaaaattggaatttgataaaatggcaatgctggtagattgcaatttctcagggtattctgatgtgactcaactcaagaggctagttacaataattgctcatgtaactgaaacatgttgttaatgcctggaaaagtccatcatcaatataaccacagtcattcagtcagacgatccacaaatactggaattccttaggtcagcaagaggatattacatattagttcacatggaattctgagaggatatggggcactggcgtgatgctgatttgaacatgagcacaggagccaggccattcttacttagaggtcatattttgaaatttaaactttaagatcagtgagaggctacagacatgttttaaggagtgtggaaagatgtttagactgctattttttaaaatatcgtggtggcaacagtgtaaagggtgacctgaggaaagcaagataagatgctgtaaaagttgttggaagcaggccggtcatggtggctcacacctgtaatcccagcactttggaaggctgaggcaggtagaccacctgaggtcaggagtttgagatgaccctggccaacatggtgaaaccccatctctactgaaaaaaaaaaaaaaaaaaaaaaattagctgtgcatggtggcgggtgcctgtaatcccagctacttgggaggctgagtcaggagaattgcttgaacctgggagttggaggctgcagtgagctggggtcacgccattgcactccagcctgggcaacaagagcaaaactcagtctcaaaaaataaaaaaaataaaaagagttgtcagaagcattgcggtcttttggttgatgtagcccagatcaggttgaggtgaggttagatgggagaggtatataaaccttagagactggttgggtgtggtggctcatgcctgtaatcccagcaccttgggaggccaaggcgggcaaatcacctgagatcaggagtccaagaccagcctggccaacatggcgaaaccctgtcatctctactaaaatttaaaaaattagccgggcgtggtggtgcgtatctgtaatcccagctactctggaggctgaggcaggagaatcgcttgaacccagaaggtggtggttgcagtgggcagggatcacgccactgcactccagcctgggagacaagagtgaaactccatctcaaaaaaaaaaaaaaaaaaagagatgttggttacatttggagggaagaaggggataatagagtcaaggaagactactcagaattcttagtttgaacaatgacaatagtacctactaagactggcaacactgaagatagagtaggccaaggtattccgcattgaatggtattgtaatcggaagagacccttgcaaacgtgtagtgcagccatagaggaaactgaagcccaaagaagtaaattgactttctcccatccaagtactaaccaggcccgaccgtgcttagcttccgagatcagacgagaacggacgcgttcagggtggtatggccatagagtatattgactttcttagtgtcacagagtattggcagcggagcctgggctcaggtccatatctcctgattcatagcctaggactgctaaaatggatagtttcattgaaaaggcttaatgagcatctaatggggagtcctatctgaaggtgaatttacagtgaagctaatgaagcttaagattcagagccttcatgggcactggctcctttgaatgctgggagtttgaggaggtgtcgattgttccaggtggagagaggaagccagggtggaatcggaaagcatttctgtatactcatttccgctaaaccacctgaacatatctcagaacaaacgtatgtctatctctaaggcactattaatttcttgtgatctaatttcttgggctagtaaatatgaagttttagatctcgttttctttatgactttgtattatttttcttaaagagaagctcaacattgaataactttcatccccacaaaacctgggtctagtcctggtcctagatctacttctttcaactcttccatctcagaactggcccaatccagtccttccttctgtacctaggcctgcttcagggacaaaatcagcaaatgatatattaagattattttttgctctcagatattccttattcaggaactggttcttctaaaagtataacctacactatttgtgaaatgaggtggttggagttagatggagttagataatctttccagtcccttccaattttaagtttcttttaaaagagtaacaaaatgctaaatttttatacccacccactagccatgccattgtaaagaattagaactagaatcacatggaaacattttggttctgtgactaaaagacaaggaatatataaaaatcacttaacctccgtgggatttttccctaacagaaagtcttgttctttattaatacattttacttggaattttaagatgttacctaaattttagtttcaagccagattttttttaagttttgaatttccttttaggcaaattgtgtctcaccacaccttagcactcagacaaggcaaacaaaagatctgctaatagagaagtcagttgttattgttgattgactataatttcttaagagagtaaaatgtttttcttcctcccttgcctacattaagactttcccatagtaaaagataagatctgatacttgcttattgactctctctggtgttttattcttgttgcttttgttagttgtactttatggtaaatgagaggagataatgaaaaaaaaagttaaaagcttgcattcttttcagtttttattccagtttcttattgaggtttatgttctgacacttggaacacagtaatatgcatagcattatttattggcttcctgcaagtgtcttgtgttaaccttgaaaaataatactttttagaattgagttsacttcttcagacctgtgaataaacagcataaaaaaacaagatggcgaagtggaaatggaaagacttgcttcatttcttcctgttgaagctaaatatataaaggcataggaacagaagggcccctcatcgttaacacacagtttgctgcttaatagtgtgttcactttgtgtgtgggttctcacatagaaagaatattaatatttagatagtgtctataattcagacagatactgatttgagagcatggaaatctgtctttctcagatcatcacatcagggaagttggaagagaatttctccagctcttacttcccttccatctcgctcctacaaaacctgggttgtatccctcttaagtattggtacatcttttctctttttttttttgagacgaagtctcgctgtcgcccaggctggagtgcagtggcgcgatctcggctcactgcaagctccgcctcctgggttcacgccattctcctgcctcagcctcccgagtaactgggactacaggcacccgccaccacgcccagctaactttttttttttttttctttagtagagacggggtttcaccgtgttagccaggatggtctcgatttcctgacctcatgatccgcctgcctcggcctcccaaagcgctgggattacaggcgtgagccaccacacccggcattttttgtctttttttttttaatagactttcagagagaagataatacaataaatatttccttattgttttacagctctaaactgagaattctgtgcattttctgtgtttgagcagctgtgtatcaggtgagctaatttgagtaggtactagcttaaagaaggttgaatataatctctctccccttctaagcactggaggggaatgagaacaggatttatcgcttgtttctttaactataaaacaatgggcttgcgcaagatatgctacgtggtttcctccaactgcagctctggagacaaccatgctaagttgccagcttctccccctrttccctggccccagttaatttcaggtcttgaagccttggctttgggtctgtaggcctgtttcatttttctattttactatccatatgtagaaagatcttgtcttgaatatgcattttcctcacattttgtataattatctcatcttgctactcttttgggattacattggtgcagctatttggtttttttctagaaaaaatatttaatttagcatctcccttattttcctggtttaatgtaaaaaaaaaagtcaaaatcatttaaggcagaataatttaccaagaggaagaagaatatgcagtggtcagctatgtattatatatggatatatattttgagaattatgctctttttattattcaaaataaagaacgggagaaggaggtggcaggggaggaaacaagacaagtgtcctcagactctctggtttggcaatgtgaaattaatagattttggagggagtgcattttttttttttttgagtggatagcatctctgaacttgggaaatagaagaacctgtcaaaggttaaatgtgtcccctattttcaagatttgcatcaaaaagcaacttaagtctagtggatttgacaagtttagttttatttactgaatataaagacctgactctatgactagagtctgatagtttggtttaaccttattataagcttattttttatttttatttttattttttgggtttgttactagcaggaaggaacttagctttcagcaaagggagaaaacccatgagttcccttgagtgagagctgcagtatttctcacatggcagctcctggcacaggaagagtcctgcaactcaggtgcagattttatgtcttagctacaaatgacctctggctctgtggagaaacagagtcaggagggtatagcaaatttacaaaaagttttttgctctycacgagggctctccatgtgctacaatttgctgtgtctaatgttgattcggttatctgtatgtccctagctctgtctgcaacactgttggttggcttgccttttaatttcctcaaggggtatgcagtggctgtttcactcaatttcagtgccatgcagaggattttacataaataaacatgacattaaattatgtgtgggctgctacaaaatataaagggcatttagggattaaatacttttcagaggcaaaaatccactaactgctttctggatgctttcttgtaccccaaattagtccactgttyctaccattttttcatttcgtcaagtatgtttgtctagaccagattacttttgtctgttgacttcacwtgttagtgtgtgagtgtgtgtggtgtgtgcgtgcatatgtatttctatcaccctttcaactctcctctggagcaccttgatccagcttagccattattgatttctttcccctttgataactcaaaaagagtgtaattatgcattcacttaaatctaaatgatgatactgtaaaaccatctgtggaaatctgcrgttagctgcatgtgcattcgctgtcaggaacncctgatccggcagcagccaagttctccagtaatttaaatggaaggatcagttcctgaagaggattttaccagggttcaaaactttaaaaaacgtaataattaaattttaaaatgaccacaaaatgccattgacttgaggtcagtaaagagtaaaaactcaagcatgtctatgatcaggaaaatatattccagcaatgtctagaagaaggcagagtgagagaagggtttgtgactagtaccatgtctgacaggtaacagggctccaataaatgtttttgaaatgaacagaaagcgagggcatttcagtggttctgccttgcctctagtaatcatcatrcccatattagacaggataccagagaggaaagtttagcacagggattaggattccatatgtgatgtgacttagacttcaaattactggcttagtaatttaacttacttagcttctctgtggctcaatttcatcatcataaaacaatcagataattgaaatttcttaattatgatatctggcacacagagtagacatcaaatagacgctacaagttagttcaggactcaggcgacttactgaaaatcacacagtggtacaccctagtatttgctactcagcagccattccccactctttctttgctggcagaacccacctctgatcatagaaaatgtcaagtggaaataccagttccttgttttctccatctttattgaactgcatgtgggcatgtggcaggatcctggttggtgagggtaaagggagttttgccggcagggcttttgggaaagagtttcttccctaggtagaaaaaaatacaacaaaaaccacaaaaacccatgtatacaccagaggcctttctttactctgctgagtatagccacatcttcaggtgatgaaaagaagtgttatgaccactttgcaaacatgagggtaagtagcactgagtgctgacactgtcagaggggacacgtggacattgcttaggtccttgatgacattgttgggctaaattagtcctggaactgcgtaaactctggacttcctgctatatgacataatgaaccacttattgcttgagtcactattagcattctgtttcttgctgcaaacggcattctactagatctggtggctaaaccaggactcaaaatctggtcttggccaggcatggtggctcacacctgtaatctcagcactttgtggggctgaggcatgaggatcatttcaggccaggagttagagtccagcctaggcaacatagcaagaccctawatctaaaaaaaattaggcctggtgcagkggctcatgcctgtaatcccagcactttgggagggcaaggcaggcagataaggaggtcaggagatcgaaactatcctgactaacacagtgaaacaccgtctctactaaaaatataaaaaatttgccaggtgtggtggcacgcacctgtagtcccagctacttgggaggctgaagaaggagaatcgcttgaacccgggaggcagaggttgcagtgagccaagatcgcaccactgcactccagcctgggtgacaaggtgagactccatctcaaaaagttaaaataaaataaaatattagccaggcatagtggtgtgtgcctgtagtcccatccacccaggacactgaggcaggaggatcacttgagctcaggagttcaaggctgcagtgagctatgagtgcatcactgcactctagcctgggtgacagagtaaggccttgcctataaaaaaaataattaattaaaaatcaaaatctggtcgtcttctggttccaaagccttttctgttttgagcagagcacactaccagcctaatatttaaggtcctccacaatagtgccaaagcctatctctgtattctgatattgtgttgggtccctgctcatactctaacctttaggtaaaccagaagacttgaccttttcttaatgctctctgagctttctccctcagttcctttccttgcagtaccctttgtatacctctcgtcttcatcagaatcacactcatcttctgggatttgtcttaaatgcatccttttctaagaaatatctcttgattacatctctcttacttgctccttgaaagatagaaacacttccctcctgcttcacatcttttttcctcatatttcgtgagtacctgtgtatgggtctgcctctcctaagactgagctttcagagactcatatcaaatatcattccttgttttgtatcctcacagcatgtatttttaaattattgccttttaacaaagcttaataaatgtttattaaattaaatctgcagaattttggagctgaaagttcttctaaagaaagctcttgttttctgaaaattatggaagttcttattcttggatgtatggcccccccccaggattcaagagatgagtaatattattaaagttatatttattgttttatgcccataagttgtatcagattatattcttaaaggattcttgggtccccaaaagaatgagaacctctgtttaagttggaaagtcaaataaatacttagccaaagacacacaatctggaacatgcatattttgaagaaaactagtgctgtgagtttgctgcttttccctaaaattggagtgcmaagaaaacaatcaaaaacaaatttctggccgggtgcggtgcctcacacctgtaatcccagcactttgggaggccgaggtgggcggatcacaaggtcaggagatcgagmccatcctggctaacatggtgaaaccctgtctctactaaaaatacggaaagttagccgggcgtggtggtgggcgcctgtagtcccagctacttgggaggctgaggcaggagaatggcgtgaacccgggaggcggagcttgcagtgagccgagatcgtgccactgcactccagcctgggcaacagagcaagactgtctcaaaaaaaaaaaaaaaaaaaaaaaaattctggccattgaacactgctctcttattttatccaactctttgattctcatgaaagattattccaaatctcttcaggctccttattattctcttcccccatatttgctttcctcaggatctgtaaatacgtctaaacaattggtctccagcaagctgctgaaataagcagagaggtagctatcggagcttggacaatgaaaaaacactaaggcctgctgtaagatggtgggagcaggacaaaggtggccagcatcagcaccgcccaacatgctggcatcttcaatatggttgttcccttgctcacccaagccagactatggcccaccccaggcaagagcaattatgaccattagtatggctaagtgctgtggagtcttcccatgtgttacacgaagcaccagcccatgccatccctgaatcactagtggttgagagaaatacaaaagaaatagtgctgttttatagactaggacctagtcatcatctacattattcaggatttggaaatatagaccataaggaatggaagacattttgggattgtgtactctaatcctaagcccatacttttgtttcttttgagatttgatactgcttccacagttggacatagaggaaaacaagaatgcaaattattattaattgaagagtgaagagatatgtccccattttctttttcttttcttttctttctttttttttttttttttttttgagatggagttttgctcttgttgcccaggctggagtgcaattttgcgatttggctcaccrcaacctctacctcccaggttcaagcaattctgcctcagcctcccaagtagctgggatgaaggcatgcaccaccatgccaggctaattttctatttttaatggagatggggtttctccatgttggtcaggctggtcttgaactcccgacctcaggtgatcctcctgcctcggcctcccaaattgctgggattacaggcatgagccaccacgcccagccctgatatgtccccattttctaagacatccttggatgagcagtaggcaggctaagtatccttacaaatccactgacacccccccaacctcctgatgcaaagcaggtgaaccccacaattggggcttagcttgggagggttcttgacttcactcaggaaagaattcaagagtgagctgatggtagaagaaagcaggtttgttaagtggcaatgtatagcagagtggcaactccttccagagcagggctaacccagagcccagagtagcagtgtatgggctgtttgctagcaatatttatacccacttttaataacttgcaaattatggggtgggctattcacaaatctctagaaaaggagtggtaacttscaggtgttgctatggaacttctcaactgtcatggcactggtgggagtgtcttacgctaaggagagcagtgagggcaactagagattgcctttgctgtcatctgctagttctgcaggtttcttcatttcaccctgccaggaccaggaaataagttcctccagtctcctgcctcacttccatcgcactttctgtggggtgaattctttagtaaatgaagagaggaagacgctatgtttttgtttttaagaaaagaaatggaaaattcctgtgcttctgtttagaaaagcatagaaaaattttggttctctaccatctactacttagttaatacacaagttttcaaaagttgctgtatgtagaaccagattaccaggaaggtgttctcaggttccttaaatgtttggagtttcacttctaaattatattttatgttaataataaaaccatgctgtcatagtcaaaggtgttacatgactgataattggcataggagagactgcctgtcttatgctgctggcaggttagttcatttcaatgcatacctgtaaataaggctttttgccctactgttttgatacaaaagaatatttttcaykgacttttggtaatttacagtggaacagtcttattagtcatccatataccagcatctgtttgtgaatgcttttgttctgtaacccagtgcagaaagaggttggggctagaagggaggaatgtaattgacattctcctctcacagagtcctttgtgatggtttctcaactccctatccagaaggagtgagggctagagttgatggaattattcagtaggagctttgtaagggcctgagcaaagggtcactaatagtttgggagcccgggttatgaaaatgtggctcagtgctgtgggagaagaagcccttgcccactcccttggaccctctcccattcctgcacagaacctgacctggcactgtttctggcacccttctaccctccaaggaatgggtgatttgagaacagcagcttggtgagtgggcactggcatcctctctctaartatggactggctgggcgcagtggctcacgcctgtaatcccagcactttgggaggctgagtcaggtggatcacgaggtcaagagatcgagaccattctcctcaacatggtgaaatcccatctctactaaaagtacaaaaattagctgggtgtggtggcgcacctgtagtctcagctactcgggaggctgaggcaggagaattgcttgaacctgtgaggcggaggttgcagtgagccgagatcacgccactgcactccagcctggcgacagagcgagattccatctcaaaaaaaaaaaagaaaaagaaaaagagaaaacgtatggaccaagtgaagttcctcccaaaagttgtgtaagcgatagatgtggcaagaaggagtcacagtgaaagaagtacaaatgtcatgtgctgacagcaagtcctagactggcgagggggatayttgaagcatgtcactgtggaaatcccagaaataactggatgcagaggtcctggtatggcataggtggaggttatcaagtcttagataatttgggtcatagctatttaaagataatatcctaagatttagagaggaaccttaaaaagctagtaccatattgtgaccacttgttttgaatcagggatgttttaacactgtataatgaaaacaagatacagaaataaatggggtgctgatggatatgccactttgtgtgggggtatatatgttcatatgcattttgagatgtatatgtgttcatcaaaacagctttgctttttgattgaacttgaatactctacacttgaactcagtttttctatacatgaaaattgtgtgctgaatgaataaaaataaattatgtgtatattatttaagcacatacaacatttcacttaattgaaaagttccactgaaagctggacgcagtgtcctgcacctcactcccagctactaaggaggttaaagtgggaggatcccttgagcccagaagttgagaccagactgagcaatagagcgagactcccatctcaaaacaaaaacgaaagcaaacaaaacagcttcattttgccccattttgagtttgaaaaatacaacaaaaacaacagagaataaaaccagaatagggaggcaatttcattttttcacattttctcatttaaatgtagtgattttggctctggatcccttaacagaaacagatttgtgaaatagtattgctgtcacagaaaagcaaacaaacagcaaaacatatctaacataaggatgcatcgttgttcagtaataagatggtaaataatgcacagaggcagtgaagggaaaaaagaaaaagaaatctcaaataatcgattgaaaactaaaggttagcagttgtgccttctttcttgctcttgttctgaaaacagaaagattaaatagattgattcaagcagatatgctttcaaatgtcataaaggactctacttctggtgctgtgttgataaactgcctgagtgtatcactggcatttcagttttactagccctgcaagaagaggcagggagcggtttctacctccctgcccgcctgccctgggattgcttaaacaatttctgtgtgcttgtgcaagtggctccacaccatcacatgctgggttaaagggttccttctccggggcacctttgaattccctcatcacaagaatgggagacacagcctgtgaccagctgaacttcattatttagtttactgcggtcttgtatcaggagagcaactacctagaaatgctttatgcccacacccctattttcttggtgggggatttataggcttattcggcaaaattgtactgaggtggagtaggaacatcattctgtgtcttcaaacaaacagccaccctgctgccactgatcagcgttcctgggatggcggtgattgaaatttagcactgagagcgacttaattggcacatggatctgttaagcatatgcccccaccacaggcatgccatctgatgtgtccatggggtgccccgcacctcacacatgctcacgttttgctaaagaagcaagttttgaacaggacctggaaggaaggaagctgtgctgtagtttaggagaggggyggccttagatgacaggtactcagggatctctgcctgtttttaagttactgtaatttttttttccttgaactcagaacaaacctaaggtcagggagttccagtttgcttgctgtgaaattaaaaagttaagaatrtgttcactgatgcttgtgccttcagtaaatcaaacgctgtgctagtagagtggaacttggactcagcattcctcagcagcttacagccccggaatttaaggttagaatgttctatgcttactgtggctagaactgatcccttggccttcagagaagaattcaggaaatcaatgtcaacatttttctgctgagttggaaacagctgggctgggccaaatgttctaggttatgagtaccaggaggaaaatacgaacttcgacagaaaactgagcaaacccataatgtttttcccttatgtaagaagagcaagtaaaaggtggagaaatcagtggttaggaacacacactgctctgtggaatcttcgcaagtgtgcttgggctcatgtatttcaaataaccaggtggactctgttcattgctgcagacaccaaaagaagctgtcttccggagcagctgtracgggaagggttttggtgtgacygagaaggggtatatagctctttatcaacttcccttttctttcatgrgcgcttctgtcctaactggatcacggactcatagacggaatctgtttttctttgtgttctcttctggcgtcagacaaaatcctgggctcctaataaatgtttaataaatgttcgttgaattctgaaagaatgaaatagtttaggttcctctgggtaaagttggaaatagtgctgctttctatttcggaggaggatttgctgtggagcgaatatagcttaaatttagcattccacaattctacggcttctttcctgagacctgttcctaatttttgattttctctgtttcttatggagggttccataagaaatatattacacggtaattatctggaccccatgaaatagatttgctcgttaaaatgctgtcgtttagccctgccaatgtggcttctatttaatggctttcctagaaattggaagtcagaagaaagttaaaaccaagctcacatagagcaaagggaaggaattaacatttaagaatcctatgctaggccaggtgcggtggctcacacctgtaatcccagcactttgagaggctgaggcaggtggatcacctgaggtcaggagttcgagaccagcctacccaacatggcgaaaccccatctctaaaaatgcaaaaaattagccgggcgtggtggtgggcaactgtaatcccagctactcgggaggctgaggcaggagaattgcttgaacctgggaggcagaggttgcagtgagccgagatcgtgccactgcactccagtatgggcaacacgagcgagcgaaactctatctccaaaaaaaaaaacaaaaaaaaaaacaaaaaaaaaaccacatgctaatagatatgtaatttgtatttatttcctaatttaacttcaaacagcaattcttttgggagatagcattactgttcatcccccttaataaatgagcatactgacattctttcaaataattstttgctgtctcccaaaaagatggtagctaggcacattgggtaatctgctcaatgcacccagctactagggctggaaactaatcattgaccttcctttctcccaggcatctgctcagtgagtacctgagttgtgtgcatatttggcagctctgccagccttccctaaaagcgctaaacccactagggaaagaaatgcctgcaggagcaggtaacccttgctgcagggtgacagggagaaagctggggagaggataggcctaagcaattcagtggaaggcagamagacaagccaacctttccccagtcagtgyggcaaatgctgtaacaattcattcaattatgttaagtgactattaaaggaatcctaagccctcccttgggccatttcagttctaagagattgtaattgtttgagactaaccatgatttcttcttttgccttcaggtgattctcattttgacaaagctctatgactataacctggggagcatcacagagagctcgctttggaggtatgtagataaatggagctaataattaccgtgttatttaagcatgatgcctgctactgctgtcccacccactttttcctggcaggaaggttcctggtgatatgcactgcttgctttctctctttcttctctgtttcctttagtgatgcgctgggctttatctccaggcaggccagagctttactttctttatagaccaattcttttagtcagccagattcttttgctaacctgtatgataggttgtgtttatgcacygtctcactgacctgtgagtttattggagcagaagtgagactggaagtctctttgcagaagaatcagcacagcctctaggtctgcagaacgaggctctctaccagggaaactttttttttttttttgagacggagttttggtcttgttgcccaggctggagtgcaatggcgcatctcggctcagcgcaacctctgcctcccgggttcaagccattctcctgcctcagcctcccgagtagctgggattacaggcatgcgccaccacgcatggctaatttttttgtatttttgatagagatggggtttctccatcttggtcaggctgatcttgaacttccaacctcaggtgatctgcaggcctcagccayccaaaacggtgggattacaggcatgcgccaccacrcctggctaatttttttgtatatttggtagagacgtggtttctccatgttggtgaggctgatcttgaacttccgacctcaggtgatctgccggctggcctcagcatcccaaaatgctgggattacmggcatgagccaccgcgcctggcccagggcaacattcctttactaacttcccttccatggtggtcctgcagctcaccagcagcacaggcatgcatacccacactcatgcacacccttatctttgggattcacactgtattgcttcacacatatagagtatggaaatgatacaggattttttcagtgcctcttcgccagccagagacctccacagccggcagtgcctctgcttgagttttgcttgtgcccacagggcttgctctgcccacttagcccatcaggctgcactcagctcatactactggttgatatctcatgcctgccaagggcaagccaggtgcgccagctgctgtgatggggtgggcagctccagcattggctctgtgcaaggctgtggctggaccaggtgtatgacaaggggcctccgccttgggcgctggtgtctggacgaggggaatgcggtggcgccttaaaaactcggggacaccagcaatcatggaactgcaaagggggtgttacagcataacacagccctggcttggggagccgaggtctaggcccccagaagggtcatagctcttctctccttcccaccagccacagtgcagcaaacagggtgggggtgggtttcacctcattcgtgttacagctcgttcagtcccactgctctgctctagcccatgcctcctaggctggcccagcgccactgctacttcccgttgtgtggggcagctgcctggcgccaacagaggacaggaaggctacagtattacagctcctttctcactcgctgttgggtgggtcccaggttcttgtcctgcatccaagaagagttttattgagtgacggaacagctctcagtggagaggagacccaaagtgggtagtccctaccagaaggcgggtagtcccaacgtgtggmtgagggcagggtttttataggctcaaaatgggggaggtgcaggccgtaggtagaaagagaaaaacatattgggtctcggaggagcttcccatccatgattttagacccrtggtagcccaactgcccagtcatgctggtattcaaggagctcctctacgctaagggatttgtacctattcatttgaaaaattattgtgatagtagtagaaggccaacaaattcctaggcagatagggacaagcccccaatgaaacccaaccttcaagccacaagacagcctgaagcctgaaaactaagcttccagttctggatatagtccctggttacagggatgtaactgaaagtgtgggaagtttggtaggggacttaataaaagtataattttttgtgcattaaggagcccgcacctactatattgcttcaattctgtaacccttcatcagaatctctgtgactctgagcaacttcatacttccctgatagatttctctaatggatctccatgtataagagtaaaagccagcatttttttctgcagtgcattttccatataaagtatagtctgcatattagaaatttaatagatartgcagttttgtctcactgggacagaggcttacgcagtcataactctccacctgcacagtggaaagaacatgcctgcagggcctgaggagcaggttgccctagactgtggaagctcaggttcagtatgcttttctctccatgaaggggcattgttactgatggcccagtctaagaagaatgtccttttcaaacttagtggaaagggttaatttaaaaaatggcatcacatcccattagtatcaggcttcccttctgaaggagcagtctacttgggtgaaatctgggaaagtgtggcgcgaatgacctgctggcttctcaatcttaagatgaatttcactgaaggatgcatactgtcatgcactgcgtaatgccatttcagtcaatgacaccatatacaatagtggtcccataaaattatactgtatttttcctgtatctcttttgtttagacatatttagatacacaaataccatgatgttacaattgcccacagtgttcaacacagtaacatgctgtatggatttgcagtcttggaacaatagggtgtaccttatgcctacataagtagtatgctataccttcgaggtttgtgtaagtatactgtattatgttcacacaatgagaaactcacctaaggtcatgtttctccgaattcatccacctcattaagtgatacatgactatatatatatacatatagtcagccttccctatctgtgggttttagatctgttaattcaacccwtcttggatcaaaactgttgggggaaaaaaatttaaaaacaacacaacactatcaccaatacaagtaaaaaaatacagtatagcaattatttacataatatttatattttatttggtgttacaagtaatctgggaatgattttaaatataccaaggagaaggtcagtaagtcatatgcaactactacaccatcttctatcaggaatttgagcatctgcggattttagtattcatgggggattctggaaaaaatcccctccaggtactgagagatgaccatgcgtatacacacacgcatgcacacacacacacacacacacacacacacacactatacccacagatacataatatatttctaaaatatacgcctaatagtcatttgccatatgtcatatactggtgtgactacttcaggtatgtgatatattagaaactggtaattttatttattttaaattattattattaktagtagtagtagtagtatttgagacagaatctcaccctgtcacccaggctggagtgcagtggcatgatcacagcttactacagcctcaaacacccagataaaagtgatcttcccaccttagcctcccaagtagctgggactacaaatatttgcgactaccctaggctaattttttattattattattttgatagagacagggtcccactttgttactcaaactggttttgagctcctgggttcaagtaaccctcccacctcagcctcccaaactctcaggattacaagcatgagccaccacgcctggtcattttagtactttaataggaatgacacataccttactgaaaatgtaatttagaaaacagagaataaggtggaaaaatatgtataatacttcatattataatatataatataacatagwataatataatataatataatataatataatataatatataatgtgtcatatatgaaacctcggtaggacttttgaacagctcacagtgcccgtactcaagagtttaggaaacctccataggtatgttaatacagaggaggagtgggacaggcctgggtgggtagaggacagggctcaggaagagaaagccttatggttctgagttgtctagcacagccttgcttgagggaaactaggtggcctagcacaaactgactttctcctgcaccagctcatactgttaccaaaacaccagggatccaatctcagcccttctggtcactgcacagaaagccaatcactgagacaactattattgccaaggaagaaggctttaaccgggtgctagagctgaggagatgggagatgagtctcaaatccatctccctgactcactaaagttaggggtttaacatagcagggaagaaatgtaactgtgttggaaaacaggaactagggaagggtaaggagataaaatgagaggcctggcatctcattgtctgaatgcaatgagctagtgagttttacttctttgatactttttgagaggcttccagggcctttcctgaggagggaactcagatgaaacaaatgttaagtttcaagctttaagacaggaagggccaattcctatttttatccaaaagaagtgtctatgggactattggggaggtttcagtactttatgctcagaaaacctgcctatgccaaaaattggggrctatgacctcaggcaagtcttagacatctgcaaggtacccatggccccaagtacaagacttagcatatagctagtgctcagtaactgtgtttttaaacagagcagtgagcacaacagacttcatggtcatccaaagataattttattatattgtattttatttcttttatttattcaacagtgttgtattgattaactcctttatgccttggaatgatctggtccagtgaggggaaggtgtgtgtgtacctagatcaacagcagataggctctgtcctccaggtgttccgttttttttttttttttycagagacggagtcttgctctgtcacccaggctggagtgcagtggcgtgatctcggctcactgcaagctctgcctcctgggttcacccgccattctcttgcttcagcctccctagtagctgagactacagatgcccgccaccatgcctggctaatttttgtatttttagtagagacggggtttcaccatgttagccaggatggtctcgatctcctgacctcgtgatccacccacctcggcctcccaaagtgctgggattacaggcgttaaccaccgtgcccggccagatgttcctttttagagggggacaaagatctgtggacagtcaaggtgagagggaaatacacttgcatgtatccctccttatgtaattgtattgaataagttattgaagcagccgcccggaaatgccagatcccagaataagacagatataatgtaaatagactttcacacaaccataagtgttgtaataaaaatatgagataagtgttgcttctttactttcctcatgtggatattttctcttcgtaactcatctttgagtccttgaacccaacaccttgctcgtttagtgataataatgataatggtaataatgacaatactggaaacctttattgggtattcactgtgtgtctggcatgatgctgagtgttagacatgtgttattacatcctcttaattcatttttatggtgtgcccaaggtcgcacaattagcaagtagtagcctatagacttacagacatgttactgaactccatacgttcattgcttatctgtcttccagagctctgccttctggtggatctttctatacccaaacaagcaacaggatattttatagaaatatatgtgtatattattatataatatctatatatgtattgtgtgtatatatatacacacacagacacacacacgtacaaacaccatatacagagtgaatagggttttctacgtgctgtaacattctgagcagcaattgccttactcctgaaaaatactgggtgacagagaaatggcttcttgtccaacaagtagatacgtgcacttttcaattgagcccttattctttacaagttttagcagctgaagagtcagaaaggggcaactggcaaatgcccttgaggtggtagggtagtcaagaggccaagaggctgttgaccttatagtgatgtcctagggctgtaagccttgctggatatcaacaaaccaggcaagacagaacgagatgtcactgtaccaaattaatgagcttttgctcccggttggtcttgtcattgattacacattaatcttggagcaagttggtgatttttgtttcgttttgtgttgttcttcactcagggagtcaaaatgagaggaaagggggatgatttgatgcagaacaattcactgcaccttaaaattgtcttcactttatagtggattaagctttgagaattggagagcgtggtggttttatcatattggtacaagataagcttaaaggttgagatagataaattgtcaaaatctagaatatggtacttctgagaagaaatatattcatcttttttttccctgttatactagggcaatcagtactctgttgagagaggcttagctggtgagaaagccctaggcaattctggaaggagctggaagtctactctcttaaagcagcacacaacctgcagtgtctgtctatcttagaggttgcctgacatggctgacttctcaaattcagtgtcctgttctcagatccacatgggacacaagcaggcttctaagtaggtctccagaagtatgtacttctcaaacagcaaaacctgcttttggaggggcacaaagcaagtgcaatttaaggagagagaatgtgttaggcttttgatgtgattctgtattggtagccagccctgtcccattttctcaggagacacaatttcgtggccattacgcatcatgattatcaagagaagttccccagtagtgtttgtgaataatggccttgagtcagaggctgtgtagggatgagggcagcctgtgctctctggagaactccctaggttcaggctggagggaactcacctgygtgtttgttagccctctgcaagccctgtgagtgagtcccaacgcctcccttctcctccacgccacgtccaggggaagagcagtgggtggcttgggtcagattgttagtccctgctttgaaagatgttttgctaccaaatccagttttcactctgctacaaacacaaggctatatgcacatcctaaaaagaaaaaataataataataaaaccagagtgtgataacttccaggcaagagaatccttcatgtcacacagatttaatgatgctgttcacacctgtgcgtacaaatgtttagtacctctccagagtctaagggagctagtcaagcgttcaggcaggatccggaggtgttctggattgtgrctttttggattctagattcttttgtgttttgtaactcccattccatatttgtgtcacttggagctggttgtggttcctgaacttacacaattaaaattctttttttttttggatacagagtctttctctgtctcctaggttgaagtgcrgtggcgtgatctcagcttactgcaagctccgcctcccaggttcatgccattctcctgcctcagcctccagagtagctgggactacaggcgcctgccaccacgcccagctaattttttttgtatttttagtagagacgcggtttcaccatgttagccaggatggtctcaatctcctgaccttgtgatctgcctgtctcagcctcccaaagtgctgggattacaggcgtgaggcactgcgcccggcctacagttaatttttttttttttttaagaaacagggtcttgctctgtcactgaggcagtggaataatcatagctcactgcagccacaagcagtcctccagcctcagcctcccaagtaactggtactacaggtacacaccactgtgccagattaatttttaaatttttttgtagagatggggcctcaccttgttgcccagactggtcttggacccctggcttcaagcagtccccttaactcagcctcctaaagcactgggattacagacgtgagccactctaccctgcctacatttattttactaaactatgtttttttaaaaaaaatcacaaaagtaatgtatgctcattacaatgagccagaaaaaacacagatacatttttttttttcaaaaaactgtaaatagtttcttacataccacctagattcagctttcctgatatctgtagtggtgagttattgttttttttctcttcatatctttgtgactcaactaaaaagtgtcaacagatatatacataccataggtctactttttcatttgtttaagaaaatagaagtatactattcactggattatgacaacctgatttatttcacttaccaatgactcttgggtgtctatccagatgaatgcattgaaaaaaatgggccaggcttgtaagcatcccagagtatgcatattgtacagtatatcgaattaaacaactgcatgcttaattaacttatgtattgcttcctacataccaagaagtgttttcagttcttttatccttttaacaaccccataaaataggtactgtttgtagctctagtttctttttctcttttttttttttgagatggagtttcactcttgtgaagagtgatggcatgttctcggctcactgcaacctctgcctctctctggttcaagcaattctcctgcctcaatctcttgagtagctgggattgcaggtgcctgccaccasgcccggctaatttttttgtatttttagtagagacagggtttcaccatgttggccaggctagtcttgaactcctgacctcaggtgatctgcccaccttggcctcccaaagtgctgggattacaggcgtgagccaccgcgcccagcctgtagctccagtttctagatgagagaagtaagacttagaaagatttagtagcatgcttaatggtctgacagccagctagtcagacagagctggctcctgactattctctgaatgcctgtgctacactgcttctccattacctttccgatagatctttagttcatttcgtcaagagttgttactacacacagtgctccgataaacatatctgtaaacatatccttttactttggtaattttacctttataaagtacaatagaattcttaagatgatattgttgtatcaaaaatgaatgcatttgtattgtaaatgatactcgagattacattccaagaaggttgcaacaaatcatacacgtgcaagcaataatagtttgcagatttccccaggctttcatcaggactggaattttcaatacgtaacttttaaatcagtattttggatgaaagtgatgtcttgatctcagtgtattttaatgggtattttcctgaccacaagtgatggtgatcatcttttcatatgtgtattggactgtggcactgtggacctctctctttctccctcactcctcaggcaaaaataattgcttctttctcattaatcttgtagtgaattatgtatctttgacttataatggttatcagatgtatatttattttgttcaacaaacatctcttagacctacctgtatgccatgccaagcagtgtactagatagtcagtgggaataagcatataagtaaataattgttcctgtcctacagaaaccccaaatctagttaagagcagactttcagtggatagttacagaagtgtgctaaatgcagggtaaaatgtatgcataagttattgtgatgtttgtctgtttccatactgtattattagtctgttcccgtgctgctaataaagacatacctgatactgggtaatttataaaggaaagaggtttaattgactcacagttccacagtgctggggaggccccacagtcatggtgtaaaatgatggaagagcaaagccacgtcttacatggcaacaggcgagagagtttgtgcagggaactcccatttataaaaccatcagatctcgtgagacttacacactaacatgaaaatagtatgggggaagacccgctcccatgattcaattacctcccaccaaatccttcccttgatatgtgggaattatgggggctacaattcaagacaagatttgggtagggacacagccaaaccatatcacatactaacctggaaatccaaagactatgaccatgtcttattttcatttggttcatacccaaaatagaactggtcttattaagtatcattaaatgctttttgctttgaagagtatgttatgaaatgatttagtgtcactgaaagccaggcctatgtcatacacttgtttctatcctaaatttttaacctactgccttatgtgtaggtgatacagttctgaataatgtgctacgtgacctcgagaaattccatgacattgctgtcaaagaagargagcataaccagtgccaagtgggaaaagcccagagattcaaggcaggaatctgttatttccacagagctctaggcattcctgttcagcccccttgattttaacaaaatcttagaactcaccatgtgaaagctcgttctataaggatctgcatgtattcatccaaaagatgctatagaccttcctgagatgtgtgagaccatctgtgagagtctggcctcagcttgcacccctgctctccttgtttgcctcagtgattgacaccctgctgagttccccacttttccttttagcaagtaatagatgaaatacacagaaagcaaacactgtcctgaggtcctaataactttgccaatataagctgagaaagcaaaggcaaaaaattttactagagaaagcaaagcaactgacattctgatatcaaacctggttatagattcaggaagcatttagaatattaattcccattttagtacattggtatgaacaccacgtggtaaaattctacatctgtgaagtcccttgagatacagatcaccaccatccagttaccttccacatcctcatagttcctcagaaggctttcctatgtatttactgttttggattgtccttttatgtcaaaatttaagcttaataagcaatcaaacaatgaaaattaagtgctatttgagtatagtgtcctgtattgggcacaaagaaagtcagaagatcctcagaacacaatttcataccttctargaacacaaagtctctttattctttcagcatgaccagatcctccatatttttcaggtcataatccaaataccaacttctttttaagaagccattcgtatctatactattaaaagtaggcttggctggacatggtggctcacacctgtaatcccagcactttgggaggccgaggcaggtagatcacttgaggctaggagttcaagaccagcctggccaacatggtgaaaccttgtctctactaaaaatacaaaaaaattagctgggtgtggtggctcatgcctgtaatcccagcctctcgggagtttgaggcaggagaattgcttgaacccgggagccagaggttgcagtgagccaagatcacatcactgcatgtcagcctgagtgacagagcgagactccatctccaaaaaaaaaaaaaaaaaaaaaggctctttcttgcttctttctaccatagctctttgtttctttcattcactacatgtgtcatgatctagaatgattttattcattacttctctattgtctgatgccaccattaaaatataaactcgctgagggcagagaccttgtctgtcttattttctgtgtccaggaaattgcctggcacaaaggtattcaggtgaaatttggcaaattaattgaatgtataaatacgtacatacatagatccatgctaactggtataaatccagatayaaagaagatcatattgttgtccttaagtaatttgcagcctgttggggagacagataaatacatgagagattatgtcagtatgtcaagtgccatagtagaagtaccataggttctctgggtggggaaggaagagctttctggaggagaagagacctgaactgaatccaaagaaggagtaggaattagactagtaagggaggctgattatttagtgagtacatcccatatttcaggcgcctctaggtgctggcagcatggcttattgaggaaattgcactaaatcacaatacagtctgtgtgtgcaattggtcagttctgtgctaagtattctgacatttatcccagaggaactaatgcatctttgaaaggtctggggcaagtaaaagggttgatgagatatgaatttcacacacaaaaaattaccttggtgtcatgttatggattcacctggcaaagaacaaaactggtgaccatgaacaaagtagtcagtgaaacaagaagtaagagatgagaaggggccaacctttttagagagtggaaaaatggagtatgacatatagagtgtgggggtgattttaatagattttgtaagggaaagaagcacaggaccagttgttgggtgagttagaaggtgaaagggagaaacatatctgcaatgactttctcacttttgtcttggacattccagaggatggtgagattattttctaggagaagacggaggaagacaattttggaatgggagatggggatgaggtgaagagacaattaattaattaattaattttttgagatggagtctcactctgttgcctaggctggagtccagtggcacgatctcggctcactgcaagctctgcctcccgggttcacgccattctcctgcctcagcctcccgagtagctgggactacaggcacctgccaccatgcccggctattttttttttgtatttttagtagagatggggtttcacagtgttagccrggatggtcttgatctcctgacctcatgatccggccacctcggcctcccaaagcgctgggattacaggtgtgagccactgcacctggcctattaatttattttttaacagattgaggttgagatagagttagacaactcaaatggaaattttcagataattaaagtatacatggccttggagtccaggcagaaggactgatgtgaagacatatttggaaggcatgagctcaagcagtagaagctgtgttcataggaacctagggagagtgtgcagaagaaaatgagagaaaaactgaggagatccccagttcctagacatacagaagtctgaggaggagttggagttgctgctgcttgaaagttggaagaaaaattaggcagaggaacaagtgagaagaacattaaacaccacagatagttaagtaagaaaaatatgtgtgaagtagccaccaaatttatcaatgcagaagacattggctcagctgaagtgccggagggaaggttgggtaacaggtggctgagaaggtacatctgtctgtcctagtgatgcccactgagcacctctgactagtggatgagcagtcagggaatagggacaggatatgaagacagctctctcaagaaggagctgtgaagggaaataaaaggaagagacgtgattttgtagaaaggaggtgacagactaaaggaacattttcctttctttaagtgagaacaaacctggccatgtttacrtttyccagggagaaatcagtgaaaagagactgaaaatatagaaaaattagtggagaatagaactgatagagaactgatagagaattgagtggtagagaaggtatggaatccaaggtcaggtggaggaattatccagtcgtagtagatcagggagggcaaggggtggaccgaggggagctttccttttaccaagagaggaggcaaggatgccaggatagggactcccacaaatcagctttcctgagccatgtgggttaaggggtgtcctgccatttggttgtaygttgagtgggagatggacgtgagatgggacttgacattttggaagagtcactgagaagacaggagagggacagctcaggagctggcatgcactgtgctgaataatgctgagatccagatgaagccacaccctggggtcagcatgactgtgctttttttgttccagtgagccttgtgtaacacacaagaaggcatttggttatgattccaggaggaaggacaagaggttggggaactgaggggcttgagtggtagataagaggtcttgaccaaatagagaaagaagaaagggaagccggaggtgggaggaggacaaacagtgaaacagtaggaccttcgatccattcatatttaagagcytgaagaacacttaaaaaataatacccagaggagtgtgaatttttgtattataaaacttggaacatgtcttgtccccggggaactctgtgaatgggaactggtcagagcaggtggagttaatcagaaaagccttttataaaagctacttttaagaaattcactcagctctctaggagaaggcactgctatttttctgcatttatatggaacaactagatctacttgtcaattccccccacatccytgagttatttgtgagtgacaacccacctccacacctttggggaacactaagcagccttctccatcctggttatgggagattttctccaggcaactgtctattcccagaactaagacttacagattaaccacaaccggcagtccctgtgataccattgtcaacacagagtgagtcgctcagatattaggctgaagtaatactggttttcttgctagtcaccattttttaccctgctccttactctgaagcccattccaaaatttcttttccttttatagttaaaaatatattttttagagtttggttttctggagtctaagttgaccttactttggcttctccaatccctctcctactgggagccacattccttggtattgttcatttcacttactaaaattctcaataaaggaagggtattgtgtgttctagccacggtgaactacttataggttctgccaaggcaacacgtgcccttggaaggccatccatgtcatgggtcagcacgtgggctttggccttgggctgtctgggcaggaatccaggctctgtccatttactagctctgagactgtggggagattttttttttaagtctctgtgctccatttcctcatcagaaaaagtatatttatctaataggcttatggtgacactgatgttgagtgtggatcacctactaaacatacattaataatacaacaccaacagacaaacacaaatcttggatcttgtacttctgtggtctttgctggggatgcctttccccttctattcaatttgcctacaaaataatactgatagccatttatactgacaatttactatatgccaggcatggcttcaagtgctttatatgtattaacaaattcccaaaatatttttatgagattggtactatcgttataccctttttgtagacgtggaaactgaggcatagggaggtaacccgaacagggtcataaagatactaagcagtaaagaagagatctgaaccagtcgagctccagagcccaggctttgaaccccacaaggaccatcttttgtgggatccttccctagccatctctatccacacagagaataattttttttattattattttttgagatggagttttgttcttgttgcccaggctggagtgcaatggcacaacttaggctcactgaaacctccacctctcgggttcaagcagttctcctgcttcagtctcccgagtagctgggattacagccatgtgccaccatacccagttaatttttgtatttttagttgagatagggtttcaccatgttggccaggttggtctggaactccttacctcaggtgatccacccaccttggcctcccaaagtgctgggattacaggcgtgagccaccatgtccagccaagcctacttttaatagtatagatatgaatggcttcttaaaaagaagccacacagagaataaattactgctcatgtgctctgttttacatatttttccttttgaatgtattggtttgaattgtaagcactttctattcatctcttacctttaccaggaacatttcgaaggacacatgctaccttcttcatttttgtatacccaacaccaagtacagaccttggtgcatagtagtatgttcagtaacaagaagcgccaagttaaatgtaatgaggaaaggagattttttaaaaatatgttatctgtgtcatctgtgggtttaattcatataaagcatgtcccatattagttatcacaagtaatcaatggttaacagaatatagtttactcaaatgtcatgttttgctctaatctattgtcattgcacttgagggaggtgacagatattaatttaatttcagcaggttgcttgacactgctatgctgaatgtctgtaatgatgctttcgtgagtgctggaagcttatctaatgctaaagcagaggtacatttgttcaaatacaaatgtaatgtctggcgcattgaattcccagtcccaagggctgcaccttgtgctgtctcctgacagttcactttaggaaacaggacacaggtctccactacggacctggctcaactttgagcaaaggccaccagaggtatgtgtggcactgaagcgagtatscatggctcaacaggcattatatcgtaggatgaggaagatgagagcaatagtactggagaactttagaaaaacctttttcttatttcaggtgaagtttccgaaatacagtactgctcctccataaatcaggctggggtgctttcagctcttctcctccttccaaagggaaatggtgtgctgaagagttattcctcagcacagctttatttctttctcctgctgggatgtattagcaaggtcatcacctttggtttattggcttcaaacaatctgtgattgcagaggattatgacttcttagcttgcagaagcaggagatgcaatcaattcctgaaaggcacaggactgcgttttctttcagaaatgtatatttatttctgccatcacttctggggaccaaaactttaaaaagacttttgaaaggaatttatctttgaatgtcctgcatcatcgccccttttgaatgagaacattgagtcagtcagaccagtgtgaactatctgagtttgaaagaaataagataatttcacaagtttgtcttccccatctccaatcctaaaccaaattaattgggaaatttatattcattgcattattccaaacgtataccctttgaaataatcgaagacttggattagccatgcctgcaggttgatgaatacattctctttgctggggcaagggaaatgtccggaaatctttggaacttgattggtatttattgtgatgtcagttttctttctaattttgccattatctgtcagtttcctagattatttttcttaaatttggtattgcccytctcccaattaggaatctatcacttctgacctcaaaaacgagtcagaatttacactattctcttccttctacattacatgggaygttttccctttagggttacaaaaacacagtcccaataatctctctcttcaaaacttaacaaattaatgtcacaacatggagactatacttttgctaggcagcaggatgtcccagcctacaataaccttagcagtcagagttttgctgacaccaagtgctgcactgttaatagaggtctggcctctgagttcccattttggcagctccccagaagtcaggggttgatgttctgatgctgatatgacatarggatttgtggactctgcttagaataaccactttgtttgtttatttgagtagttttatggaatctacagaaccgcaaaactgttactcaaatggttgctgcctgcttattctttgggccatctaagcacatgatacaattgctcctcctgtcaccaggaagcatgtgggaaggaggaaggaatagtgtgagatcagctactgtctggactgcaggatgcagggtgcatctgtaatggctgtatccatggtcgtcctgattagcttagctatactagctagcgtggtggcctgaggtccatcaatttgccacttctgctcttgggaactaagtcatccatgttccccatctctccaaacataaaactctacaggatatcatcagactgaaaatatcttcaggccatttttcttattagactcgttgtagtagggcaaagatcaaggtgtagctaccaagccagtgtataatgacaaacatcaacttgatgtgctaagttcctgaaataggcctgtacactagagcagattgagattttgaattttggtccctcttctctctacttcctggacctgctttcttcattgatttgacactccctgccaggccctagtttctacatcctcttctcttctgaattatttatccttgtaaagaagatagagttgagatggatacctaatctgtccaagctgtggttaaggatgccctctctggacctcattttcttcaactggtgtattagaccacttcctttctttcttttttttttttttttttcttctttttgagacagagtcttgctctgttgctcaggatggagtgcagtggcttgatcttggctcactgcaacctccgcctcccgaggtcaagcaattctcctgcctcagcctcccaagtagtggggattacaggcacctgccaccatgtccggctaatttttgtgtttttagtagagatgggatttcacygtgttggccaggctggtcacaaactcctgacctcaggtgatccacctgcctcagccccccaaagtgctgggattacaggcatgagccaccgtgcccagcctagaccattttcatactgctatgaagaaatgcctgagactgggtaatttataaagaaaaacaggtttagtggactcacagtccacatggttggggaggcttcacaatcatggtggaaggtgaaggaggagcaaaggcatgtcttatatggcagcaggcaagagagcatgtgcaagggaactgccctttataaaaccatcagattggccaggcacagtgactcatgtctgcaattctagcactttgggaggccgacaagggtggattacttgaggtcaggagttcaaaaccaccctagccaacatggtgaaaccctctcctactaaaaatacaaaaaaaaaaaaatagctgggcatggtggtgggcacctgtaaatcccagctactcaggaggctgaggcaggagaattgcttgaacctgggaggcggagggtgcagtgagctgagaccatgtcactgaattccagcctgggcaacagagcaagactctatctcaaaaaaaaaaaaaaatcagatcttctgagacttattcactataacaagaacagcatgggaaaaacctacccccatgattcagttacctcccaatgagtccttcccatgacacatgggattatgggagctacaattcaagatgagatttgggtggggacacagccaaaccgtatcatctggtaaatggggttattagtacttctgcattttagactggagtggacacatatatgctagtttaagattagattgagtttatagtatttaaccacagcataagtttatcagaagtagagtggtcatgaagaattgctagtaattttgtccttgaagaatagtttcctaccatatctgagaagtcaactattttgttttccattatccccttagagttgaaccttgcattatattcaagagcagtctttgcagttgatgcttcctcttaagggaatgaagatacaacttttctcagggctttatgccagtcttctcatcatcaaggccatacctgatctttggaggaaatcagagttcaggaaattcctgaacagtagctctgccagcattcacaaaaacttattccctcacatatttatctcatatagacttattgcaaggaagaagatatttgaagctccagatgaatagtaggatctcattaaatgtgagttccctccattagtggcatgttccatacattcttctctgcttgatgccagaaggtattggtgttggtccactgaaagatgcactagggttaggaaaaagcctgctctgagattgtctaaccaaatctatgttcctgtcttggacttgagtagctcttcactgcatttcatctcagttttgtgctgtttctgggaacaggattccatggaatagttagcaaccatcttgttgtttgccttagaagattatgcaactgagtgcccatgagataccagtcaggatgtaaatggaaacaggaaggaaaaagactggtgaagggctgtgtcccaaagtctaagcacaactgatggcttgaggccaagtcaaaaattagagaaaaggggaagtgagattttcagcaattagtcagtatttaagaatagatagcttcctgcaccatactgcaaagatcacttttgcagattttcaggaggcagtaaagaatagttaacattcagatrtgctccaatcagatgataataggggtaatttgagtttacaggctaccagttcttaaatttaattctcaagtttcaaagtactttctagaaatgttagaaattctaaatgcaaattgaaatagcttcacctacttgaatttccctcaaacttttgcaaagacaatcaaaacagtaaaaagggacattatcactttgatgaatcctgtgagaagtaaatagtatgttctgtgcatattgagagtaggtgtgagcatgtcctgtgttctaaacttagcactgccactaattgtgtgatcttgggcaaattgttttatttcatagaatcttggtcttctcatttttaagaaaaagaatttgtactagacagactgattttcaacctagctctaacattctacatttctaataattgctgccccaaatatttgccttgtttacagcaggtatccttgcatattttggaatgctaatgataaaacattgctgttcctatttcttctaggaattttttttaaaaaatgtatccattataactcattattggttgactgcaggtagacccagacaggtcaacccactatcattttgcaggtaggaagccaggtattttgtgactactaaattagaggacttaaaatggtaaatattagaatattatctccaccaagtttccatatctctttggacatttatttctatattctatattagggataataataatttgatcaattaggttacagtgaagagtaaatattttaaggaccctctaggcacattctaagaggtagaaacataactgaaactcagctcttctgattgtaaaagctaactgggaaaagagctaactataaaatacctaaatgcttctgagtctcagtttcctcatttgtaagtgggtattccaaaaattattttcttttcttttttttatttgtaagtatttttttaatttcagtagtttttggggtactcgtggtttttgattacatggatgaattgtatagtgatgaagtctgagattttagtgtacccatcacctgagtagtgtatattgtgcccaatatgtcattttttattcctcacttccccttccgccctcccttttctgagtttccagtgtccattatgtcactctgtatgcctttatgtacccatagcttagctcctgcttattaaatgagaacatatggtaattggttttccattcccgagttacttcactgaaaataatggcttccagcaacatccaagttgctgcaaaggacattattttgttcttttttatggctgagtagtattctatgatgtacatataccacattttctttatacactcaatcgttgatgggcatgtaggttggtttcatatctttgcaattgtgaattgtgatacctagtagtgggttcctggattgaatggtagatctacttttagttctttaaaaaatctccatactggccgggtgcagtggctcatgcctgtaatcccagcactttgggaggccaaggcgggtggatcacgagggcaggagatccagactgtcctggctaacacggtgaaatcccatctccactaaaaatacaaaaaaaaattagccgggtgtggtggtggcgcctgtagtcccaactacacaggaggctgaggcaggagaatgacgtgaaccccggagaccgagctcgcagtgatctgagatcgcaccactgcactccagcctgggtgacagtgcgcgactccatctaaaaaaaagaaataaataaaataaaaaataaaaaatctccatactgttttcccaagaggctgtactaatttacattcccataagcagtgtataaacgtttccttttcaccacatccacgccaatgtctattatattttcacttttgaaattttctttcttttttttttttttttttgttttttgagatggagtctcactctgttgcccaggctggagtgcagtggtgtgatctcgactcactgcaacctccgcctcctgggttcaagtgattcttctgcctcatcctcccaagtagctgggattacaggcatgcatcaccatgctcagctaatttttgtatttttagtagagatggggtttcgccatgttggccaggctggtcttgaactcctgacctcaggtgatccatctgccttggcctcccaaagtactaggattacaagtatgagccactgcgcccagccaaaaatgtttttcatagttgaagttgctattgatatctggtaaagttaatgatgctccgtgtgctctacaagttgtagagtcctctgtgggtgttagctatccttacttgggagttggagcaggtaaaacttgacctttgtgctttcctctgccatagctgggggtgggggggcatcctggatacaactgtctgttcagatatcattgtgtttcactattggactccttgagagtaagtgtttagtttgcaacttcttggccttgtagcaccagagttaccacatagtggtactcattaactagttgtttaataaatcaatgaattaataaatcattgattgtattttagctaccattctattgatcctaagcctggaaatatgctaaatacattttatactcagtggctgtcaatcctgcgaacattaacatcttctgggggacattttaaaatagtatatgtgtggccccacccaagaccaattgaatcagaatctctaggactgagcccaggacacaggtagtgtaaaagctacccaggtgattttaatctggaaaatacagagaatcgatgaactttggcccattatttttctggggtttgcttgactgagctgctcattagtgttgctgataccttatttctgggcttcctagtttcagtgaacatgttctcccatcttgccatttgtcatggctaaaatattctgcatttacaaggatgcaaattcatcatctacatgtaatctcttttgcatttagacctgaacacgatcgtgctgtccaggtaaatcataaacttagatccctttgtggtgtgaaagaaatacaaattaggatggggaaaattaatgttgacagagatcactgatatgctttaaattgcagaggcccgggtctcagattggtttcagaatcacagctattgataatcattctataacattataaagtgaggaggcagtgcctggaaagtggtttgaattggagtctaatccccagttaagcatttagcttgcaactgtgttggcacaaaccagctaaaatttaccattgctgcgaggggagtgctcaccttgaaggtgcttctgattctacagaaggcagagcagacaagctcattttgcatgtttgtcaagggtgtccttagagcaaaacttggtctggatttcttggaattatggtgctttgtttctcttggatagttaacattttcattttcctgagtcttgctaaggtgtcattttgtccaagaagcaagcataagttgagctggagacaggcatacacacatgtggtgggaactggggagaaagatcactatcactctaaggcagcaaggtataccttttctttgtcaccagtgacaaagttaaataacaacttaagattccagtaataacacaggtgacagtagtgctgtgagttgcttcaggaaagggggatttgatgccaaatgcatggtatcaggggagcaatcagcagccaaatgtgaagttatttttactcaagacaatgctttctactttgtttttttaaaaatttcaggatatactcaaatatatcaaaaaaatcatgtaattctcaaaaataataatatatttgtagactatattaatactatagtatgcttctaccagtgtgtatggaaggggataaaaattcacataacatcagtgctttgtaaatgggggatcaaattgactaatgatctgcttgacacctttccccatgagaacatccccagggtataactgtcaacgtccccaaaccctgtgctttcctaagcttcctggaagcattcaagyctgtgaatattactgctgttatggaaaaattggcttttgtttttccccatgagatatttttcctgtcttactagcatgtatgaccagcatttgcagtgcatttatctcctattacccttttgtttttctttttgctcttacctttgattccagaaatgtttttaaaataatggatgatagttaatacacagcatggcaggcaggaaaaatgaacagcagtgagttcattttgatagactatgctgtctgcagataatttaccagggcagagtgctgacatacacaaccctaaaaaaaggacttatccctgttcttaaaccaaaatcattcttgaaagtttccattattcataaggcaacatctctgaaaactgcagggggctttcccacgatgatgcctctgagctagtggctctctggttcaggagttacaaacgagcaaacatctgtatttgtgcacttggggagattgccagctttcagaggactttacactgaaggccagcatggtgaaacagtttcctgtccttattaccaagtattttccccacccgcttccatgctcttctcagtgagttctgacttctgagattctgctcttgcagttgtttttgtagctccattgtgttgactttatttcatcacttttctgtcctactgctactgtaaaccccttgatggtaggaccacgtttctttgtatgtactggtttactggagtgtacattaagtaggcttatcaacattgaattagttaattaacagccaaaaaagtatttctggagctcgctacataggatttaagtacaaatgcctctcaagtatttttggtccctgagagtcttctaggagaagaagggtagggcaaggatttttatgagtcttcttaaaattaggaaggaaattagacaaccagtgtatatttttccaggattcaactccacagcatgtggtttttccagaatcacacggctataatttgtggtaattggtggggattataaaaccacagttatcagcattaatacatttcatagccagttccaccacagttgtatcttaggaaattctgattgcaaaactcccctgagatctgctgaaattaccttttctttgaagggcagattccccatgtcttgattgagaaggctttgagcagatgtggtttcagaaggagttagtggggaagcattagaacactaggttccctggacttttgaagaagtttcacctagaagccttatctgactaaccatattattaaaaaaagaaaaagttctgactcctaaraaccatcatatctttccaaattctgaagaaaaaaaccaaaacaaagcaagatgaaacagaatgcacctgattcaagcatgcgatgttataaagccctcctgtgttggtgttgtgcctgtgagctggctattttcttgaatgtgaagataataatttataatgagatgctcagatacataaatacacacatgaacatacaatgccagcttccgtgtatcccagtagcaaaatgaagcaaggagagctgagggttctgcaaataatttgtattcaatatacagcagccctgccacttattttgcagggtagctgatgactgtttaccctaagcataagcataatgagtctgttaggagtgacctttcctggtgattttgtaaccaatctgtcttaaccttttaattcatttttgtttttttgttttttttttttagagacagagtctcgctctgtcgcccaggctggggtgcagtggcacgatctcggctcactgcaagctccgcttcccgggttcacgccattcttctgcctcagcctcccaagtagctgggactgcaggckctcagcaccacacccggctaatttttgtactttttttagtagagacggttggtatttttttagtagggatgatttaatatgtctcatcaccgtgttagccaggatggtctcaatctcctgaccttgtgatccaccctcctcggcctcccaaactgctgggattacaggcatgcgccactgcgcccggccatcattaattttcttaagcaaaagaggtcctcccatccattctctgttagcaagcattcattttatgccatattcgaaatattagtttaggatttttaatgaccatactccatttattttcatctttcttgctgggatctcagcaaccaagtgctctgattaatacgtgtgtgtgtgtgtgtgtgtgtgtgcacgtgcrcatgcctgtgccctcacaattgtgtgtggtcatttgtttgttataggaaccttgctgactactccaaaattcagccaggaacagcagcttaagttgacgaagtttgatttcccataaactcaggctactaaaacaatggagggaaaatgaaccagaaagcctgcaatgtaggcgttttttggttgatctgcttttccagaagctgattagcactctaatctctctcagtgtggtttcattgttagagacggaaaaagaaaagagacagggcttttctttttataaaaggccatgttagtagggagggaaagtaaacataagccacatctctgtagatctcagttttccctaatgggccaattcacatctctttttaattctgataccccaggtcttttcccttctttctttctttccttttgtgacttgaatttttctattaactgccacagggatcccacataaaatgtatagtggaaagaagatagaaaaaggatgagtaatgcacaatttctaagggttttagaaahsttctggggaaaaattcattctcttctgatctaaaagtataatccccttctaagtctctcctctaaggctaagccacccttgaacatgaagcagttcttaactactgaagcatattcatggagataaagtgacacagaaggagccattgctttcatacctatgagagcctgtgcatttcttatggatgatttaatatgtctcatcatcagyatgctttaattgcatgtaactgcaattttaaaaagatttgttctatttttcctataaaattatatatataattttaattttataattcagtgaatatatatataggtatatatattttcactaaaaaatggaaaaatacagaaagtttatttgctaaaaggcaaaaaatagataaaaaataggtattgggggtaggtggtcagaagctgttaattccttttccccttttgagacaccttttagcctttctttttcctactcctctttctcccttcccgggagaataggacacctctgctaatagtctatgtgagatgtgaggttgcatgctcacatgtggctttgcttctgtggggtattgagaggtgacagtgtgctggcagtcttcacagccctcgctcgctctcagcgctgcctctgcctgggctcccactttggcggcacttaaggagcccttcagcccaccgctgcactgtgggagcccctttctgggctggccaaggccagagctggctccctcagcttgcagggagstgtggagggagaggcgtgagcggaaaccggggctgtgctcggcgcttgcgggccagctggagttccgggtgggcgtgggcttggcggccccgcactcggagcagcctgccggcccctggcaatgaggggcttagcacccgggccagcggctgcggagggtgtactgggtccctcggcagtgccggcccaccggcgctgcgctcgatttctcgcctggccttagctgcctcctcgcggggcagggctggggacctgcagcccaccatgcctgagcctccccgccttcgtgggctcctgtgcggcccgagcctccccaacgagcgccgccgcctgctccacggcgcccagtcccatcgaccacccaagggctgaggagtgcrggtgcacggcgcgggactggcaggcagctccacatgcagcsccggtgcgggatccactgggtgaagccagctgggctcctgagtctggtggggacttgcagaacctttatgtctagctaagggattgtaaatacaccaattggcactctgtgtctagctcagggtttgtgaatgcaccaatggacactttgtatccagctactctggtggggccttggagaacctttatgtctagctcagggattgagacaccaatcggcactctgtgtctagctcaaggtttgtaaacacaccaatcagtaccctgtgtctagctcagggtttgtgaatgcaccaatcaacactctgtatctagctactctggtggggacttggagaacctttgtgtcaacactctgtatctagctaatctggtggggacgtggagaacctttgtgtctagctcagggattgtaaacgcaccaatcagtgccctgtcaaaacagaccccttggctctaccaatcggcaggatgtgggtggggccacatgagaataaacaggctgcccgagctagcagtggcaacccgctcatgtccccttccacagtggtggaagctttattctttcgctctttgcaataagtcttgctgctgctcactctttgggtccacactgcctttatgagctgtaacactcaccgccaaggtctgcagcttcactcctgaagccaacgagaccacgaacccaccgggaggaaggaacaactccagacgcgccgccttaaaagctgtaacactcatctgtgaaggtccgcagcttcactcctgagccagcaagaccacgaacccaccagaaggaagaaactccgaacacatccgaacatcagaatgaacaaactccggacacgctgcctttaagaactgtaacactcacggcgagggtccacggcttcattcttgaagtcaatgagaccaagaagccaccaattctggacacagtattacattagaggctcaaggcctggctatgacaggatcatgcactcaggttttttctatcctgtcactctcatccaagtacctacctccaaaaaactgtggtgacaactctgagccatgtagtattgtattatgtattattatattgwttttctttctatttatttttcactccagtaactggatggataaactcatactacaaccaacatagacatttgtcattctctctctctctctctctytctctctctctcgtgtgtgtgtgtgtgtgtgtgtgtgtgtgtgtgtgatatatattccttagaaattttggaggaagaatggctatggtttgagacccttgatctagtaccatcttaatgctactaaaatccattaatgctactaaaatccattaataattattttacttcagagtaaaaacctgctatatttgtgtttgttcctatggatgagactttatactctagtttgtttactgtcttgttagttttaacgatatgagattttcaaatgttgactacatttgaactataaaaatggcagttttatgagcctcaacctaataatagtaaatgttcaataaaaggtaactttataattggctaagcacttcaagggtatcatctcatttaattctcacagcagcccattcaggcagttacttttttttaatccccacttttcagatgagacagttgaggctcaggaagataargagatgagttcagtattaaatagctggttaggaagcaagctactattaaaactcagttatttttgactttagtctttttattcaaggcacacrattatttaaaaagcacatattcttaatggctgcataatggcttgtatggatttactttatttttatcttaaaaacattaaccccctgcttatcatttaggtcatttctattctttcattaccacaaagaatgctgtgataaacataactcttaaggatacaaataactatgctttagctgggattgaatgcacttgccatatcttgaatctactcctgtgttgtgcattgatggataatatttgatataagcctcgtgatttgccatctaggaaattatttttcagtcttttttttctttcaaagtgtcttagaattgtttaaatatcaaatttctgataaagtctataaaacattatttatttttcataaattgtttatacacagttgtccaggaacaaaactgttttagagagcccaataaacctgtcattgcagcctcttaccaagtcttaccaaaatcattagctttatctctccatggaatggaccctcccttgggctctagtgttaccatcaaatatacagtgcaattgttctctgttgtgttgttttgctgggaaggtacaatttcatcataaaaacacagaaatatacttgaagcaatgatatgtaaaatgctgcacgaacaaattttaggttatctagatataaaagtgaaagcttgttgtttgagctaaaatattcttacttctcaaaagcctttgttaagtggagggaacagtgagggaagagattgctgctggcattggagagactcaatctgactttgtcttgggatatgaagaggttacatatcagtaagcaagcttgaggccatcaggaggggccacctcttagcctctgtatttcaagctaatttcatgctaagcagggtgtcagtgtaatttgagtaagtttctgctgcagggacagccagttaagtgtgggtcccatccaggaatccagaagcatggagtgaatgctataccttgtgcagcactaatcatgcagagagggcagcctgagtgctagcccacaaagggccctggaggaaaatctgaggctgctctggcctctggcagaggcagataggatagggaaaagggcctttctgctgtacaaaaaaaaaacaaacaatagagaagacaatcatttatgcagaattgtgagtcttcctcttctccaaatgagcaatactgccagagctttgatattttaatttgcaaatactcaatcattacaaaatgatttttaagtacataagatatgatatataatatagcatataaaagtactatttttaaaataatttttgaagtaaatatggtttagaaagtatgtgtttctttaatgtaaatatatcttktgagtgaggaaaagaattgtcagtttgcatagatcagaacatctgaagtttgttgaaaacagaatgaaaacatataaacctgagatacttatgaaagttacacaaggaatacatcttgcttgtccattcttgtcaaratgaaaagcattaattcacactgcaatcaggttgccttaacataaaaaaaaaaaaacaaatccatgcagttaaacgtaaaaattgaaaaaaaaaaaaagacttgggaatccctgttcatctgtttctcagggctgtcactagcagcagcaccaacatctgtaaaaatagaaagtgaggatggtggacaattatttttgacaaagtccttccataccacctatcctcttgttcttacgcttcctatcttttcaatttcctcttttgccttttgcctccatatgttttggagtagctcctgcccaatgcaaattagatagatagatagatagatagatagatagatagatagatagatagatagataactgtggaattttcataatattaaaaattatcaaaattttatttgcatcttttaattttgctttgctttatttttaccatatcatttatctaatacaataaaatgttcctttcaatcactgagcagttcctcagacactatcattatcatgcatttctcactaaagcaaattgtttttaattaaaaggtagatttttttttttttttttgagatggagttttgctcttattgtccaggctggaatacagtggcacgatttcggctcactgcaacctccacctcccgggttcaagagattctcctgtctcagcctctcaagtagctgggattacaggcatgtgcctccacgcccgactaattttatatttttagtagagatggggtttctccatgttggtcaggctggtctcgaactcccgacctcagatgatctgcccttggcctcccaaagtgctggaattacaggcatgagccactgcgcccggccagattattattttaaagccatttatcaaaagaatgagaagacagtccacagattggggaaaatatttgcaaaagacctatctgatagagaactgttatccacactatacaagcactattacaactcaataataaaaaaagctttctttaaaaaatcaaacacaaacaaacatgcaagcaaacaaaaacgggcaaaagatctgaacagataactggccgaagaagatatgcagatgacaaataaacatggggaaagatgttcaacaccatgtaagagaattgcaaatgaaaacaatgatagccactaacacttattaggatggctaaaatccaagacactgacaccaccaaatgctggtgaggccgtggagcaacagcaactctcattctcattactggtggaaatgcagagtggttcagccacattggaaaacagtttcgcagtttcttataaaactaaacataatcttactgtaagatccaacaatcaagctgcctttacccaactgaattgatgaaaacttatatattcacacaaagttcattcaaaacctgaattcatctaagatgtcctttagtaagtggatggattttggtacatccatacaatggaatattattcagctaaaaagaaatgagctattaagccataaaaagacatagaggaaaattaaatgcttattactaagcaaaagagccaatctgaaagggctgcattatctatgactccaaatacatgacattctggaaaagataaaactacggagacggtaagaaagtccatggttggccggacctggtggctcacgcctgtaatcccagcactttgggatgctgaggcgggcggatcacgaggtcaagagatcaagaccatcctggccaacatcgtgaaaccccgtctctactaaaagtacaaaaattagctgggtgtggtggcgtgtgcgcctatagtcccagctactcggggggctgaagcaggggaattgcttgaacccaggaggtggaggttccagtgagctgagattgcgccaccacactccagcctggggacagagcgagactccatgtcaaaaaaaaaaaaaaagaaaaggctgcatggttgtcatgggttgcaggaagggagggatgaatagatcaaayacagaggacttccagggtagygaaactattctatatgatactaaaatggtggacacattgttattatacattagtccagacttgtagaatatataagtctaggatgaaccctaacgtaaactgcggatttgggcgataataataggtcagtgttggttcatcagttgcaacaagtgtaccactctagggtagatgttgatagcaggggaggctgtgtgtgtacaagggagggggacaggagtcatatgggaactctctgtactttcacttaaatttgctgtgaacctaaagctacccttaaaagaagcctaataaaaaaaatccccaaaatgtctttgactggtttcgttatttgatggtatcaaagttttgactttattatcaacgggcttttgttttttctttgtctatttgtgttgtttgtttattgttggaagcccttcaggggatgacagaagatctatccaggtgccagagtctgctgtagtcttcatgttgagaagtcagctgctcttatctcccacatccctagcaaggcaaccctgtcatttcttactctgttgaggttctatgttagtgctcagtggtagttgtgtgtttagcgtatgtcacctggaaccckcctctgaaattcataactttgtccttggctcaaaattaaagtgctgaaagaaacttatccctttcattctttcctaagctctaatgtaagctttgttcaccacctgaggagacctgtctgctcaataagactgtccatttacaagtggcattttcagatttttgacctttcttatatttcttaatgtttttctacttctgggacttcagaagttcagcagatcagaggggatttctcaactyggtatgagatgcagcacaatggaaagcaatttcttagatttcccttatgggaataaggtgcgtgaattatatgaggtcagaccctagagagggcttttctggaaatgcaggcaacatagcaaagaaataagcattgttcagattgaatttgtaatagttggaggataggtgtcrgcttgcttacctggttttgccttttggggcactrgacccttagcattaataccgacagagtttatagtttcctattgtttttattgagtccttatagtttctataggggtagcaatgcagtggatgtcatggttccaaggcatgtgtgagatagactttctccttcctcccgactccctgtgtcccttgcactgagttattaagcagatgattctttttaataacatttgttattaaatgattatataatgattctgtttaataygatttgcgctcttcaatcaaatagaggagtcagataaagaatattgaaatggaattaagagaggagaaagtgagagaacattgtaagtctgatatatctagatgaaattatgctctgaagtccattttccctatktcaggaatttggttcctgttgcatcagtggagcctgataaggaccagggaagcagaggcattctgtaggtcttgtatgtaaggagctgagtgaagagaacttgagaaaaaggcatcagagttctgggctattttctttccccatcacataggggtaggaggagtcttcccctcactttgagccccatgaatgtatgggcttcaagagagctttacctgtatctctccaaatttggggctttaaaaactggaacataacacttgactgagataatcaaaatggtttgtagattgagatctgatgcctgcctgggaaatgaagagggagaggcaagagctgaccacctgcaagacgatgagctagagatgttcttgccgtggtgccttggagctggaaaaatgggagtgttttcccaggagcatgccatggagactgttgctggggtcctctcaggtctcgttcaacagacttctctggagggacaagcaggcctcatggtgaagagggctagagttgagctgccaggtgacaagcagttgagaagggtgactccacccactatttggactggagatgcacccatccaggtcataagaccacaaggcagagatccagcaagagattctaaagagcgcacccaagaaaaagagtcactttcaccatctgccaggcccagagtgctggaaacctcccagccacaaaagaacagccctcacttcctacacgcttttctctcttgctttcctggagcaaggcggcaagttgagtcaagaaactccattaggctcattaaagagcagatgaccacacgtcctttctgcagtgcaggtggcagcctgaaaagggtgggggaattcagggacagggtgggtgtagggatgaggacatgggagggagaaggggtggatttaatatagttgtatacaggattttgattactatcttcagccggacattttatttacagaaattaagaccatgcgtgtgatttaaagtgactctgggactatctattacaaaagaataaatagaaagcccgggggcctgccagagtttgtatccaggagcaagggagattgctcccgaagaagaaaacctaaagaaagaccatgctttaagttactagtcatgtttgcttaccactgtggttacagacataggtttggatgtgaatgttggtcttgagtcccagtgggtgggcggtggctccctgcagcttgtgctcactgtctgcatttctcttcattggggtcattgttctggygtaaagtggtgactgggggtaacagtggtgtctgtccaaagcttcttttttgggaagtgatgatataactttggaaggaggaggcatttaccacctactccctaaaacctttctatcgtcatcagcaacctctgaggaggaagcatacccattttaaaagtgactaaatctgaaacctgatgatatgttaaaccaatcaggtatattgtgaaactcaagccgtatttagcatgactatattgtttaacttgatcaaactagaacccttttaagaatgggcactataaatattcatattgaaacaatgggaataaattaggattgtcctgagccaaccaggacatacatggtcactccactcatattctgttgctcccaatctatagaaaaaagtgtgactttatttatrcatttttatttttttgctagaagcragaactaaaaacctatccaatgcttttgagtagtttcatgacatttactatgtagtaccgttaggcatctcctgaaccaaatagcgcagggaatttccatttttttcacttcatgctctatggtattgcgggttacacacacacctatcagaatccagccaaggcacttaaaccaaggtatctgataatgaagcaatgtgtatctcttcaggaatccttacatgttcctggacaggggtcccagtaaacatcctcttcccaggcagaccatattccagaggaagagagagaaaaagagtacaactcacrggacagaaaatgggaaatcagtagtattagatgttttccatttaagagtcactgggatctraagggggaaaaaccccatatggtttaaaatcagaagacctgggtgaaagtacctcacactaatattgtgtgaggtttggcaaatattttacctttcttcagtgaaaagggcatagctatcataccatcacctctttaaatagaagtatttaagtggtctgtactgtagaagacattcaaatgcacaatatgcaggccaggcatggtggttcatgccaataattccatcactatgggagrccaaggttggtgggtcacttgagaccaggatttcaaggccagcatgggcaatgtggcaaactccatctctacagaaaaatacaaaaattagctgggtgtggtggtgcacacctgtggtcccagctrcatgggaggctgaggcaggaggattgcttgctcccaggaggtcaagactgcagtgagccaagatcatgccactgtactccagcctgagcaacakaatgatactgtcccaaggaaaaaaaaatataatacactatacaattttcaattattttsaaattatacaacaggaagttattatgaaagctcctggtagttaatttttcagtaaaattaagtataaaactttttcagccttgcctattctgttcatctgagcccagatgttgaaacttctggtgaggagataattgcttgttttttgcttttttgaccactgaatattccctgccccactctctccctttctccccctttctccctctcctcctctatttttcctcttccctgtctccctgtctcccctctcttcagtatgcatactgtttggtgagacattgtatgtgagggtatgtagcaaatgacaaagttcaaccaggatattcgctattaagaaaacatctttagccaggcacggtggctcatgcctgtaatcccagcaatttgggaggctgaggcgggtggatcaccaggtcaggagattgagaccatcctggctaacatggtgaaacaccatctctactaaaaaaatacaaaaaaattagccaggcgtggtggcaggcacctgtattcccagccactcgggaggctgaggcaggagaatggcgtgaaccagggaggcagagcttgcagtgagctgaaatcgcaccactgcactccagcctgggcgacagagcgagactccgtatcaaaaaataaaataaaaagaaatgtctttgcttgggttctctgctgtctggcagaaggcacttcagtaaaacaggtgcatattcttaccctcaggaggatgtcctggacaggaagatttttttttaagttacaatgatggaaacttaattggcgagttcaggaaatagtaaataagataaaaatttatgtactgttccaaggatgttcaaaatgagctgcagctattgagaaaacaattactaaggaagaagttagcataggctcctggccaaattggcatcagtttcaagcacttgaagcgagcaccactcataggagctgacagatatttttagatatttgttctgtaccttggctgtagtggaacaatttctctcagagtctgagggactctttagaacccagagattgccaagccaccttgcaatctattcatcaacattgattaaattaagcacttaatccactgcttctcagcagggtgtcaggggcagattttgcccacataggatatctggcagtgtctggaaacattttccttgtcacaacagggtgtggaagatgctactggcatctagaggccagggatgttgctaaacatgctgtagtacacggggcatgtactgcatgaaaaagagtcatctgtcctccagggttaataatccccagcctaatctaactgtgggtttagtaccatcggggatactaaacaagcaaaaatatcatgtctttcctcaagagatatagagccttgatgcagaggataccaaagctatagaccatttagtggaagtaatttttcagccaacagtacttactgagcaccaactatgtaccaggaactctgcaaggtttgggtattaattacaattatagcaaaatagatgtagtgccagtcctcaagaagcttagagtttatcaagaaacacaagtgttaaaaaaagaaactcaaaatttgctgtatattggggtaatcatatttggaatggaaaattagagctgccctgagagagattatacaggagttttgttagattggatggtctgggaacacctctccaagaacatcatacttcagctgagaacgagctggccaggtgaaaaatgacaggataaaaaagaaaaattggaaagtgggctgggtgcggtggctcacgcctataatcccagcactttgggaggctgaggcgggcagattatctgaggtcaggagttcgagaccagcctggccaacatggtgaaaccccgtctctactaaaaatacaaaaattcatggtggcacatgcctgtaatcccagctacttgggaggctgaagcaggagaattgcttgagtctgggagatggaggttgcagtgagctgagatcgtgccactgcactccagcctggccgacagagtgggactctgtctcaaaaaaataaaagaaaaattggaaagtaaaccctctactttgtgaagctgatataagcaactttatgtagaagagatctttaatggaaatatatatatatttatataatttattattttataaattttttttccaggtccaatttctgatttctaattgtgcatatgtgtgtgtgtgtgtgtgtgtgtgtgtatatatatgcacacaattatatatcatcgtgtgcatagatacacataattatatataatacataattatgtacataattatatatgtatataatatacataatacatatatacataatatataatcatatatacaatcgtgtgtatgtgtatacccccacacacacatacacaattagaaacaaaaaattggacctggaatagccaatagtataatggaaaaaaaatgtattgccatcaatcaactttccacttcattcattcattaaataaatagtttgagtgcctttgatgtactagaccttggaaacatattagtgaccgaaagcagaaatgatttcagctctcagaatgtttacattttagtgaaagagaatgcactaaaataaaaaaataattaattgaataatgtattcacagagttaagtactgggatgtgcagatctttatctttatgaaagcctatgctagaggattctacctaggcaagagtgacagggaagattttttcagtaaagtgatgagcaagaggtgtgtagacattgaccaggtgaagtaggttagaaggaagtctcgatagagccatcaaggtttttaggatacctttcattgcaagcaatcttttcctgcacctttcttatcaattggctttctcctagaagtttccattgctcctcctggaggagaatttggagccaggtcccttcaaaataggttatggctcgctcttcctactttgttgctctcacttggtccaggtgtcccaaaacactctgggagtgcaacaaactggaagggggcaatacattattggaagtcagacatctgtaatgaagccactcttcctcacttaaaacagccacacaacctcagttttcagctttttttcagtgtgagtctactatgttccccaaatatatcatgcatatcaaattctctgggaaatcgccatgtggatccaagaagcacaacaagaaagaggaatggaaatgactccaatgtgactagagtagagtgggcctgggagagtggggtgtgaaatgagaccacacaggtagggaggaggaggagggaggttggcaggatggcagtggagtgggatgaggaggggaaggagtgggcaaatatgcattttgaaaggtcgaagaggaagtgctgccaaatcatgtaggaaaatattatagaaacagggaaaggataatgcataagctaaggttttattggtagaaatgcattggtttgtttctatttaagaaattctcagggagtaaatgatagggcttggggatgaaccagttaaagggatagaggtgtcaaagatgagggctaggtgcctagcatgcctaacaggacagatagtggtgccattcactgagagaagaaactctaaaacaggacccattttggaggagaatatcacaagttcaggtttggaaaagttgactttgaggtcagtttgagacacttaagcatagttaccaaatgcaggtctggaactgagctgaagataagcaaccactgtgctcctgcttaatgaaaacctgacactcatccttctgttagtggatgctgtcttgccccagtcacagtctcgtgtctgttactccacatgcttgaaatgggaacatccagctgtcagcaccactgattggaaactgagcaaggagccaatgggagtataaatccaagatcaatgttgagcatgtgttgaagggagaaagtgaatgaatggctagaaatcagatttgccagcatgagagggcaccacttccaccgccataatttggagagatgagaattaaggtcccacgctagtcattcgtrtaagtcctgaggtaactgattaatattgtgctggctaatgagctaattggataattcgataataggactgtagcttggaataggacttaaaaagttatctaggtcaattcatgcctttttcagttgaaattgaggtccagagaggataaatgacttatccagagtcaccatgcacaataatgacagagcatggccgccattgatctcagtttatttcacagtcttacttggttctgtccagtattttgcatgtgaggggagtgacatacagtattattttactgcctggcacattgtgtatagatgttggtcatatagccccaggcccctttagttaaaagagacagtgttttgtggctttttgctcgcacatacttataaatcaccccccggaaatccagaatagcttggataatgatatgaaccttaactacgaatttaacagtctgtaacagcatctagcagttttagtttattactgtcccaatgggagaaaggagaaaaaaaacagcataagaaacaagctaataaatttgtttttaaaacccagcatcctcctcccttccttcagcaaatgttgtaaattctgggcatttatagtttgcttgaggaagcaagctcaatgtcaaaagtgttttaatagcctttgatttactttttaagtgcttattagcatgattgatgatagtgttttgaagtcaatcacagacttgggagagatgggaacttcacagccatcttcccactggctggatgtgtgtattggttgrtttggtttggtttggtttggggaggacctacaagcacagaagggactcaacttgtattttcttttctctgtgagtggcaggtggctcttatttttcacttttgcctcctaaaagaatgtagcaactcaaggacatttcttaggctcctgtccctcagatgcccagttccaatggccacctgctgagtgagatttgagtggcctgctctgggggcttcaccctgccttcagcatttacaggaaaaatgatctttctgtgtgaagttatgagctgagacaagaactagtactccattttgcatgcgttaaagttctactgaaaagctcascaggagttgaagcaataattggcttgagtttgcatttgttcatgccataataacctcctcaccatacacagcacccagctacgaaacccttgtctccttaatagatagaattaagttgcatttcatcctgtgctcattcaggaatccccaatagccagcataactgagaaagccgtagagtaggcttttgagatgtaaatactatcgcctccacatgaaaatccatgaagtcagttcctgggtctttacttacaagatatttaaatgaagaattggtgtattgcagttccagcagcacctttcttctctctaaatccagccacagtgttcatcaatgtgtttaataatgcctggggaggctttggttctggcattgaataatgaacattcgaagcgcccactgctttaaatactttctaaatttgtgtccctttctgtatgcaaaaggcaaatggacaagaaagagactttctttttctcactctgaagagaattgacatggaggagtttgtttaggaaatgacacctggtcaaagaaaagacactttagcaatgtaagccttgcgtttttttttttttctttgcagtccagtggcattgccattatcacacaggctcacgatctggcttttaatcagaactctatatgaatctttaaaaaaattcagcaatgcctggccgggcgcagtggctcatgcctgtaatcccagcactttgggaggctgaggcgggtggatcacgaggtctggagtttgagaccaacctggccaatatggtgaaacccccatctctactaaaaaaatacaaaaattagccgggcatggtggtgtgcgcctgtagtcccagctactcaggaggctgaggcaggagactcactggaacccaggaggtggaggttgcagtgagctgagattgcaccaatgcactccagcctgggcgacagaatgagactccattaaaaaacaaaacaaaacaaacaaacaaaaaaagcaatgcaggcactacaccaaggatgcatggggtagaaccaggaatctatattttatatttctttttgttttgcaatcagggcagaaaaccccagaaggattatacagtgatccttaatgcaatcacttagaaagtggtggtccgaaaattttgtgggcttaggtgctctgggrtacctattgaaatgcaaattccctggcaaacagagattctgattgctttaggttgggagtgagaatcagaaattcacactttaacaagatcttcccatgtaagaaataaaaggatcatctcrtaaaaaaaagcggtacaggtggactgtcaggggtgggcactattgtgttttgcttcgttttgttttgtttcatgttcagttattctgacttatgggatttggccaaactaagcacaataattggatttcattcttacttttctccatgctcagtaggtgcagccttaccgtctggccacagttaacctaaagtggcagaagaagcctttacttctgagcagcctttttttgtttgtttgtttgtttkttttttttttttgagacggagkctcaatctgtcgctcaggctggagtgcagtggcaggatctcagctcactgtaagctccacctcttgggttcacgctattctcctgtctcagcctcctgagtagctgggactacagatgcccgccacaacaccyggctaattttttgtattttttagtagagacggggtttctccatgttagccaggatggtcttgatctcctgacctcgtgatccacccacctcagcctcccaaagttctgggatcacaggcgtgagccaccacacccagtccctgagcagcttttaatataaactgatgcctgagtcccccgcttccaccaacagatcctaattaaattggtttgggatgggtcccagttattggcattgagaaaaatctccccatgtgaatctaatggacaaccagggttgagaaccactggtgtaagtactctgcaaagccacaggagttcttggatcagccgagaaatgccaggtgccaatgctgtgactgcaggtgctgacagtatttagtggggtcagtgacatcgcctgtggggactacgctgcccaatactgagttcgtgatcctggttctctggtactgatgcatgcagctaatctataaataggatagggctgaggctgtgtgactgaaaaaaaaaatatgaaatttaagaggagaagaaaaggacatttgcaggttttgttgtcctcagtggacacgagggtggtgttagctataccagcagtgacccccctgctactacagaagggaatctcaatgtgtcaccggatggtggtacactctgctgtaaatcctgagtgagacacatcaaccagggagcttatgaatgaaggacattcacttccctttgaaaagccagcttttctgttgttgaaagctaatctactggtgtcatcagtcgcaacaaagagttcttggacatttactgaaaattaacaccatgctttacagtttacagaatactttgacttgcattttcttccttgatctttacaagagatctgtgaactggtccaaatgaagcacctggagcttagagagtttaagtgatttacccaagaacaggcatcagaaatatataagacctagatgggatagtaattcaagtcttattattctgcttccaaatccaggtaattatcatagttgaaacgtggatagacagatttaaaatgttagttattgctacttatgcacattaagcaatgattaacggctcattagacctatgatgtcatagttattatcttagaacaaaactaagaaatatcgttgatttaaagaaaaaaattaaaagtgaacaatagcacgtgccatggtccaggatcaggtagaatcctgctggcagcacactgaaggaccatggatgggcaatactgctctggtcacattattattgtatgtgtatctttgttcagtagataataatttgatatgttcagtggaggaaaactgtgctattgaaaaacaactgtcaaattactagggmtgtttttgccttctgtgagcgacggttatattaacttatatcattggtaatgatctgtctggatactacacatttcttcagtgactgatgggatgagacctcttgtatgaccccctgtctaaggcaaacatttaagaggattaactctgcgccaggtgccagatgagcaccttttcctctcatttaagcttcatgcaaccccataatatgatactgtcattaactatataaaatgtggccctctctctcgcttgtgagctcgctcactctctatatatatatactgtctcacacacacacacacacacacacacacacacaatgtaaagagacggaggcatagaattgttaagtagattatcccaaatttcacatcagtaggaaatcagccttcttgtatccagagcccagttatcaactactttcttccacctcaactatatttaaaacttgttgcatgtgccaaggagagcaaaatcggatattagtttagaggtagaagccacagagaatagaattgctttgcattatatatttagataagttatttggccttgctgaaacagagaggcatggctattaaattccagtatgtaggtaagagtgagtgaaaattgctatatagcttttaaagtcattttcttgccatgatatacaacatggattcttccccactgtgacaagctctggagacttaaccattccccccatatcagcaaccacatgcatagcaatacctgcaatcatattgggtggataggtatcatttggtcagtgcatatgtgtgtgtgtatacgtgcatagatattgaggaaaggagaacgaatttcatggacagtggaggtccactggaggtgatttgtaaaagagatggagaaaccaggttggagccaaaaataatttaaaaaattaatcattcacagaatgcacacaactcttgggaaggatgtgggataaagggattttaagctgtcagctggatagataagcacacaccaccaccccctacttagacagtaatgcatagtaactaggaaaggcatgcccatatgctgttttgcagaggttaagtagagaaatgagaatgtgaatttcagagctggtctgatgcatggtctgggggcaaagaatccctctctctgtaaccatctgggtgtgagtctgcatttctacctctcaatttctattcctgagtatattctctctctctctctctctctctgtcatttgtattctccttccactctatacctatagctactttgcaaggaaaagatggtgacttgtgacaaaaggaaatgcattcttttcaccctagtgaaatcagcaagggtcctcagcatgagagcaatagattgagggcaagcaaggcagccaggcagccaggagaaaattgaatgcagtcctcaaagaccatatgttctgtggattttcaaaagcccgtgtcagaacctctctcccaaacatcaaggagcctaggataccacacccagtgaaggagaagggtggagagggcaaggaactgcttgcttagtggctgttgtgtggttagctgaggtgtgcatctcaagaaagagctgaccttggaagacaggcaaacatttcttcccaagaatctgaaggagcagagaagacagggaggatacaagtaccatgaagataaaaaaaaataatggagtaaatggacagtttaaagatggctgaagaaacagaaattgggtggtggaggctgaagatgcctagggcagattttaatggcttccatagatgtagattggattcgttcttgaagtcaccaatgaactgctcagaggctgactgggaaaagcggagctgtgcagcctgctcacgtagggtagtttccattgcctcaaagagcgccgttctgtggcaggcttcctccattgttaatggcatgctgtgtgtaagggctgctgggctcttgggaaagaatggacagaatggataatgaatcccactgaagatgcatccagcttgggccttgcaggggacacattcccccgagcagagcttcagccatagctctcttcagctgtggctgaatccragaaagttctgtcatccacaccagcccagagaggggacagaagtcattcattccagcccagagaagggacaaaaatgctcattagaataaaagaggatccagcggagggctcctggaaactatcagtgttgataggctgttacatcagcttcaagtttgacatctatattctacgtaatggtgtgctcatgaaacttcttagaacaactcaatggtaaaaactcctaacccgtatttaagacatatgccagttaggaagttaggacaaggggtgctggcatatgcccacagctcataacccgtggaactgttacccgacaacattagggaaaaaaaatgaaaatacttgagtgtgacactatatcagctgccatttagagtccagggattcaaatccatagagggacatataaatacatacatataagaaatgacatatagtcctgacctgtatagagagatctctacccagaaaaatggtcattaagaacttaaggcaccatatgctgagtgacaaatgatggatacttttaagatgtcagagaaaggataatggtctgtggctattaataaaactctcccaagaaagtaatttcagtattaatagagtttctgtatatgtgatgtaattttttttttttttgagtgcagtggtgtgatctcggctcactgcaacctccacctcctaggttcaagcgattctcctgcctcagcctcccaagtagctgggactataggtgcgcaccaccatgcctggctaatttttgtatttttggtagagacagattttctccatgttggtcgggctggtctcaaactcctgacttcaggtgatccaccctcctcggcctcccaaagtgttgggattacaggtgtgagccaccgcacctaaccgtgacataattttttaacattattcatggatactcatttttgtcatcaaaataagaacatatttactaatttgctgattatcagagtaatatttacttatttttaagacttcaatattaaaataattgaaataatatagaatccactgtaatcttagcaccttcagataaaaactgttaatctttaggtatatatacttcctttttttctgtatgtatggacacaagtagttagtttaatgacaatatatttgaactgtatcctttatttcttctcctatcagtgtgtactaatcgtattttcatgtcagtcagtatgaatctatattattttaatatgtcacaatatttaatgggtatgtcataaaatatttattggaattcctattattaagcattagtttctttccagtgtgttattactgtatgtaatactgggataaaacccattgacctagcaaagtcactgctaggaaataataagaaaatcttgcaaagattctgcaaaaccatgtacacagttactctccagaacagttgcactaaatatgcatctactggcaagttatttgggtgcctgtttccccacacacttggcagcaatgagtattatcattctttttcaatctttgtcaatatgttagcttggaagaaaaagcacagtgaaatagcattgttttaggtctataatacctttattgtgtctggatgctgattctttgatattacagcaacttagtccatggcacatttcctcaaccaagtactcagccccttccctgggtgttacagttgaacatcccatactctattgatgacagatgctttggaatccaagcagaacatttaatttatgtatctggattctcaggtttgtatctgaactcagactcacctgttattgttctaattaagttatagtcatgatatggtttggctgtgtccccacccagatcccaactggaattgtatctcccagaattcccacgtgttgtggaagggacccaggggaaggtaattcaatcatgggggccagtctttcctgtgctattctggggatagtgaataagtcttgcgagatctgatgggtttattaggtgtttctgcttttgcttcttccttattttctcttgctgctgccgtgtaagaagtgcctttcacctcccaccgtgattctgactgaggcctcctcagtcatgtggaactgtaagtcaaattaaacctctttttctggccagccacggtggctcacacctgtaatcccagcactttgggaggccgaggccggcagatcacctgaggtcaggagttcaagaccagcctggccaacatggcaaatcctgtctcttcgaaaaatacaaaaattagccaggcgtggtggtgggcacctgtaatcccagctatttgggaggctgaggcaggagaattgcttgaacccaggcggctgagcttgcagtgagccgagagcatgccagtgccctccagcctgggcaacagagtgtctcaaaacaaacaaataaacaaacaaaaacctctttttctctttttcttcccagtcttgggtatgtctttatcagcagcatgaaaacggactaatacaagtggttaaacctaaaagttttcccaaaggatgaaagagtgttgatgtgaggtagatgagattgagttatgagaggatagaaattaagttagttatgacctcagagatagtacaaaaagtttgcagattatcagagagactgataatacattatgggattgttttaaagctaattagagccttttaattctaaaattcagtgtttcaatgtttgatagagttagcagacatgcgataacatttatcattctgatatacatacaaatgcatacaggcacacttgtgtaaacatgcaccctctgcttgtgttattgagggagaaggtgagactcacagaagtggagattggaccaaagccaaatgatgtagtattggaaaaacagccctaaccctctcagcttgttttgcaaatgttttcctttctattataactattttaattagaaaattacctggaaatgaaatttatgtatgtttaaatcacttgcaaaatagccatccactacaaacttttcttgaacagggcaatgtagggaggaggaaagaatagttttctaattatgggacaagaatagttttatagtcttgctccacaattctggtaacatttaaaaatttttctttattatattttggcaatatcttttttcttagaaatgtatttattccacctagattttcaaatatatcaacatggaattgaaaagaggaatctatttataatttaaagattgtgcatttatcttttccttctccaacttaattttctaaataaattcaccaggttcatacattaatgcttaatatagtatactaattatgttttcctaagaaacaactcttggatttatttagcaatttggtatttttcttttatttttccttctctaaatcaaccttttctgcctttacttttatttgcttcctcctgctattttagaattgtggttatttttctactttcttcaattaaatatttactttttaactttattatgaaagtatttaaagttaaacatgtattcatctacacagtagagttgtgttatattccgtttttgacagcaatrtttgcattttcattattttctaattagtctgtaattgcagttattatttcctctttcaatagtttttgtagggcatttttgatttctaacattgtttttatttaagatgtgtttaattacgtaatttgacttcttgaagttagtaaattaacattgctagtacagaagtcctcattgccaacttttcctcttagtctagatggaatatctcaatacaaatgggccaaaacgggtctatcagttggatccatttgtgggataattaggtaagatttttctaaacatggcatagtttagctaaaatcttacttagatagtttagctgcactccgccacgtagctgtgcatctttttatgactttgtgcgtttgtccaaagtatgggatggaggtctggatgccctgacagttaatgatctatyccaagtctcagtttaggcaccaggcttgctctcctcaacaatcctctacaatcctcacacacccagagctgtgatttttttccccatcagtagatgcccatggtacttacatgcattcctctctgtggcactttttgtttttccccttttggggctgagccattgatatgtatatttcctttcctccagtagaaggtaaattcccagaaggcccttatgtgtcttgattagagctgaagatattcaatgaccataaaaaacacgaagtaaaagtttgttaaataaacatttagaccaagtctaacttttaaatttggtataaatctgctaaatttggcaaattccatgaccacctataagataaataatgatattagatctgtatactgaggatattcctagtatcaactactgaaagtattctggagagaaatttaaaggagctggattatatctatgatttcagtagcaacttcataaacttaggcgttgccaattaatttatctctgtttcatctataagcacaaaacagctgtgtttttcaagagataagarttctgattgctggattctaagtgaggattgagggaagaaggatgatttttctaagtcattataaggaaagcagtggtaatgatgcaacccatcatttgtttcagagagaccacaataaacaggcaaataaaactattttgtcccatgcatacaagcatggacataaattatgagatttgcaaatatctacagactagtacctaaagcagaaccaaccaaagcagaaagaaaacattttcccaagctaatgcaaaatctcatagtaagtagaatttgatccctttgtcctactgagaatgttgttattaatgtaatttaaaggtaattaaaaatacatttggtttcttgttgctttcccttcaaaatcgtcactcttttcttttctctgaaaaagtcctgctgagtcagtttgatcttccaaaacaaacaatgttcattaatttacaaaatttcaggcaaatttgttgattatggagagatgatggtgtcggaaattaacacagagccaagtaacaataggattgtcttggactgtagatttatattctgtaacatttgttctgctgcaactcttggagaggacaagaaacaactggcactcacagtaaacctcttttttctcagtcaggaaagcaattcattaccagatgtatggccttggctttactgctttgtatacttgtcaactgccattttaatggaaaccgcaaaaacaaatgctttcataagagtccatgaatccttagaattagcaaatgcccatgaaccacaagactctccaatggtggatgttatggttggaaacattaaaatggagaaaggaagcatgaaccctccagatttggaggatgaattaggcaaagagagcactacataaattattttgttttaccagctaattattttgttattattatttttgagacagagtcttgctctgtcacacaggatggagtgcagtggcgtgatctccattcactgcaacctccacctcctgagttcaagcgattctcctaactcagcctcctgagtagctgggattacaggcacctgccatcacacctggataattttttgtatttttagtagaggcacggtttcaccatgttagccaggatgatctcaatctcctgaccttgtgatccactcgccttggcctcccaaagtgctgggattataggcgtgagccactgcatctggcccagtaattttaatttaatccctggtgtcttgttatgcaggaataaccacctataggtttaattcctaagtatagcaaattcatgttttaaaataacttcatgtaaatataaaaagtatgcatgcatattttatacatgtaaataaaaaggtaacccataagaccaccaccagttatacctatgaatctcttcatgtgattttcttttatcttgatttattaatatttaaaataagttcatgccatatatgaaattataagccgtgcattttttaagctctctatattattttctcatgccattttttagttttcaaaatctcaaactttaatgtttaagtattctaatgtatggttaaatcatttatttctttttcttgtcttaatgggcatgtggtgatttctttttaattagctattataaataatattttgataattttcaagacaaatttttgttgtatgtaagtatatatgggtgtgagttgtattcttaaggcaaatccatggggggaagatactggactaaaggttagggactattttaaaaattgctaggtcaagttgagggtctgtatcaagaaacctattataaaatgccaaatgcattttcaaatagatttcaccaatttatactctcattgatattataccagagtgcctattttactaattacatgagtattgtacattatcatattttagtatttgctaatattgtgatagaatagtaaaatctaatttttttttttttgagacagagtctcgctctgtcacccaaactagagtgcagtggcgcratctctgcttacttcaagctctacctcctggggtcatgccattctcctgcctcagcctcccgagtagctgggactacaggtgcccgccaccatgcctggctaatttttttgtatatttaataaaggcagggtttcaccgtgttagccaggatggtctccatctcctgacctcgtgatccacccacctcggcctcccaaagtgctgggattacaggcatgagccacctcgcccggccagtaaaatctaattttttaaactttgtggccagggacagtggctcatccctgtaattctaccactttcagaggccaaggtgagcagatcacttgagctcagagtcagagaccagcctgggcaacatggtgaaaccccatctctacaaaaaatacaaaacaattagccaggcatagtggcacatgcctttagtctcaggtactttgggaggctgaggcaggaggatcacttgaacccagtagtttgaggctgcagtgagccgagatcatgccactgcactccagcctgggtgacaaagtgagacactgcctcaaaacaaaacaaaaccaaaaaactgcatacctttaatttttataaagttgaacaccttgatgtgttttcctctccattatttatgttgtagataaatttctgtctcttacgtagctttctaccatgtctggtttgcataaaaattacaaaacaaaataaaaaaaactatagaaatgtacttttgctttgtgcattgcattgggctgctttctaatacctgtgaattaatccctcctatcctgggtaatcacaatggcaaccctgttcctgctgactcccttgagtgatctctgtgttattttagggaaaagtttagtttaccactctactgagttgccaggctcagctattttaggtgctgggctataatccttctccagagggctgccttttgaatcaagggcaccatcagccactgatatgtgagcattttcattaatgatgctaaagagatcagaagaagaaagttagtgggaaaaaagcacacacacacacaaaccaaaaccaaaatatgcagacaagtttatgatagattgtcctttcaatgacatgctctaaatttaccgaattttaacctatctgtgcctcagctccctcatctgtgtaataaggatgatatgaattcctacttcactgagttatataattgtttttaaacttaaaaacatagtattggatactgtcttagtcgagttcaaccagaaacagattatgagggtaggatttggatataagtcatttatttgcaagacaacccctgaaaataaagtttggagagtggggaagttagggatggaatgtcagccaacgttacggagccactggagccattcaccagtggggatgattgaagcttaatctcactgtgaaagtgtaggagtcagtgtagagcacacctctgagttatcctataggagggatgtatttatataacctctttttggccattggttgagggctgctacagtgagtgttaattcacctgcatgtgctgtctgactctgtaatcactgaaggggagcgagactcttgcaactagagaaaagccacagagagcagtagggctattaataggatataagtggacattgtatactgtataatcaaaagcaatatagcttttgatttcaattctattaaacaggcattgttaccagacacagggaaaggtaccggggatataatggctgagacatgggctctgaactcaagtagctcatacttttgtttttacaaacagagaagtaagccaacagtgtggtaagcgttcactgtttcaaatgcaaaaacaggatgtaatgaaaattcataggaagagcaatcatgagaattcttgacggaaaatatgcctatttagtgtgcggtttgggaaggatggtcccaagggagatgtcccttgagcttcttttctgaggtttgaggagtaggtaatagccttgcagagaaggaagagayggacatctcatggaggaaaaaaatatgtgtgtgtgtatgtacatacacacatacatatacgtatataatatatagagaggaagagtgcaaaaggatggaatagtgaaataacatggcttattctgctatttacatgtaaccctgtatacttggaaggaagcattcatttgggcaagtggtaattgttgaatctaaagatccatgctggtgccaggaacttatgaaggaagttaagggattttgaatctatcttgaaagcccttgggagtcattaaaagactctacacagaaagatcttcgagggacatttggaagatactttgtggaaatgcagccctggaagcatagagaccagttcagaggctactgtaaaaattttggacaaaaaaaaaaaaaaaaaaaaagccctggtggcaggatggatttaagtaatagtaaacaggtggaatgaaaaggaagtaagtgagatggcgcagccctggatgatttttagaacttcagactagacaactgacttcatagtcccgcagcttatccacatggggtgctggagagagagttggacgcttttgaggggagaggactgggacatgtaatagggcaggatgttgcttatttatctttctttaggatccaccattccttcccttactcttctcctattaatgcctagtttagttctcagtctacatagagaatgttttayttttcttgccaaacccatattgttaaatccccagggcttagtgaggaattcagagagggaacttcatggctgccacttgggttcatgtgactgacaggaagagcaaatgtgttagaatagggttggcttataactattacagaaaaaaatatggcttggttctgtgttctcagcactaccacgttctactggtaggactttggaatgggtccttcactacctggaaagattattttgagaaatgaatgatttatggagtaagaatccacctggtaaaccactaaggaccatgtaaatctaaaatcaattaatctataaactagagaaagaaattaggccaaaacccagcactattctgaccaaagaagtcaagaccaggcagtgagttcctttacttaggagctggggacagaatataaataaatgggcctttgggtttgtgggaaaaggwgataataaagataaaggcaacaatgaatggcttggaatggaaaaagaaccatcagaattgatcattacaattaggagctatttctttgggaaaaaataaggaaaacccaagagggaataaggagaatgatataatcaggctggcagccctgtgtcttccactcccccacaagtctggctccagctgctgtcagccacaccacctacatcttctcagcagcgtatcctagatttgcaccctgacagctacccctgaccccctacgcaaaaattatcttttgatcagtgacagtggccatttgtttgatgctgggaggtttccagtgccatgctcatttcggaatggttgaaatggttctcttttcgtgagtaaacagaggaagaagattatgacacaggtggttaactggttcctaatgtacctgtaaaactcctgcatagaaagcccagcagaaggacagcagtcctgccgatgttggctgtcagacatctaattaggtgggagggtgattagcaggctctgctgtaagtgggtttattttaatagatgtttttaggacatcattgggcagaacagtatctgatcagcatgggtttaaagaaatctgaagagcaaaatgacaagactggaattagaaacatggagacagtttcaaaacctttccatatagaaccaggagaataaggggatttcacattgccctaagagcttgagattacaaccacggcattgctcttttgaaagagctgtggaaataaacatcgtcaggcaatgttttccagttgaaagcaacaacaatccactctggctgttttcactgaaggggaatttatctgcaggataactgatgtttacagaatcgccatgggtcccagcgaaggaatggccagtggccaaggctgcaccagaggactgaaaaataggaaccttaacaagtcaggatgctgtttagcaaatgcctagacaccgaatgtttgttccattcttatgtttctcaaagttcaaagtcctgagctcacgtgtaccattgactaagcgttggttacagtctcactctgtggctctgcatagtggaaggacaaggattttggcccctttagttctggcccctattcatgacatttttttttttagtgatagagaggttaatttcctgaaaggaaatttgagtgttgggaaggaataatggcttttgagtcacatacacaagcacacatacatgtacacacacagatacccagaggtgaatttccagtgtggaaatggtatggaggtgttggaaaaacccaaccacaaaagctgatgtttttatgatgggattgtaaaatattaagatgtcaggccaaggagaagtgaatagaaaaggtatatcttttttttaatgtaggacacacattaaggataagctgaaagataraggatcctaaaaggcaacagcaaattgatcatggacaataaattctaaaaacctttgtcatttctggaccaatgcacataaacagttttgggggccaggtatggtggcttatgcctgtaatcacagcactttgggaggttgaggcaggaggattgcttgagtctagagaactgtgatgacaccactgcactccagcctgggcaacagagcaagaccctgcctttaaaaaacaaacaaaacaggccaggcgaggtggctcatgcctgtaatcccagcactttgggaggccgaggtgggcggatcacgaggtcaggagatcaagaccacagtgaaaccccgtctctactaaaaaaatacaaaaaaattagccgggcgcggtggcaggcgcctgtagtcccagctactcgggaggctgaggcaggagaatggcgtgaacccgggaggtggagcttgcagtgagccgagattgcaccactgcactccagcctgggagacagagcaagactccatctcaaaaaaaaaaaaaaaaaaacagtatttggtgcatagattatggaaatggagtgagtaatgtgtcagaacatctgaacctgtgaccttgagtcatttcatctctccctgtgaactctaacactgagcttcagttatataaagtgttaatatttgtaatatgttatgggttggtgctttagttggggaaagtttccagggagagtggatctagtgtgtcaaagttcattttaatctgttttgtaaaacaatgtaaaaaacatataacctaaaattaaccatcttaattccatcttatccatttctaactgtacaattcactagtgttacatatattcacattgttttgaagcagatcttaaaaaaattttcatcttgtaaatttcaaactctgtatccattaagtaactgtcttttctcccctacccctaatccctaggagccactattctacttttcatttctttttttttttttttttttgagacaaagtctcactctgtcacccaggctggagtgcagtggcgcaatcttggctcactgcaacccctgtctcctgggttcaagcaattctcgtgcctcagcctcctgagtagctaggatcacaggcatctgccaccacactgagctactttctatatttttagtagagatgaggtttcaccatgttggtcaggctggtctcaaactcctgacttcaggtgatccacccgccttggcctcccaaagtgctaggaatacaggcatgagccactgcacycggcctctacttttcatttctatgaatttgactactttagatacctcatgtaagtagaatcatacagtgtttgtgtttgtgtaactggcttatttcacttagcataatgtcgccaagttccatctatgttctaacatgtttcagaattttcttcctttgtaaggctaaatattatatgtatgtaggcatatatatatatayacacacacacatatatatatgtttgtgtacacatatatgtatatgtatgataacattttgtccattcatcagtgagtagttgagttgctattgttggctattgttggctattgttgctataaacgtgggcatgcaaatatccctttgagactctgtttggacatacacctaagagtgggattactggatcaaatggcaattctatttttaattttttaaggaacctccataccattttccatagtggttgtaccgttttgtagtctcaccaacattatgcaagtgttccagtttctccacatcctctccaatttattttattattagtagtagtatttttgagacagagtcttactgtgtctcccaggctggagtgcggtagcacaatcttagctcactgcaacctcttcctcctgggttcaagcgattcacctgcctcagcctcccaagtagctaggactgcaggtgcacgccaccatgcccggctaatttttgtatgtttagtagagaccaggttttaccatgtttgtcaggctggtcttgaactcctgacctcaggtgatctgcccacctmagcctcccaaagtgctgggattacaggcatgagtcaccacacctggtcatctccaatttatttttaccttttaaacaaaacctaaaaatcacaggtcatgcatagaattaatgagggtctaaggtaagtgaggacctctagcacagctgtttcatatcatttcctaggaattccagatgtttcaaaacccctgctacaaagggaagggacagagaaagcacaaaacggacttgaggaaggtgagcaggaaatcatctaactgtgaggtcttagcactcatctgacagatgaagtagggtgagtacagtatgaaagcttgactaggccaaatttacctggttttcttcatcaggaattctcccagttgacatctggtttatatcaatcatgaaaaaagctaatatgttggggtacttacaaaaaaatactcatgtaatcctctcaaatgccaaataatgtgtttactctcattatccccattccgtcagttgagaaagccaaggcttgtgacaaaactgtttactcaagattacactgtttctgaactagccagaactcctggctttcttctagaatttaggatccttggcaatgtcagcaatgtgataaaataacaagtcttttttttattttaccagcttagaaagcctgtttttctggtactacatgtacctaaaactaagtataaccttgtttgaaactcatgagcaactgcttttcttagtggaaactgtcagattgatggcttcctcagttcctcatcttccttcattggctaygcgagtttattccacacagcacttataactctaccatggaggtctccagcatttctgctgtcagccttggggtttatttttgtatatctacttcttttaggacctgcctgagatcaccagatctcatttaataaagatggtctgtttagcccttataattcctttagactgctgtcaacatggattggaactaatgtctttaaaaaaagaaaaaaaagttttctacccagaacatgtaacagcaaccttttccccttatctgcaccacagaggcctttctattctccctacacacacacacacacacacacacacacacacacacacgcacacgtgcgcgcgcgcrcacacacacacacatgcacacatrccccactaacttcctacatgctgacggattttcccaatttgctgttcattaagttacatcaactgtggaaataaaatatgtcacatgatcaaatgttattagataaaaacgaatttgccacctgctgcttccacccacccctctgggagagaaaaggaattgaatttgctgaaaaattctcctaatttgtattttttttcttttaagaagctccatatgtcagggagagagccacagctgtagtaagtagttgaaagtccatctctgttattaatgaaaaacttctgtgcaaataaaaagcttccattttataagataaacttcctgtttacttgcaaactcatgttttaatatcagaactgatgatgtattcaacctcatgctgctggccygaagagmtggagggataattatccatttttgaaggctatgaagtattgaataaaaatgtttagtttgtcatttgagctgaactccactctttctcctatttttttccactygcatttttttcctgtgaatcttctacaaaagaaaaaagaaattacctttcctcatgcactgaaatgatctgcagtaaccttctaataatttttgcatgcaacatgtggcaacatcatgttttaatttgaaagctgtttagagatgtttataattttcggtgtgtaaaattataccgcattgatttatttcatcattaacttatttatttcataattattgcatgtaatatatgccaggcattgtgctaggtgcagataatacatgaattatgagaagtacatagcccctgccctcagagagcttataggctaatarggaaaaaagaataaaaaataaatatagttaaatgtatgtgttgttataaaatctgagctaaactaaatgttttagatcaaaacaaatgtttctcattccttttgttggcttcatccattattatttttgaaggtatttattgaaggtgaccaaaagccctatgcttgggtgatgataggggaatggcaattgataaaagttttcaaggctggccacggtggctcacgcctgtattcccagcactttgggaggctgaggcgggtggatcacctgaggtcaggagttcgagaccagcctggccaacatggtgaaaccctgtctctactaaaaaaaaaaaatacaaaaaactagctgggcgtggtggcgggcacatgtaaccccagctactcgggaggctgaggcaggagaatagcttgaacctgggaggcggaggtggcagtgacttgagatcatgccattgcactccagtctgggcaaaaaaagcaaaactctatctcaaaaaaaaaaaaaaagggctttccaaatgcctcttttttttctgtgattttattgagtgagttttagacactataaaaaatacagttaaaatttttcatttgaaatgtgcagttcttagataacctattttggtaaatggagtttaatttatctggagacatgtagaagttagagggctggagacttgacttctttatttggccagtaatactacacactatgaactctggcagggttgaactatcctcatttatatttacatcttgcctaaagaagacttcatgaaaaattgtgaaataagtagaatgaatgtataaatgaatgaataaatgggtggataaatcatgggtcttgataaagtcccaacatatatgtatgtacaactttgttattcaaatttaaagctttgaactgtgaaaaaagtttggtaagtgcctacccagaagagtgaaatgtgctaggtgttctgtggagcataaaaattacacagtcgctgagctttccagttaatatgctgtgatggaaggcattgtccagagactatttgaagtaggtaaataaccacatctgtttaaactaagtcaaactccaggtgacttagaataaaaggttgtttacgaataagacaagtggattgcagttgcaatcctatttgaaccgttgtttaactctagggtcaccaaagagtgttggtgacttgttgacacgtgttcccatttgatttggcttcaagggaaatctcggtccatttcattcaatttcacatctgcagatcagcctagtagcaaactcatgtaggttataaaatgccaggaacctttgctctgagacatggagaaggctttgtgtgaagcatatttagggtcacgtgcaaatgtagtctggcatagaatgttacatttggagtgaattggtcagaattaaggcaattttgatgcttacccaattgagaacgctgtggtagaagaaggaatggtttacctcctgctccccagccctggaccctcacacgaaatgaaagaacagtacatttcttaagtgatttaggcatgggagtagattgtcaaaactacagcctgttaattctcctgtatgtctttatcaaactaaaaatggattggtttagttgaagccctaaattaagacaaaaatcttctttgatgctgattccttttggtcttttttaatctttattctgtgtaattgtcaaagaggatcattatactcagtttaaagaagatccctggcagggtgccgtggttcatgcctgtaatctcagtgacttggaaggccaaagtgggaggatcacttgagcccaggaattcgaggttatagtgagctatggtgatgccactgcacttcagccagggcaacagagcaaggtcttttctcaaaaaaaaaaaaagaattcccattgaaacttctgattactttgttgtcttgacataggtcaagagaacaggaaactcaaatctgtccattcattcatatatttgatacctactcaatactcactgtacaaggggtattttcattgattctgatcactctatcaactttttgctaacttgttgttcatctaaaaatactttttcttcagatttctaaggggccaccggttattagcacaatttacaggtgcactataaaaacagcttcctatcccctccagaccaatcatcagcttgattaatttcatcaagtactccagtgtgacagttcatcctaattaataatattctgtttcttagcactcttaggacctagatatttttgttatgtaaagtaatacgggaaccatgttgctttactgttcctgaaggcctgggggttactcaagtaggggataaattcagaagatatgttccactaagagtgagtcagagaagaaaatgtatcataaatactactagaggaattatccttgaatcaggaacacatgttgtttgctgctctttttgctggagctgtcatggttactataaagtagaatcgatgctctgaactctgcttcataggattatttattcaattcctattgagatgtggtctcaagcttttacttttagcatgatttcccagttaaaaaaaaaaaawtgtatgtatataaatgtaaaaccacaaatggtgccagtaactgacattccactttggttcatagaggtacaaacagggccaatgttagggctctctacatcgtaagccacgagtggatttgttaatttcaaaacttctggtaacttaagaattgagacgagtcccttgtgtttctattcagcattctcccctagtagcccactgatttatttgaccagtttctgttcctttgtcttcctaagatgtcatttagaaaagttttcccatcactaatgcctctcagggctgattttacatactcatcgctagcgatcacattttaattatatagacctttgtttttttttctcctttttaataaggctccactgaggaaattttcccctttctaggtatgatcaggttgtcagatcaattaaggtaattgatggcagtcttatcacattccttaatcaagagtgtagccattttattagaggaaaacaatccctagattatttagagatagaaaaaaaggttcaatctttgtaaatggtgagtggggagagggagagaaagacaacctgaaatgtcagagttcccagtgagaaagggaaatgggagggaaatagccaagggttttcagtcaacaaggaagaatagtgcataaaattaattgtgcatcagaatcactttgagtgattatttaaaatgcagacttctgcttgccatcccggtaactttactatgtttgtggtagaacccagaagtctgtatttttacaaaaaccccagataatttacccttaggttgttccattgcctgctgcactttgagaaatagtagtgtaattgagaaatagtagtgtaaagtcatcagaagagcagggtgtcctaatatcaagctaggtctagggaagtgctttttttttttttttttttttttatttgagacgtagtctcactctgtcacccaggctggagtacagtggcgcgatctcggctcactgcaagctcygcctcccgggttcacgctattctgctgcctcagcctcccgagtagctgggactaccgcccgaccaatttatttgtacttttagtagagacagggttttaccgtgttagcaaggatggtcttgatctcctgacctggtgatctgcctgccttggcctcccaaagtgctgggattacaggtgtgagccactgtgcccggctaatttttttgtatgtttagtagagacggggtttcacctgtgtcagccaggttgctcttgatctcctgaccttgtgatctgcccacctcggcctcccaaagtgctgggattacaggcatgagccaccgtgcctggccgggaagtgctttttataccttaatagacacacaaattacctggggctctcttttgttatggatggtgtatggtgtgagagtctatacttctaatgagctcccaggtgacgccattgttgctggtcagtggagcacatttggggtggtaaggccctacaattgctgtctgtttttcttggttccttggtgctgtgctgaaaagagagttggcaggggcattggctaggttgtatgtccattacggcactaagtgtcttgaggcaaggagattgagctttctgccaagcttttggctgcctggggaaccagagaagaggatgcttaacctagtatctcaaaaagtaacaacttgcctttccccgtatttctgtgaacctgtagaaaattgtttctaatttctgaatacttttgagtaaagacaagtattctttctacaaaaaattttacctcctattgaaaaaaagcgtttattggaatgaccttgatgtttttcacatctttattcccagtagttttttgtgtcacataaacctttctaaaaccgcaccttgtgattttaaatactttcaaattttacagatgctttcacatctgtggttaattagtttatccagcgtaaactccgttccattcctgcagtggctggcacaatgtttggagcaaggtctaggacatagattctcctactcttaccagcttacaatctgaggatataagataccatttcatgctttgcactgttggttatatttatcttttgacatgcaaataggatattcattccagttggagagtaggttatttccatttgagatggttatcgaagtgacacttaaattggtcacggaatagaaacctgtgaagccaacaaggcacgttattactaccctcattttatgtaatgtaaccaaggctaattgatttcccactagtaaaaccaggatagaaaactttcattcaagaaatatttattggtcatctatggtttccaggtacttagctaaatactgaccctacttttatggtaaatagggccgtcttggttcttttgcttattttgatgatagtcttgatattttcttcttttccagtgctgtttctatcatgaaaaaaatgttaaaggcacgaacctccttaatgtacaggcaccagcaccaaataccttccaattgttgagcagcctcagtcagtttgatcttataaggagactatgaagttagaaggcctgagacttaacttctgtattgggccaatagtattttacttttttttcttttccatttattctataaactattacctcaaatcagcttctgaagaatggaagaatagtttgtgttccatatttttctataaaaacccaaagaacgttctcagattctatttcacttatccgtatgacaccatggattgcagagaggagccagtactgtcgccatttatagttggcaagactaaggcccaaggagttgggaatttggaatttgcttcatgttacataataagtcaatgatagagggaagagtaacctgttcaggtgagcatgcagtttgcagctttgtctacgtagtcactccatcttcagttagagtgtatctgtatgcaacagaaagaatacagaatactgtgtatatcaataagttgcccacaggttagaaaacaatgtatttgtaatgaaaaaataatagtcatgtaaacattacagaatgtagcttaagaaagcaaatttccaaagtcttcaatactagatccttttaagagtgattctgtaactgtcagtgcaggagtatgttttaagctaattatttgtcttactgctaataattaccacttattgaaaggctattttctaagcactttatatatgcttytttattaggaggttatatttatttatttatttttgagatggagtcttgctccatcgtgtaggctggagtagagtggcgtgatctccgctcactgcaacctctgcctcctgggttcaagtgattctcctgcctcagcctcctgaggttatatttgaacttatagtctctataccaaagtaataacatttttcattttctgataactctctaatccatctaaaattactgaatgtcaggcatgattttgccatcttgatttcyattttttaacccaaaatactgtaaagatgtgaattattgctaagttcaaatagtgatattgtttcaaaataatattcattaacatattttaaatgtcattttcattttaatgtatcaacagttgcttagttttaacaatttgttgaatgttattacatgtattgaaaaagcacaattatggccagttgttaaacaatatattaatattaattagtgataatacattaatactgtctcatgtgactgatgtgtgctttcactggtactctgttggtgtttatgawtctgttggtaagacttgttgtaattgatatttctactctgtttcagaagccatcaactctcatttatgaagaccattatattttcaaggtcacagtctctaggtccctggtcttctttttctaaacattctctgcttagtgcctggcatagtcctgggcacatgatagcttaataaataactgctggttgctgaagacaactactctagcctttcctttgctcagttatttgtatcgtctaatacatttgaacttccatgttacactttcacagtagaaacttccacttaaatctgtctgagctttatggcattatagggtctggattctagaaagagaatggatctgctgcatagcttttctgtatgtgtgaatgttggtacatttagtttacttctaatgaatgatacctgcagagtaggtattcaggatctttaataacatccatccttcttccttctttcctgaccagcctggtaaggttgagttgcaatgagctgaacagatcgatagtaatcacagggtacttggaaaagacagcctcctctataatcttgggacagcttagttagtgttgtcactcaacccaagataacagagagtgtgtgtgtgtgtgatgtttgattctaagaattactaagaattactaatttctggaagaaatccaggaaaataatgtagaaaataatccaccatggtgtattagtccatttttatgttgctgataaacacatacttgagactgggtaatcaatacagagaaagagggttttgggttttgttgttgttgttgttgttgttttgaaacagagtctcactcttgtcacccaggctgtagtgcagtggtgtgatcttggctcacagcagcctccacctcctgggttcaagtgcttctcctgcctcagcctcctgagtagctgggattacaggtgcctgctaccatgccaggctaatttttgtacttttagtagaaatggggtttcaccatgttggccaggctggtctggaactcctgacctcaggtgatccgctcaccttggcctcccaaagtgctgggattacaggagtgagccactgcacctggccaagaaagaggtttaatggactcacagttgcacatggctagaggggcctcacaatcatgggggaaggtgaaaggcacgtcttatgtggtgacaggcaaaaagggaatgagagccaagcaaaaggcatttccccttataaagccatcagttctcgtgagacttattcactaccatgagagcagtatgggggaaaccattcccgtgatttaattatcttccacctggtccctcccataagacatgggaattataggagctacaattcaagatgagatttggggggggacacagccaaacaatatcacatggctaccattaccttttcttacactatattagaagatacgcatgtaaatcatacattgagcatccttgcttcccctattctgaggctgcctgttccttcactgtcctccagatagccctgttagttgttcacgtttcctgcaacaatgaaagaagagttcttgtaagacctgccaaatctctttcctttgctgctgacctcatgggcaaaaatcatttttagatgtttggccatgaattcttttcttcagactaaattatgaagcattcaataattgagatccaaaaaggagagaaaccagaacatccagttctatttgatctgaggctgactagaggaaattgaaaactaattttttctttcccctttcttcaagttccccccccccaattttctccttaaaaactttattatatttctaaaaaaaatcatacatacagttgaaaattagaaaatacagagaagcaagaagaaaaaattatatgattattgtagcacttagcctctatttatctgtctaaattggctatttacaatatccttcttgttttgtaaagccttccacagaaattctaaacaacatagattttctactatccaaaatcacacactgtcttcagtataacaagggatccatgattttatcagtctttatccttgatgattacatgttaatttctaattgctcaggtgcttttgtatcccagtgaaactcaagcttcagtaaargtttaggccctgccctgacttctttcctagtaatagatgttcacatacttataccattgaattgattttactcaaaatccagtaagacagtgttttattttgttttttcattgccactatgagatagatcactttttagtatgaaaaaaaattctaactattggataaacattcaagtcttcttttaaaaacttctcaattatgattttttttgggcagggtggcagttttmctaattgacaaccgctggtgatattcagcattgaaagtgttcacgcagcagacaagtggaggagaatttaatttgtctggtatgggctttaactgacaaatgttagaaattgaccttttcaatggaaatttacttggaagtcctaagtgaagctctgctttaagctaaatttgtcaccaagacatgattaaattctcttaaatgtagatcaattgcacatattattaatgggaattgaaatctccctaaatggtgtccataaatttaaaagaaaaaaaaaatagaatgtgaaggttaaggtgcctcatttgctgagtgggaaagctttcccagaatataagacaaaagacaatctttgatgcttccagagaaaggtggttatagcttagataatcttacgttatctcagcactctatttgagaggaagttgttttttccacaataggctgtggctagactattcaaaatcttgtaaaaaggaatttaatgcttaaattttcatatcagtggaatccaagagccttagttctcacagaacattgcgggagtgccatgaatatagttacaatgagagaaagaaagaaggagagaggaaaagaggaaataagagaagacagagtaagtttttacagctttcccagatgctaagtagtttacagaattagggagaggaagcaaggttgtagatatatattaaggcttgagaaatgacttatgttctcagcaaaaaaaataacaatctattggctcagaactctagctatgggtgtattatgaattttgagcaagactgtaccggactgcagatgccaacatataaaaatagtgaacaagccaggttcttcctgctgtgacactgtatgaaaggtcaacttacctgtgcaagatcagaaacatcatcgttttcttttccctggtgagtcagagaagcttaagtcaaagaaatgagtagagctggcaatagmtatacaaccaagaccattggttaatagatttgaaggccgggcgtggtggctcacgcctgtaatcctaccactctgggaggctgaggcgggtggatcacgaggtcaggagatcgagaccatcctggctaacatggtgaaaccccgtctctactaaaaatacaacaataaaattagccaggtggcaggcacctgtagtctcagctatgcgggaggctgaggcgggagaatagcgtgaactcaggaggcggagcttgcagtgagccgagatcgtgccactgcactccagcctgggtgatagagcaagactccgtctcaaaaaaaaaaaaaaatacatttgctaattatatttttaaatgatgttgcactttagctcctatggcccccattcagtctttgagcatggcgtagaatctgcaagatcgaagggtaaaagaaaaaatctatgaagattttattaacattcctgacaacatatgctaaacttataaacctcacccgtcattcagaagcactttgaaggcctataacatgcttatgttggtcatacgtgtatctcaggtcggctacaagtgggtcttctaaaatcaaatcaaattgaaaaccatctgactctgaaatgccagtggctttctacaaatggtgaggaaaacatactggatggatatctccaaagatgctgggacaccttctgtagaacctcttctaggtctttcaacaatcatttctgcaatcatacggcttttgtagtcgaaatgttatataatgtgtatgtggggatggtcattcagtgtgatcagaatggaacctgattctatgaaagttttgctggggttttgtgtttgtttttgaaatggagtcattcagtgttccacctcaacaatcatcaggaggttgtcaagtgcagagccccaaatccaagcctgtgctgcgtctccatccaatgtaattcatggttaatctcattcttattaaaattctctagtgaatccctttgtaaggaaaaccactgttttggttttgtttttgtgtttttgtccccgcctccacacaaatagattgtgtgtgtatgtgtgtgtgtgagtgtgagtgtgcgtgtgtaatctcaggttaaaaagctaaaaagtcagcaactaggaattttagcctaaagtatctagactagggtcaacaacagccaaattctgcctaccacctgattataaataaagttttattggaacacagctgcacctatctgtttacatattgtccatgctctaatgggagagttgaaaaattgcaaatgagactctatgacccacaaagccaagaatatgtagtgcccgaacctttacagaaaaaagtttgccaaatgttgacctagaccaagcttgcccaactcacagtccagaatggctttgaatgcatcccaacacaaatcwataaactttcttaaaacattatgagacttttttggtgattttttttttttaagctcatcagctatcattaatgttagtgtattttatgtgtggcccaagacaattcttcttcgtccaatrtggcctagggaagycaaaagattggatacctctggtagaccatattcccaatagtatgctcagattcacagcataatggtggaaccaggggaattgcagttcattctccaggtatcttgggtgaagctgggaatgacaaataataactcagaagcaactgtactaaatccagacacagagaacttaggtatttattgcctccgtggagcatctgaaagaggtagtaacttagatttcactttagccaagcttgccctcagagatcctagggagcaaccaaccaacttctattcatttctgtgcccacagtattttgcagggcctatggcatacaatagaatgttcagtacatgttggttgaatgaatacaagcatatcaaagggggattgttaccataattattaccaattcacaggggataaataggatatcgggtaagaaatctattctaaaaatggtggcttagtaaggtggcaacaaatttgaatcttcttagctcttgctgttaagcccrttggtctctagtgacattagctgtctcattttaatttcttctctacttcatgagtacatgttgtagatarataataggttccagttttattaggtgggatttgaagaaggcatttctggtataaatgatgttactggaacaaatgactaagagatgttaatgaatttccttttctggcctttaaaaaataatgggatgcaagcttttttctctgaaaaggttaaagaccaggagtgggattagtcaatttggaatatatttgtcacctttggagcttttgtttctaacagagagcagacaaaagaataggtatttattaaatagctacagtttgccaaaatgacgatagttattttaatcttcaacacttacttaaggattaggcactgctgttcctattttgcagaggaagacactaaaacttaaaaagatggagaaaattcctgtagtgactttgtgagtgaatcagtaaggatgttaatgaaggtctagctgtccctaaagcccaaagtcattttactggaccgcataacctctctgttctaaagtcattgctctttgtcatgtcctttgaggagatttattctgcttcttttttttttttttttttttttgagacagagtcttgctctgttgcccaggctggagtgtagtgacgtgatctcagctcactgaaagctccacctcctgggttcacgccattctcccaagtagctgggactacaggcgcctgccaccacacccagctaattttttttgtatttttagtagagatggggtttcaccatgttagccaggatggtctccatctcctgaccttgtgatccgcccgcctcggcctcccaaagtgctgggattacaggcgtgagccaccgtgcccggcttattctgctttcgaaatggcctactgcttgtttcttagggtagtagctgagtttgcacaaagagttatactgatactcttcttccatttctcttctacttcattgtttgttaggttatttttagcctatttgtttatcctctggagtttcaaacactcttcatataattcccttacctaaaccttttctcaaagtagattgtactaattctaggaagcttattagactatagatttctgagcacttccaagacctgttggtttagaagctttgggaaagaaacccatgaatctgaatctttaacagactgtatccttctccccacttcataaatgccagacagactctcctttagaaaattggccctttaatgcccttcagtgacatatttaggaactcttcaactgaaaaattttgttttcctaaatatgttcataggtattttttcttttaacacaaaaaagatgattttatagttttttagcaccaaagctagtctttatttcatagtatctttaaatgtaataagactgaagtgcaacaattctttttgtacctttgactatcaggaaggacagagcatgcttattcaacaagtcaaatggaactctcatacctaaagacttcatttggaactattattgaagcctgatcaatacctgtcccaggttccaaataatgatactgtgaacactttgcgttccaggcaccttagccaccaaccaccttgtgctgtcgttattagctttagcagaactaatatctcacatgaaactacattagctttctattgcttcctaacaaattaccataaatttagcatcttaaaagtgtatccatatattacctcacacaattctgtagatcagaagtccagatgagctcagcttgctcactgcttagggtttcacaaggctgatgttaaggtatcagctgkctggactcccatctgggggctctggggaggcattctcttctgtgctgattcaggttattggcacatccaggtcctaaggctgtaggtctgagttcactgtgcctttgctggctgacagctaaggcttgttctctgctccttcacaccacccacagctctcctcacttggccctctccatcttcagcaatggcaggggctgtccttctcacactttaaatctctctttttcttctrcctttaggagcacatgagattatatcaggtcrgcctggataatccaggataatctcctgattttaaggacaactgatcagtaaccacacttacatctacaaagtcccttttgtcatgtcatctaacctattcattagggaagaacatctttaggagaggaggagggaaaattctgcctacttacactcacctacacatgtggttaaaaataactaaataatcccctaactgtaatacaatgtagagataaaaagagtgtaatatataataactgaatggattaaaaatgtattttagtatgtgagtgtttagacattacactgccaaaagtaataaagttgtcagaagagctgtgaagactgatacaagtgagtagggttggcaagttccgtgagcagtgtggtcatcagttatgtgactttcttaaacggcatgctcaccattgctcactcttggtaagttatcaatgaattttttttttttttttgatggagtctcactctgtcgcccaggctggagtgcagtggtgccatcttggctcactgcaagctctgcctcccgggttcacgccattctcctgcctcagccccccgagtagctgggactacaggcgcccaccaccatgtccggctactttttttttgtatttttagtagagacggtgtttcaccgtgttagccaggatggtctcaatctcctgacctcatgattcgccagcctcagcttcccaaagtgctgggattacaggtacgagtcattgcgcccagggaaattttttaaaaaagaatacagtatttcctcacttacatgggagtcacattctgtaaacattagtatatgtaaaaaatgcaaaaaacctagaaatttttatatgtaaaattacatatwaattttacacaaaattacacaaaaacccagagggacatataaaaattttgtgtgatgacatcaacttcctgtcttagtccattcaggctgctataaaatatatatatatatatatatatatatatatactaggtagtttataaaaaacaaatttttttctcagttttggaggctgggaagtttaagatcaaggcactggcagatttggtgtctggcaaaggctctttatggggttcatagatgatatcctcacatggcagaaaggggcaaggcagccccttaataagggtgttaatcccagtaatgaggtctctgcccttataacctaatcaccgccccaaggtctccagctcctaataccattgtattggtaattaggtttcaacatatgaattttagggtgaacacaaacattcagaacatagcatattcccaggccccctgcagtatgtatatcccgaattattgtgacaagtttataacctcccacaaggagtcccccagaagacagtggtaccccagctgagaaacagtggcaaggtgagggaattttgtagtatctggacttaaaaaaaaaaaaaaaagccctgtctgctcttggtccgctcataaaaatttactaccttgccagaaacagagacctgaagtcatgtatggtatgacctggccatttataccatggggacattcatagactaggagtaggagtagagaaaccagcaatattcaattcactcttggatagtatgttagagagatagtatcgggtagagattatgactaaggactttggagtcagacaaactgacatttggaaccctccttactactctgagagttgtttccaccctctgaaaagtgggacactatgtctgtaagaataccctgccaggtattatggaagaatctgcctgcttttttgtggcatgtctcctcccattgcctctcttctctgcaccacagaaccagaatacggttctgcatttcaaaggtgattcatctgtaggagtaattcctcactgaagctgtacactgagtgtggcttccccgagggactggattctgtcaggaccggcatattcccagattctaatctagaattcgaatcccacaaatcctagatacgtaggtcaaatatttattttatttcccacctgtcaccaaacattacccatgtttttgctgggcctatattcagttttttgttttgttctgttttgagatggactcggtctgtcaccctgattggagtgcagtgacacaatcataactcactgagaaactggaactacaggcattgcaccaccatgcacaactaatttttttttttgtagaaacagggtctttctatgttgtgcaggctggtctgaaactcctagcctcaagcaatcctccctgctcgacctcccaaactgctaggaatacaggcatgagctagtgtgcccattcccactttattctttgaatagagttctacttgttcaaaagtagactgatgctagcatttttctcttacagcccattaaccagcctgagtttgatccctgaatttttgagaagattttgtattgttcataatttgtagaaaaatcaagctgtggcaaaagaaaagttctccctaaagattttcagacattaaagcacaaaagagttgaaatgttttcagaggtataaaaataaccagtgattctcattagcttcataattatcagaatcattaggtaaatgtctaattagtaaagactttatgctaggcactttacaaaggaaacagtacaggcacagtctttgtcctccagaagcttactctgaaaaaacctcttaatgacatgaaaatgccccctcttcagttatcagaagagaaggactgattaaagtggctattcatgttggtagtatttgcaagagacacgagaagttatattgtgacatgggaaagaagtttagagcagagctaacaacataaatgatataataaagagctgaagactgaacgaattaagtaatgagtcctggagacttctttcccaagcaatctctgaacaggattttaggagatcatcactcattttgagaaaattaggctcatggactctgatgccagaccacttgggcatcctgtccgtcattccactgccacccactgtgtagatttgacatacaatccacattacttaccatttttcttctgggaagcagccagagagggcattccctagagcaaccagactggcattaatctccagcagtgtgctttcatttcacttcctgtaaaaatccatctctagatcctgtgcttgacctaaggttaggtatcagaggaacaaaatactgattctcatttcacatcgcaattgttgctataaatagtgaattttataacctggtagatgcaagggatgcagagtgatggatgagcttctgctgattaaaaaaaaagttcataacttctaactacagttcaagttgaagcaaacaataataaagcacaaataatgcactgctgaattattcatgttgattataaaaaccgcgccctcaatgtcagagaagctgcattccttacagtgtatctttaaccagaatgcttcagcaattgcctggttctaagtgaaaaggaaggttcaggcactgaatcagaattatgctgaagaagagcttaaattgaagaaatattaaaagtcataactagaaaatataaataataaatagaaattattttgatttataaatcaaaataattataaatgactatattttgaggcaaatgataactgatcatagcctatactcctaactgaaaaaataaagcccagaaatgactcctagcataagtccctagtccaagccatcagtgtcacttaactggcctccctactttttctacttctgtcactctgtattttattcagcagccaaaattatccctcaaaaatgttgtcagaaataataccatcaaaaagtgggcaaatgacatgaacagacatttctcaaaagaagatatacaaatagctaataaacatgaaaaaatgctcaatatcaccagggaaatgcaaattacagccatggtaagataacaccttactcctgcaacaatggccattattaaaaagtcaaaaaacaatagatgttagtatgaatatggtgaaaggggaacgcttatacactgctggtgggaatgtaaatttgtacaacctctatggaaaacagtatggagattccttaaagaactgagagtaaatctaccattcaatccagcaatcccactactgagtatctacccaagggaaaataagtcattatatgaacaagatacctgaacatgtatgtttattgcagctcaattcacaattgcaaagacatggaaccaacataagtgcccactgaccaacgaatggataaagaaaacgtggtatatatacatcctgggatactattcagccataaaaaggaaggaaacaatatcttttgtggcaacttgaatagagcttgaagccattattctaagtgaagtaactcaggaatggaaaatcaaataccgtttgttctcacttagaagtgggagctgagctatgagtaagcaaagacatacagagtgataaaatggactctggagactcaggaggaggagagtggaagggggatgtgggataaaaaactacgtattgggtacratgtacactacccaggtgatgggtgcactaaaatctcagaattcaccgctatataattcatccatgcaaccaaaaatcacttttaccccaaaagctatttaaataaaataatacattaaaaaataaaaacaaagcaaaacaagcagaaaaaacacaaaaatgttgtcagttcatgatatgtctttgctgaaatccctcatatgatttcttactttacacataataaaatccaaatgtcttatcctgtactccaataaaggccatacgtgatctagcaactgcctgcctctttctagtcatcaccgtctgaactataagcatatgactgtcttgtggttcctctaatacatcttaaaggcatttgcacttgtagtttgttctgtttccagtgcacagccatgtgcctcccagcttatgtcatctgctaggagaggttttccaaggtcatcaaatgtaaagtactgtcactttttactgcaacacagttttgttttcatctgagtacatatgtaaacaagaaaatgtcaacagtcagattggttggattgattgtctcttatgctaaaatgcaggctcttgaagagtaggatccttgcttgttttattgagtattgtatccaaagtaaccaaaacagtgtctgtcatatattgtccttagttcacttggtttcttgagtgataagctcagttgtacacacactttattatgaatgtcataataatttrttttctgcatataattatgccactttaatggactagatcattgttttctttgacttgtaagtgacttctaaagcttccctgatctagttcattctcctcacttaggataaaaaaccgaaatcatcccagaatgctgataatatataagatttaaaaaaccatttcaggcacaatgttgactgctattgtggggtccagacagagttttctgtggttatgcaaatctcctggctcttagatgcagtgagctcattgtatattagtaaatatttataaagtactctatattgactaaatgtttcacaatcaggttgattagtagtaattcctcccagcaaccttgtgaggtcaatcagcatttttaaagcacagcccagagaggttgggcagcttgcccaaggtcactcagcaggtcattggcaaaacctgcattggcgacttcagagcccattactgtgacaagccctggcactgactstttttggaagggtgacccctgatcgcttttcttgtaaggtaggcgtataaacactaaatgttctgaagtgagagaattacaaaggcctcgaggtgaaggagttattggtgtaattagaaattggagccagctattgaaaattgaaaatgctgcctaattgaggtgaattggaggatatattattttttgagagaattagagaaatatagtttgaaaaataggcatctaaaaagcaggaacgtatgtagaaaattaaagtaggtgactttggcaggggtaataaataagtcatagggccaaaatggtttaggaagagtttatgtaggccatggtatcagaaagtctgttctctaacattatatgccaccaattcaccttcctcaaacagtgttttctgaagttttgtgaaaatgatacctggtttcaagtatggagtatttcagtccttgaagcccaacatgcaaattacataggccccactattattaacatgccctgctaaatatcctctaggaatataaatatcaaggaaattatcttttctttttttttttttttgagaccgagttttgctcttgttgcccaggctggagtgcagtggtgcaatcttggctcacaacaacctctgcctcccgggttcaaacaattctcctgcctcagccttcctgagtacctgagtagctgggattacccatttatttctggtttctcactctgttgcccaggctggagtgcagtggtgcaatctcggctcattgcaacctctgcctcctgggttcaagtgattctcctgcctcagcctcccaagtagctgggactacaggtgcttgccaccacgcctggctaattttttgtatttttagtagagatggggtttcaccatattggccaggctggtctcgaactcctgaccttgtgatccgcccacctcgaactcccaaagtgctgggattacacgtgtgagccaccacacctggccaaggaaattatgttaattttaagaaacatgatgcatctttactttccattattttcttttttctttatgtttgtttcttcccttgagatttaagataaatagattcaagataatgataaatttctgtcctatctaattttgtcttttggtacctcagattatatctcctgtgttccctggaagcaaattattatgactaaccattgcaaccacagtagtaactgcttatattggtaaagcttattacatgctgagaactttctagggagtatctcgtttaacttttccaacattcttaggagaataggcatgcctatccctattttgcatttgggagctaagcttccaagtgtaactccagagccattattctattaaaaccttagtaaagtcatgttctcccctttctcagaaccctccactgacttcacatggtctgcaaggcttattgtggtttaggcacagttatcgtggtgaatgatcatctttgctacagctctcttcctcagctacagactttgcctcaaatatgctcaccacctggtcataagtcagatatcctgagcttggtctgacttggtgtccttgcacttgatcttctctctgcctcttatatacttcctcaacacatgcacctggcccaattatgtcattcagatttattctcaaatgcgtttcaaggaggccttctttggctatgctatataaagtagtatgctccattttaactatctattttccataactgattcctttttcttcatggtatgtaccatccctttaaaaattacttataygtttgtttattgttcatactctatttccactagaatttaagctccatgaggacatcaattttgtattttattttctttatttgtttcattgacagtggccagaacaagtcatggaacatggtagactctccataaataattgttgaataaataaatgaactatcacactacattgctacaccaagttttttttaactttaattttaggttgggggatacatgtgaagctttgttgcataggtaaacttatgtcatgggggtttgttgtacagattatttcatcacccagatattaagccaagtaggcaattgttgtttcttctgttcctctccctcatcccccastccaccttcaattacaccccagaatctattattcccttgttggtgttcatgagtgctcatcatttagctcccacttatgaatgagaacatggggtatttggttttctgttcttgtgttagtttcctaagaatgatagcctccatctctattcatgttcccctaaaagacatgatcttgtcctttttgatggctgtatagcatttaatggtgtatgtgtaccacattttctttatccagtctgtagttggtgggcatttaggttgattccatgtctttgctatcgtgaattgtgctgtaatgaacattcacatgcatgtgtctttatggtagaatgatttgtattcctccagtaatgggattcccagtaatgggattgctgggtggaatggtagttctgkttttagctccttgaggatgagggaaatgctagttctgtttttagctctttgaggaatcgccatactgctttccacaacggttgaactagtttacactcccaccaatagtgtataagtgttcccttgtctttgcaacattgccagcatctgttatttgttgactttttagtaatagccattctaactggtgtgagatgttatctcattgtggttttgattatatttctctaatgatcaatgatattgatcttttttcatatgcctgttggctgcatgtatgtcttcttttgagaagtgtccattcatgtcctttgcccactttttaatggggttgtttttctcttatatacacttgtttaagtttcttatagataatggatattagacctttgtcagatgcatagtttgcaaatattttctcccattctgtaggttatctgtttattctgttgatagttttgttctttcttttcttttttgctgtgaagaagctcttaagtttgattagattcaatttgtcaatgtttgctttggttgcaatagsttttggtgtctttgtcatgcaatctttgcctgttcctatgtctaggatggtattgcctaggttgtcttccaagatttctatagtttcgagttgttcatttaagtctttaatccatctcgagttgatttttatatacagtctaaggaaggggtccagcttcaatcttctgcatatggttagccagttattccagcaccatttattgaatacaaagtcttttccctattgtttgttttagtcaactttgtggaagatcagatggtcataggtgtgtggctttatttctgggttctctattctgttccattggtctatgtgcctgtttttgtaccagtaccacactcttttggttactgtagccctgtggtatagtttatagccaggaaatgtggtgcctccagctttgttctatttgcttaagattgcctgggctatttgagccccttttttgattccatatgaattttaaaatagttttttctatgaagagtatctttggtagtttgataagaataacattgaatctgtaggttgctttggccagcatggacatttcaaagatgttgattcttcctatccatgagcatgggatgtttttccatttgtttgtgtcttttctgatttctttgagtagtattttgtaattttcattctagaaatatttcaccaccttggttagccgtatttctaggtattttatcctttttgtggcagttgtgaattggattgtgttcctgatttggctttctgcttggttgttgttagtgtataggaatgctagtgatttttgtatattgattttgtatcctgaaactttgctgaagttgtttatcagctgaaggagctttggggccaaaattatggggttttctacgtatagaatcatgtcatcttcaaacagcgacagtttgactccctcttttcctatttggatgccctctgtttctttcccttgcctgatttctctggctaggacatccaataacatgtttaataagaacagtgagagagggcatccttgtcttgtgctggtttacaaggggaatgttttcagctgttgcccattcagtatgatgttggctgtgggtttttcatatatagctcctattattttgaggtatgttccttcaatacctagtttattgagagtttttaacatagaagacgttgaattttaccaaaagtcttttctgcatctattgagataatcctgtggtttttgtctttagttctatttatgtgatgaatcacatttattgatttgcctgtgttgaaccaagcttgtatcctggatgtgaagcctacttgatcatggtggattaacttttgctgtgctgctggattcagtttgcaagtattttgcttaggatttttccattgatattcatcgaagatattggcctaaaattttctctttttttgttgtgtgtctgcgaggttttggtatcaggatgatgttagtctcatggaatgagttgagaagcagtcccttctcttcagttttctggagatgtttcagtaagaatggtaccagctcttacttgtatatctggtagaatttggctgtgaatccatctgttcctgggcttttattggttggtagactgtttattgctgattcaatatcagagcttsttattgttctgttcagggaatcaatttctttctggttcattcttaggagggtgtatgtgtccacaaatttrtccatctcttctaggatttctagtttgtatacatagaggtgttcatagtagtttctgatggttatttttatttctgtggggtcggtggtagcacctccctcatcatttctcattttgtatatttggatcttctctcctttcatctttrttagtcgagctagtggcatgtctgtcttactaatgttttcaaaaaacaaactcctggactcattgatcttttgaatagtttttcatgtcgtgattttctttagttcagctctgattttggttatttcttgccttctgctagctttatggttgatttgttcttgcttctctttcagttgtgatgttagattgttaatttgagatctttctaagtttttgatgtgggcatttaatgcagaaattaatgtctttcttaacactaccctagctgtatcacaaatatcctggtatattgtatctttgttctcattagtttcaaagaacatcttcatttctgccttaatttcattatttacccaaaagtgattcaggagcatgttgcataatttccatgtaatttcatggttttgagcaatttttttagtcttctacatttattgcactgtggcctgagagtgtgtttggtatgaatttggttctttyccatttgccagggattgttttatgtccagttatgtggtcgattttagagttatgcaccatatgacgatgagaagaatgtatattctgttgtttttgggtggagagttctgtagaggtctatcagattgatttggtacaatattgagttcaggttctgaatatccttgttaattttctccctcaatgatctaatactgtcagtggggtgttgaagtctcccrctattattatgtgggagtctgtgtttctttgtagatctctaagaacttgctttataaatctgggtactcctgtgttgggtgtgtatatatttgggatagttaggtcttcttgttgaattgaaccctttacyatgatgtaatgcccttctttgtcttttttgatctttgttggtttaaaatctrttttgtctgaaattaggatagcaatatctgcttttttctgtttcctatttgattttcctccatttctttattttgagcctataggtgtcattacatgtgagatgggtctcttgaagacagcatttcatgggatcttgctttttcatccagcttgacactctgtgcctttaaagtggggcatttagccagtttacattcaaggttggtattgatatgtgtggatttgatcctgtcattgtgttgttagctggttattatgctggtttgtttttgtggttgctttatactgttactggtctgtgtatttaagtgtgtttttctattagctggtagtggtatttcctttctatacttagtgttccattgctcactcaacatttgcttatttgaaaaggaacttatttctcctttacttaggaagttagttgggccagatatgaaatctgtggtgaggaatttttttttctttaagaatgttgaatatggccgggtgcggtggctcacgcctgtaatcccagcactttgggaggccaaggcgggcggatcacgaggtcaggagattgagaccatcctggctaacacggtgaaacccatctctactaaaaataccagaaattagccgggcgtggtggtgggtgcctgtaatcccagctacttgggaggctgaggcaggaaaatggcatgaacctgggaggcagaacttgcagtgagccgagactgcaccactgcactccagcgtgggcgacagaacgagactccgtttcaaaaaaaaaaaaaaatttaatataagcttccaatctgtcctagcttataaggttttagctgagaggtctactgttagcctcatgggattccctttgtaggtgacctaccttttttctctggctgcctttaacattctttttttccattttgaccttggaaaatctgatgattatgtgttttgtggatgaccttctggtgtagaatcttgcagagattctctgtatttcctgaatttgacttttggcctctctagcaaagttggggaagttttcatggacaatacaaaaaccagccagctcagcctggttaagaactcttgttggaggagtactggtgtggtgacttgtaggacatatgacactctggccacttgagttacgagaggctttgcattggttttttctcatctctgcatgtgggtgttcctttaagtgcagtgtagattaagtayagtcaatagatgtcttttctaaatgttctcacagggtcgaggttttctgcagcgtttttatttgaagctgacttcttttagcaagtggggtttttagcaagatatttttggtgctgaggctttgaggtatgatccagtaggtggtgcttaggtgtatttgtcagttggtagatccttgctcggttgtgtggcttccccatgtttcctctcctttgcagccttgttccctctcagtgctctgaaagtgtgggcttttctcccccttgagttctggctgcagatcgcagcttggcactcttgggctgcccactgcagctctggggaaatctcagggtttatgttccttccctaacttggagatagcagaggaagagaccttagtagtggtgtggctaaaggtcttttgcatgtctcctggggactctaccccagagagatgcaggtcagcagtcgctcagtgtaatcagctcaggatagcgggtctgtgcgatgggcccaacctgcaggttccctgtctggtaatgagtggggttggaggggatccatgggagatggagtgacctcctcttcttgggttgactgcagcttgttggtggtgtggataaggcacttagggtctttgctcttttgtttgttggagggtagcaagggcagttccactgcagagtcagtggcatagaggctttcagttacccctgggggctctgtccaggaagttacagagctgctattggctcaatagccctagtcgggggtggccagtgaggagatatgggaacaggcatccacatagtctggcgacttttttttttttttttgagacggaatctcattctgtcacccaggttggagtgcagtggcgtgatctcagctcactgcaacttccgcctcccaggttcaagtgattctcctgcctcagcctcctgagtagctgggattacaggtgcatgccaccacgcctggccaatttttgtattttcagtagagatggagtttcaccacgttggccaggctggtcttgaactcctgacctcaggtgatctgcctgcctgggcctcccaaacagtctggccactttttatttatttatttttatttttattttattttattttatttatttttttgagatggagtcttgctctctcgcccaggctggagtgaaatggcacaatcttggctcactgcaacctccgcctcccaggttcaagcgttctcctgcctcagtctcctgagtagctgggattacaggtgcccgctgccacgcctggctaattttttgtatttttagtagagatggggtttcaccatgttccccaggcaggtcttgaactcctgagctcaggcaatccacccacctaggcctcccaaagtgctaggattacaggcatgagccaccatgcctggcccagtttggccactttttaatagggctgctgtgtggtatgttgggggtccgctccagttcctagtcaacttgggttttccagtacctggagggatcaacagcgaaggctgcaaaaccacaaacatggctgcctgcccctccctctgggagctctgtcccaggaaggtatggacccattgccagctcaaatgcacctgtaggaggtagctggagatccgggttgggaggccccacacagtgaagaggaactggatcagggacccgcttaaaaagcagtctggccatgtttttgtatagcagctgtcatcacatttttgtatagcagctgtgctgtgccaggggtctgmttcagcccctggtcacctatgtctctccaaagcccaaagggcaggacagctaagtcaccaaaacagcaaagttggtggcccacccctccctctgggagctgtctcagggaggtttgaaacctctgttggccagtgaacaccactgagggtggctggagaccctggtttgggaggccccacccagtgaggaggaacaggatcagggaccttctttaaaaagcagtctagtcacgttttcatagagcagttgtgctgttctggagatccacttcagcccctggytaccttggtctttccaaagcccgaaggctgaaaaagctaagtctgccacacagccaatatggcamcccctaccccaccccccaaccctaggagctccagctcagtgaggtgcaattgttgctaccagtggctggctggagttccrcatcagcaggtcttatcctgatgtgttgtgggagtagggcctgaagatgaatgctactcattcccctggattcagccttttcctgagggtgtatatgagggtctaacctcctgctttgccagagtttcagctgcttttgccgggaagctcagaaagcccgagtatctaaggttcccacgtctctgcatgtgctcgagtggctgctctgctaagcccccacttagctctgtgtgttagactaaaggccatggtggagtgggttcacatggggatcttctgactcgagggttgcaaagatccacgggagaagcgtgggttcccagagtcacacactcacccgctgcttccctgggcgggggaggttaccctggctttgtgttgctccctggtggaccgtcattctgccttgcttttctctgttctccgtggactgagttgttctcttgattagtcccaatgygagcacctggttgtttcagttgaatatgtatttwctcactactttcatttttctccatgacagccaagcacactacctgtttctagtgagccaactttagatttttttctatactaagtttctaataattgaattaacttcacacaggctacatactgtgcgggttttgaagaatcaaagtcttgggctttgggtgaacattttccagcatctgttactggctgttcaggtctagcctttgccacagaaagaacccaagccaagaagaatctgagtgttttcgtctacacagtgttcatctcaaagcattcaagaatccagggaagggactctggaaagattgtgagatgggactggcagcttttcctgtattactttgcttttttttttttttaaggaaaatctgaaggcaatgggaatctggcaattctcttgggacttgtgggcaaatgtcagtgtgtctagtgtgatggtgcatattagagcgccaccctctgtcagctctaccatccagattttgtgaaacagatattgcctgtgagttggttgggaatcactacatgcagactggaggaatagagatcagtgactgaaggggatcttggcaaaaaaaaaaaaaaatcatctctatttcatgagggatgctggaatgcattctctgtaagcacttttttttttttttttgaaatggagtcatgctctgttgcccaagctggagtacagtggtacgatctcagctyactgcaacctctgcctcttgggttcaagtgattctcttgcctcagtgtcctgagtagctgagatgacaggtgtctaccaccacacccagataatttttgtacttttactacagacagggtttcaccatgttggccaggctggtcttgaactcctgacctcaagttatctgccccctcttggcatcccaaagtgctgggattataggtgtgagtcaccgtgcccagccctctgtaagcatttcatataatatttttatttttaatrttctcttagaccttgcctcttgcccaaatgtaactacagttttcagctgggtatgattctgaagtgtagcaggacacagatttttacatttgtagccctctttgtttgtttctgttttgtttgtttgtttggggggaaatcaacttctaaagaaatattatcagattttttcttacagtattagctaattctaaaatggatagactttacaaaatttttttaatcgacgagttgaaggtgcctttgcatatttgacaatgtataattctaagaaatatcttaccatgagaatcagaaaacctggattcttttcatgactttggtctcaactaaatgcttgacttactttaatctaagtctcagctacttcatctgcagaatcagaatgctgaaacttttttttttttttttttttttttttttgtagagacagggtttcaccgtgttagccaggatggtcttgatctcctgacctcatgatccgcctgtctcggcctcccaaagtgctgggattacaggcgcgagccaccgcgcccagccaaactttttattatatgaaaactattttattgatcctatgaaattgtatgaaagtgtgaaacagttaataaggaaggtaaactgtgtgtgttgggtcgggggtgaaatggagaacaggtgttttaatgaggactaacttgggcgtaaactcttctgccacttaaaaaaaacattgaagagagatgagattatttctaaatgtcattgaagctctaattttctaggatttttaggtttcctcaaagtaatgggtagggacaaaataaatggtgatattaaaagacattgtaatgatatgcacaaataggcaagcatatgttttctggatagcatcaattatttcacccttcaagaaattaagtagaaaacagacaggatgtaatacacaaagaagatgtgcgttcaccctgacactctgaccctgaatgtctccagtgatttggggatgatatttatccataagtttaacttttcacgtgtgtaataggtttcactatagatgttcagttccctaaaactccctgatactggaattcttaaatgttagagtcaaagctagagatcagctggtccagtygtctccaattacagatgaggaattgatttactcatttttttacctcattcaacctttggaaaactaaaggtaacaaaagctcagttaaacatgtatcttatgagactgaaaatctcatcatctatggtgaagaaaagaaagaaacctaacaagctgacattatactatgacacctagagracagcttacacttttttttgagatggagtctcgccctgtcaccaggctggagtgcagtggcacaatcttggctcactgcagcctctgcctcccaggttcaagtgattctcctgcctcagcctcccgagtagctgggactacaggtgcatgccaccacgcctggctaatttttgtattttagtagagatggggttgcaccatgttggccaggatggtgttgatctcttgacctcgtgatccacctgccttggcatcccaaagtgcttggattacaggtgtgagggactgcgcccggccaattgagggtatttgaaccattttaaatttaagggatcaagtaaattccattgtcactgctatatgtttcgtagcttgtccttctagaatacatttttcataatttgcatatgtatgttttgatggaaaagctaggagagccaagtaacattgacttcatttggtaagtattttatttattttcgcatattcttttttttttttttttttaaggcggagtctcactctgtcccccaggctggagtgcagtggtgcgatcttggctcactgaaacttctgcctcctgggttcaagcagttctcttgcctcagcctcccaagtagctggtactacaggcacatgccaccatgcctggctaattttttttgtattttagtagagacaaggtttcaccttgttgcccaggctggttgcgaactcctgagctcaggcaatctgcctgcctcggcctcccaaagtgctgggattacaggcatgagccactgcacctggcctatttttgcatattcttaagtcgggacaataacactgcgtcttcagccaactgagtaccgtgtgagaagagagtgaaacacattggcagaattggagctccaattcattttctaacaagggctctaagataaaggacgtgtgtatgtatgccatttcatttcaagtacagtgcattcacaactggggggaagtctgcagtaatccctgttacctttaatacagttgaactagtttactagaagcttggattaaggatcctcattctaataaaaaattgaatttaggatgacaactcgccaatattacaaacagcagtggttcgttgtttggaaggcaggtgatgtaagttctgggagctccattaggaaaaatctattctttttcagacacactgccatcattctacgaatagtaccctatttaaatggacaattcaccatatctctgtattaagcatgctgactttggagcctaactgcctgagtttgaatctaggccatgttcatcactcctatgtggcattgggcaagctgatcatcttccttaagtcttggtctcctcatctgtaaaatgtggatcataccagtacttaactcgtgcgatgttagagaactcagtgaggtaatccttatgaagtgcttagcccagtgtgtggtatcttaagcattcaataaatgttcactgttattcataaaccgcataattcaggagtgtagggtaatgcagcctatgaagatttgaccccagtgtgatgaaggatgctctacctgtcagactagaagtacctggagattggggttgtatcaaaagatagaacatgtcacaaagctaaaaagataagttgctctcctcccaaatttatctytacccttataactgacaaatggatattttattttccatagctgtatttatagacatttaaacaaactgatatataatacattttgcatatgcatttgtatgagttcttccttagtgagtcactaatctctcttatatttatgtctcataattattcctacccaacacaaactcagctggaagccctgaagttttcttgctcccaaaccctccaaaaggaaatgcaaaacccaaatgtgaaatttttcaaactgaattttctggtgataaaggagaactttacaggatagtgtgttcggttcaacctagcaacactgagcaccttctggattgtaagaagcagctaaatggtggagagagatacagaagagtaagcataaatgcattttgctcctagtagatggccatctggtaagcgagatcaaacgcatgtaaatgtaatacatggcagcatataaaggccaataaggagagattcaaataaatcacatacagtataaaggagagaggcattccattcagcagagggatgtgaaaaggttcaatgaaagaagggatattggccggtagtgactcatgcctgtaatcccagcactttgggaggccaaagtgggcagatcacttgaggccaggagttcaagaccagcctggccaacatggtaaaacccgtctctactaaaaatacaaaaattacctgggcatggtggtgcgcacctgtagtcccagccactggggaggctgaggcaggagaatcgcttgagcccgggaggcggagcttgcagtgagccaacatcgcgccgccacactccagcctggtgacaaagtgagacccagtctcaaaaaaaaagaaaggatatttgattccagccttgaagtgtatgaatgaattgtgatcggctgaaagaagagtgaaaggataaattattgtctatccctgcctttagaaaatgcagtctattagcacagacaactgtgagcattgacaacaacgatacaatgccagggaatctgggttgtcatggaagaaagaacaaaggctgactgctagttgattggcatggtcaggagtggcatccctgggaagaaaactgtggagtagaatgttaaaagatgagaaggaatacgtgccctatgccctcctcaccagtaccagcttgtctgcttagcagtggatattgcctttgcaaagacatggaggtatgagagaggccgcatctrtgagggggagctgctagtaaatttacctggactactgcaacaagttctagccacagcagaaatagtgatggcctgccctaggaatggcagtaagaactagaatggatggtacatattggatacattgggcacagacaactgtgtgtttgtataagaaggatgtcatggacatcatctagtgaaggatagtactccaatttgctcctaaaaagatgaacaggagacctctgcttaaattactttgccctttcttatgcaaaatagagatccaggtatcagggccaatgtaagttacttttatactcaaaaataaaccagcagacatgtcagtggtaagggtaacctacagcagaaaagtcactgtctgcacacaaccccaatcaaatgcacccaaatttttctttcctttttttttttttttttttgagacagaggcttgctctgtctcccaggctggagtgcagtggtgcaatctcggctcattgccagctccgcctcctgggttcacaccattctcctacctcagctgggactacaggtgcctgccaccacrcccagctaatttttttgtatttttagtagagacggggtttccccttgtcagccaggatggtctcaatctcctgacctcgtgatccgcctgcctcggcttccccaagtgctgggattacagacgtgagccactgcgcccagccaaatgcacccaaatttcttatctcaccggatctgtatgactagaaacatcaagaacacagaataaagatataattaggagaagaaaaatggaacagactgctagatagatgagaacttctatcccttattaacataaaagtaacatatttaaagaataaaagcttttgatgtgatattaaaaattctgtgatacatgacagaatggaaatatttttatgtcaattttacatgacttccccttaacctactgtttaatccccttagctaattctgcaagttacgctgaaaggttcagggaatccaggaaagagagggaagctcattcagctcagaatgcaccataatgtctcggcagcacatttraattatatgtttaggctgacaggcaaacgtatttcggggcagattccttagaaagcaggagacaawttccttcagctccacgtcatcgtttgatgtagattgcctattatattcttgaggtattatgaaaaatggatttgaagatattttcttgacagtgggtagactagtggaatccagtgactgtatttaaaatgtgcaggggtttgttataacatggtaatagaaatatcagttgcactgacaggttaaaaaaaatctgtcaatgaatgataatgaagttatttaaatgtcgactcactcgcaaacattttccaaaccctaaattattctcactgctttaacctcatgcatcctaagttattaaggagcagagtctgtgatgcacccaatgcgcccttggctttcggagctatttttatgccaccaaatgcactaggagcaatggaagtggctgctcttaatgattttaagaaagaaacaaaacacagacgctgcagctgcttgatttagaggtgaacactgttccgctttcaggacatcttgttggcagtgatttgagtaatgccctgatgcttcctgtgcccaagcttccctctatagcctgagtctttgctttgtgaccttggcagtatggctctgtgtttctgaaataaggcatcttccgtctgtggggttttgggtagggaaggagatgggcaggatatctgtatgctttctaaagccttaccgaaggagcagcttggctcatccctggttcagtacgtgcccattaggcattcattcacccttcatgtggagaagccacctgattgtgccagcactgtcctggggactggggatctgggggtgaacaaagatatgttcactgctttcagggcacttagagtaatcaggagatgggtgccaggcagagattttctgatcagaaggaagagaggtgaactcctggtttctggtccagcatgtaagaagttcacagtttgtccattttcctagcaagttaaaagctgaagaaactgaacaattaacaactctgttcagatcatcctacaagtgaagtcacaggacaaatgctgtcccccgaattggaaagaccaacagtcagacacagcaaatcacaatttacctgagcagaaactcaacaagcagaaacttccacaggaaccagtgctaagttacaaaaacttaaacagtagttgatggtttgcaggaggctcagtgtggacatgtctgagagttaagaacttcgtggggacctaatcagagaggccctcatacttttgtgagttttacctccaggagctttaccagctccccacagtgacaactggtgggggaacttaccttcgtacttccagcagggagagggcaaaagtaaccattttgaaatacgccagagcattctgtcttaacaagacctgccctcaggagaaactagttaacagagcctcacctgctggggatctgtcagaccataactgactagggggaagggaaataagcaactgcaacttcctctagctattatgttccacctaagcagggaagaaatgtgagaagcactggtaaagttcacattccaggggcaaagactcccaaaaaatctgagagttaatcatagaactaaagaatgttttgcctggctgggcggggtggctcacgcctgtagtaatcccagcattttgggaggccgaggtgggtggatcacctgaggtcaggagttcgaaatcagcctggtcaatatggtgaaaccttgtgtctactaaaaatacaaaaattagctggaygcggtgaggcatgcctgtaatcccagctactcaggaggctgaggctggagaatagcttgaaccagggaggctgaggttgtagtgagctgagattgcaccacggcactccagaatgggtgacagagcgagactctgtctcaaaaaaaaaaaaaaatgttgtgtctccctcttcgcttccccgtattaccatcacacaactaaaggcctattgactatggttccttttacctagtacctcatgtcagctgttcaggcattctaagaggcaaacaatccagtttctaaagattaaacaagcatcacaaccagagtcatatatgataggaatatcagaattagaaaaaccgataatttttataaatgtatgatcaacatgctaagggctttaatagaaaaagcagacaacatggaagaacagatggataatgtcatcagagagatggaaattctaagaaaagatcaagaagaaatgctagagatgaaaaccatgtaatagaaatgaagaatgcctttgatgagctcattggtagactggacatggctgagaaaagaatctctgaaattgatgatrcctcaacagaaacttccaaaacttaaaaaaagaccatcgaagtgcaaatacagagcaagaactgtggggcaactacaaaagtgtaatatatgtatagtgggaataacagaagggaaagaaagagaaagaaacaagcaatgtatgaagcaatgataactgagaatttctgcaaaataatgtaccaaacctcagatctagaaaactcagagaacactaagcaggataaatgtcaaaaaacaaagcaacaaccacaaaaaccatcataaccccacataggtatatcatattcaaaattcagataatcaaagatttaaaaaaaacttttttaaggcagaatggggaacacctacctgtaaagaggcacagatgaaaaatacatctgacttctcagatctatacaggcaagaagagagtgggatgaaatatttaaagtgctgagaggaaaaaataatggaaaacatcaagaattctgtaccctgcaaaactatctttcaaaagtgaaggagagataaagacttttctcagacggacaaaagttgaggaagtttgttactggtagacctgctttgaaataaatgttaaaagaagttcttcagagagaaggaaaatgatacaggatagaaactcaagtctatgtaaggaaaagaagagcatcagaatgaataagtgaatgtaccacaaaaacctttattcttctgagtagtaatctcacagataccactttcttcaagataatagcaacaatgtattcaattacgtatgctcatgtatatatatacacacacacatacacacttaggtatgcttatgtacaggtgaaatgaatgacatcaataatacaagaattgggaaggagaattaggaataagttgttatgacagagtgcctgcactccccatgaagtagtgtgttgttattagaagtgaacttcattagtggtaaatatgtattgcaaactctacagcaagtactaaaaagagtgaaaaagaagaggaaaacarataggctaagaaaggagagaaaataaattcstataaaatgctcaattaaaatcacaaaagacagaaaacatgtgaaagataataggaacaaagaataaaggaaacaaaaagaaaatggtaaaaatgtgataggyaataatccaactatattaataatcactttaaatgtcagtggcctaaatataccaattaagacagagattgatggagtggatgagaaaaacaagccctaactrtatgttgtctacaagaaacccacttcaaagacaaagatacattcaaattaaaagtaaatggatggagaatgatataccatgctaacactaattagaaggtctttggagtcattatattaattttacacagggcagatttcagagcaaagaaaattatcagggtaaagaggggcattacataatgataaaggggagtcaatatgccaagaagacatgagtccttaatatgcacatgcctaacatgagtgtgtccaaatacatgaggcaaaaactgattagaactgcaagtgtaaagatgaagtcattattataattggagaccttaacatcgtctttcaaaaatgaacagatctagtaggcaaaaattataaggacatatttgaactcaacaacaccatcaaccaacagggtaaaattgatatctctagacaatatcacctaacaccaacagattacacattcttctcaagatcacatggaaaatttgctaagacagaccactttctgaaccataaaacacaccttaacaaactgaagcaaatagaaattatacaatgtctgtttttcaaccacaatgaaattaaactggaaatcaataaaagaaatagctgaaaattttcaaaataagcagagattaaacaacatgcttctaaatatcacatcgatcaaagaaaaaatctcaagagaaactataatttgaagtaaaggaaaataaaataaaattaattaaagtttgtaggatgcagtaaaagccatgcttagagggaaatttacaatgttgaaagtgtatatttaaaaagaaaaaatatgaaatcaataatttaaacccccacctcagaaaattagggaaaaatgagcaaattaaattgataataagcagaagaaaagaaataataaaaaattagagcataaatcaacaagactgaaaatagataatcaacaaaaccaaaacctgtttttttggaaaaaaaaaaaaatcaagaaaatggataagcctctagccaggctaagaaaaaagagagggagcacaaaatactaatgtcagaaatgaaagaggagagagcactacagatcctatggatactaaagagacaataaaggactattatgtacacttttctacccacaaatttaataacataggtgaagtggaccaatttcttgaaagacacaatctgccaaaactcacataagaaaatgtagaaatctgaataggcttgtaactattaaagaaattgaatcaataattaataatcttccaaacagaaagcaccaggcacagtcagttcactggtgaattttcccatacatttcagaaataaattatgccaatttactacaaactcttgcagaatacagaagcagagggaatacttctcagctcatttcatgatgctggtattattccaatatcaaaaaccacccaatgacattaggagaaaaaagcaaacttacagacaattatctctcatggacaaagatgcaaaacccctcaatccaataatgtttgaaaagaattgtgcatcatgaccaagtggggtttatccaagatatgtaaagctggtttaatattcaaaaatcaattaatgtaattatcacatcaacaggctaaataaaatcacataatataccaatagatgagggraaataacaaaacttaataccaattcatggtaaaaactctcagcaacctaaggatagcgggaaatttctttttcttttctttctttttttttttttttttttttgagacagggtctcgctctgtcacccaggctggagtgcagtggtgtgatttcagctcactacaaactccacctcccaggttcaagtgattctcctgcctcagcctcttgagtagctgggactacaggcgtgcaacaccatgcccagctaatttttgtatttttagtagagacagggtttcaccatgttggccaggatggtcttgatctcttgaccttgtgatgcgactgcctcagccttcgaaagtgctgggattacaggtgtgagccaccgcacccagccgaggaaactttcttaaattgacaagaaacatctacaaaataccttcagctagcatcttacttagtggtgagaaactcgaaagttttcccactaagatcagaacaaggcaagaatatctcctcaccactgttttttagctggaagtcctagctaataccataagacaagaaaaggtaataaaagttatacagattgaaaaggaagaaataaaactatctttgttgcagagacagaagcatctatgtataaaatcttagagaatcaacaacaatgaaaaaactaataagtaattgtagcaagattgtacaatataaggttaatatacaaaagtaatatacactagtaacaaacaagcagaatttgaaattaaaaacgcattaccatttacattagcataccaaaaaagaaaatagacataaatttaacaacatacgcacacaagatctgtatgaggagaactatgaagctctgataaaggatgttaaaaaactaagtaaatgaaaagatattccatatccatggacagaaagactcaatattgccaagatgtcagttcttctcaacttgatctatagattcaacacaatctcaattaaaatgtagcaagttattttgtggatgttgacaaataattctaaagtttatatggagatgtaggagacccagaatagtcaactgagtagtaagggaaggaaacaaaattggagcactcactgcctgacttcaagacttacaataaacttgtagtaatcaggacagtttgttattgtgtgaaggaacagatacatagatcaatggaacagagtagagagcccagacatagaacaatataaatatagtcagctgatctttcacaaaagaccaaagcccatgcaatgaggaaaagtcttttcaacaaatggtgctgaaacaactggacacccacaggcaaaaataaatacaaataaaaggaagtttgaacacagaccttacagccctcacaaaaattaactcaaaatgtatcatagacctaaatgtaaaatgcagaactataaaactcctgaagataactaggagaaaacctaaatgaccttggatatggtgatgactttttacatacaagaccaaagtcacaatctatgaaaaaaatgggtaatccagacttcattaaattttaaaactctgagaatgataataccaatagaatgagaagacaagccacagactgggaaaaaattataaaagacctatctgatgaaggcctgtcatatacaatatacaaagaaattcagtaggtttcaagctagctggtgcaggtggctaggattaaggtagtggcagtggagatatggtagaacactgggacctgttgttggattgcatgtgagagatgagggacaggaacaaaaatgactccaagtttctgtgtttttttgcaattggctagaagatagtgatgttttactgataggtagactcctaggcctagaatagggccgtagggcgtgtgtgtggtgggtggcaggggagatgagggcagggtggaaatgactcctttttggacttgatagatttgaaatctattcccatgaggcatccaaatgaaggtgtcaaaaatgagttagacataggtaattggagctctgaggaatattgtgagcttgagatacatacacatttgtaaaggagaccttaccaaatagaggctcttgggtgtcttgggaatgcctttctctctcctagaaaggaaaggcatcagrgaggagccaagatggccgaataggaacagctcyggtctacagctcccagcgtgagcaacgcagaagacgggtgatttctgcatttccatctgaggtaccgggttcatctcactagggagtgccagacagtgggcgcaggccagtgagtgcgcgcaccgtgygcgagccgaagcagggcgaggcattgcctcacctgggaagtgcaaggggtcaggragttccctttccgagtcaaagaaaggggtgacggacgcacctggaaaatcgggtcactcccacccgaatattgcgcttttcagaccggcttaaaacacggcgcaccacgagactatatcccacacctggctcggagggtcctmcacccacggagtctcgctgattgctagcacagcagtctgagatcaaactgcaaggcrgcagcgaggctgggggaggggcgcccgccattgcccaggcttgcttaggtaaacaaagcagccgggaagctcgaactgggtggagcccaccacagctcaaggaggcctgcctgcctctgtacactccacctctgggggcagggcacagacaaaccaaaagacagcagtaaactctgcagacttaaaagtctctgtctgacagctttgaagacagcagtggttcttccagcacgcagctggagatctgagaacgggcagactgcctcctcaagtgggtccctgacccctgacccccgagcagcctaactgggaggcacccaccagcaggggcacactgacacctcacagggcagggtattctaacagacctgcagctgagggtcctgtctgttagaaggaaaactaacaaacagaaaggacatccacaccgaaaacccatctgtacatcaccatcatcaaagaccaaaagtagataaaaccacaaagatggggaaaaaacagaacagaaaaactggaaactctaaaacgcagagcgcctatcctcctccaaaggaacacagttcctcaccagcaacggaacaaagctggatggagaatgattttgacgagctgagagaggaaggcttcagacgatcaaattactctgagctacgggaggacattcaaaccaaaggcaaagaagttgaaaactttgaaaaaaatttagaagaatgtataactagaataaccaatacagagaagtgcttaaaggagctgatggagctgaaaaccaaggctcaagaactacgtgaagaatgcagaagcctcaggagccgatgcgatcaactggaagaaagggtatcagcaatggaagatgaaatgaatgaagtgaagcgagaaggggaagtttagagaaaaaagaataaaaagaaatgagcaaagcctccaagaaatatgggactatgtgaaaagaccaaatctacatctgattggtgtacctgaaagtgatgcagagaatggtaccaagttggaaaacactctgcaggatattatccaggagaacttccccaatctagcaaggcaggccaacgttcagattcaggaaatacagagaacgccacaaagatactcctcgagaagagcaactccaagacacataattgtcagattcaccaaagttgaaatgaaggaaaaaatgttaagggcagtcagagagaaaggtcgggttaccctcaaagggaagcccatcagactaacagcggatctctcggcagaaaccctacaagccagaagagagtgggggccaatattcaacatacttaaagaaaagaattttcaacccagaatttcatatccagccaaactaagcttcataagtgaaggagaaataaaatactttacagacaagcaaatgctgagagattttgtcaccaccaggcctgccctaaaagagctcctgaaggaagcactaaacatggaaaggaacaactggtaccagccgctgcaaaatcatgccaaaatgtaaagaccatcgagactaggaagaaactgcatcaactaacgagcaaaatcaccagctracatcataatgacaggatcaaattcacacataacaatattaactttaaatgtaaatggactaaatgctccaattaaaagacacagactggcaagttggataaagagtcaagacccatcagtgtgctgtattcaggaaacccatctcacgtgcagagacacacataggctcaaaataaaaggatggaggaagatctaccaagcaaatggaaaacaaaaaaaggcagggcttgcaatcctagtctctgataaaacagactttaaaccaacaaagatcaaaagagacaaagaaggccattacataatggtaaagggatcaattcaacaagaggagctaactatcctaaatatatatgcacccaatacaggagcacccagattcataaagcaagtcctgagtgacctacaaagagacttagactcccacacaataataatgggagactttaacaccccactgtcaacattagacagatcaacgagacagaaagtcaacaaggatacccaggaattgaactcagctctgcaccaagcggacctaatagacatctacagaactctccaccccaaatcaacagaatatacatttttttcagcaccacaccacacctattccaaaattgaccacatagttggaagtaaagctctcctcagcaaatgtaaaagaacagaaattataataaactatctctcagaccacagtgcaagcaaactagaattcaggattaagaatctcactgaaagccactcaactacatggaaactgaacaacctgctcctgaatgactactgggtacataacgaaatgaagacagaagtaaagatgttctttgaaaccaacgagaacaaagacacaacataccagaatctctgggatgcattcaaagcagtgtgtagagggaaatttatagcactaaatgcccacaagagaaagcaggaaagatccaaaattgacaccctaacatcacaattaaaagaactagaaaagcaagagcaaacacattcaaaagctagcagaaggcaagaaataactaaaatcagagcagaactgaaggaaatagagacacaaaaaacccttcaaaaaatcaatgaatccaggagctggttttttgaaaggatcaacaaaattgatagaccgctagcaagactaataaagaaaaaaagagagaagaatcaaatagacacaataaaaaatgataaaggggatatcaccaccgatcccacagaaatacaaactaccatcagagaatactacaaacacctctacgcaaataaactagaaaatctagaagaaatggataaattcctcgacacatacactctcccaagactaaaccaggaagaagttgaatctctgaatagaccaataacaggagctgaaattgtggcaataatcaatagtttaccaaccaaaaagagtccaggaccagatggattcacagccaaattctaccagaggtacaaggaggaactggtaccattccttctgaaactattccaatcaatagaaaaagagggaatcctccctaactcattttatgaggccagcatcattctgataccaaagccgggcagagacacaaccaaaaaagataattttagaccaatatccttgatgaacattgatgcaaaaatcctcaataaaatactggcaaacygaatccagcagcacatcaaaaagcttatccaccatgatcaagtgggcttcatccctgggatgcaaggctggttcaatatacgcaaatcaataaatgtaatccagcatataaacagagccaaagacaaaaaccacatgattatctcaatagatgcagaaaaagcctttgacaaaattcaacaacccttcatgctaaaaactctcaataaattaggtattgatgggacgtatttcaaaataataagagctatctatgacaaacccacagccaatatcatactgaatgggcaaaaactggaagcattccctttgaaaactggcacaagacaggaatgccctctctcaccgctcctattcaacatagtgttggaagttctggccagggcaatcaggcaggagaaggaaataaagggtattcaattaggaaaagaggaagtcaaattgtccctgtttgcagacgacatgattgtttatctagaaaaccccatcgtctcagcccaaaatctccttaagctgataagcaacttcagcaaagtctcaggatacaaaatcaatgtacaaaaatcacaagcattcctatacaccaacaacagacaaacagagagccaaatcatgagtgaactcccattcacaattgcttcaaagagaataaaatacctaggaatccaacttacaagggatgtgaaggacctcttcaaggagaactacaaaccactgctcaaggaaataaaagaggatacaaacaaatggaagaacattccatgctcatgggtaggaagaatcaatatcgtgaaaatggccatactgcccaaggtaatttacagattcaatgccatccccatcaagctaccaatgactttcttcacagaattggaaaaaactactttaaagttcatatggaaccaaaaaagagcccgcatcgccaagtcaatcctaagccaaaagaacaaagctggaggcatcacactacctgactgcaaactatgctacaaggctacagtaactaaaacagcatggtactggtaccaaaacagagatatagatcaatggaacagaacagagccctcagaaataacgccacatacctacaactatctgatctttgacaaacctgagaaaaacaagcaatggggaaaggattccctatttaataaatggtgctgggaaaactggctagccatatgtagaaagctgaaactggatcccttccttacaccttatacaaaaatcaattcaagatggattaaagatttaaatgttagacctaaaaccataaaaaccctagaagaaaacctaggcattaccattcaggacataggcgtgggcaaggacttcatgtccaaaacaccaaaagcaatggcaaccaaagccaaaattgacaaatgggatctaattaaactaaagagcttctgcacagcaaaagaaactaccatcagagtgaacaggcaacctacaacatgggagaaaattttcacaacctactcatctgacaaagggctaatatccagaatctacaatgaactcaaacaaatttacaagaaaaaaacaaacaaccccatcaaaaagtgggcgagggacatgaacagacacttctcaaaagaagacatttatgcagccaaaaaacacatgaaaaaatgctcatcatcactggccatcagagaaatgcaaatcaaaaccactatgagatatcatctcacaccagttagaatggcaatcattaaaaagtcaggaaacaacaggtgctggagaggatgtggacaaataggaacacttttacactgttggtgggactgtaaactagttcaaccattgtggaagtcagtgtggcgattcctcagggatctagaactagaaataccatttgacccagccatcccattactgggtatatacccaaaggactataaatcatgctgctataaagacatatgcacacgtatgtttattgcggcattattcacaatagcaaagacttggaaccaacccaaatgtccaacaatgatagactggattaagaaaatgtggcaaatatacaccatggaatactatgcagccataaaaaatgatgagttcatgtcctttgtagggccatggatgaaattggaaaccatcattctcagtaaactatcgcaagaacaaaaaaccaaacaccgcatattctcactcataggtgggaattgaacaatgagatcacatggacacaggaaggggaatatcacactctggggactgtggtggggaggggggaggggggagggatagcattgggagatatacctaatgctagatgacgagttagtgggtgcagcgcaccagcatggcacatgtatacatatgtaactaacctgcacaatgtgcacatgtaccctaaaacttaaagtataatttaaaaaaaataataattaaaaaaaaaaagaaattcagtaaatggtgttggagaaactggacattcacctgcaaaagaatgaaattgtatccttattttatatcatacatgaaaatcaattaaaaattgagtaaaaacttaaacataagacctgaaaccatgaaactcctagaagaaaacatagaagaaaatctcctcaatattggtcttagaaatgattttattttaatttgacaccaaaagcacagacaccaaaagcaaaatgtgggaatatattaatcaaaaaagtttctgcatagcaaagaaacaatcatcacaatatataagaaacttatacaagtaaatagcaaaattaaacaaaaaacctgattaaaaatgggcaaagaacacgaataggcatttttccaaagatggcatataaaaagccaatagtatatgaaaagatgttcaacatcactaatatcagggaaatgcaagttaaaaccacaatgaaatatcaccttacaactattaggatgttttttatcaaaatatcaaaagataacaagtgatgtggagcaaagggaacccttgtacacttgtggtgggagtgtaaatatgcagccactatggaaaacaatgtggtggctcctaaaagtttaaatatgctccatatagatccagcagttttattcctgggtgcatatccaaaggaaataaaatcactatcttgagatagctggtgcttctgtgttcattgcaacattattcacaatagccaagatacggaaacaacytaagtgwctgagaaatcaatggataaagaaaatgtattatatatacagtagaatatgattcaaccttaraaaaaggaaatcttgtctgggtgcagtggctcacgcctgtaatcccagcactttggggggccaaggtgggcagatcacgaggtcaggagatggagaccatcctggctaacacggtgaaatcccgtctctactaaaaatacaaaaacagaataagctgggcgtggtggcagatgcctgtagtcccagctacttgggaggctgaggtgggagaatggcgtgaacctggggggcggagcttgcagtgagccgagatcgcgccactgcactctccagcctgagcaacagagcgagactccatcacaaaaaaaaaaaaaaaaaaaggaaatcctgccttttaccgcaacatgaattaacttggaaaacattatgctaagtgagataagccagacataggaagacaaatgatgcatgatctcacttacatgtggaatctataaaagagccagactcatagtaacagagagtagagtggtggttactagtggctgggggttgggagaaagtggaaatatgagtcaaagcataaaaacttttcactattggatgaataagttcaggatacttcatttacaacatagtaactctagttaatgcaaagcatatttgaaatatgctcctagagaactcaagtgttctcactgcataaacacacagacagttaatgtttgaggtaatggacatataattaagtagattgtggtaattatttcaaaatgtatacctatatgaaaacattatattgtataccttaaatacaattacatttgtcaatcgtatcagtaaattggggaaatacatacacacacatgcacataactattaaaactcaacagtaagggccaggcacagtggctcatgcctgtaatctcagcactttgggaggctgaggtgggtggatcacctgagatcaggagttcaagaccagcctggcctacatggtgaaaccccatctctactaaaaatacaaaattagccgggcatggtgacacatgcctgcaatcccagctactcaggaagcagaggcagaattgcttgaaactgggaggcggaggttgtagtgagctgagatcacgccattgcactccagcctgggaaacaacagcgaaactccatctcaaaaacacaaaacagagaaaactcaacattaagaaatttatatttaaagccattttttaaaaatgacmaagagcctgaacagacatctcatgaaagaataggccagacacaatggctcacgcctgtaattccagcactttgggaggctgaggtgggcagatcacctgaggtcagaagttcgagaccagcctggccaacatggcgaaaccctgtctctactaaaaatacaaaaattagccgggcctggtggtgcacaagggtagtcccagctactcgggagcctgaggcaggagaatcacttgaacctgggaaatggcggttgcagtgagccaaggtcatgccattgcactccacctgggtgacaaggtgagactgtgtctcaaaaaacaaaaataaataaaataataaaataataacatatacagatgtccagtaagcatataaaatatgttaaacctcgtatgtctttagggaattacaaataaaaaaaatgatacgctgctatacacctattaaaatgggcaaaatctaaaacactgagaacaccaaatgcccacaaggatgtgaaacaacaggaactctgattcactgctggtcagaatgcaaaatgatacagtcactttgggagacagtttggcaatttcttacaaaacaaatatactcaatatacaatccagcaatcacataccttgatatttacccaaaggagttgaaaacatgtttacacaaaattctgcacatggatgtttatagaagttttatttataattgtcgaaacttggaagcaactgagatttactgagatcagtaggtgactggaaactatggtgcacccagacaaagggacattattcaacacttagaaaaaaagctatcaagccatgaaaaggcatgcaggaagctgagatgtatatcactaagtgaaagaagccaatctgaacaggctagatgctgtatgatttcaactataggcatacctcagatactgtggatttgattccagacaactgcaataaaccaaatatcacaataaagcaagtgaatgaatttttgctttctcagtgcatataaaagttatgtttatactatactacagtctattaagtgtgtaatagcattatgtctagaaaaacaatgtgtgtgtgtgtgtgtgtattttattgaaatggagtctcactctgtcgcccaggctggagtgcagtgctgtgatcttggctcatttcaacctccacctcctgagttcaagcaattctcccacctcagcctcccgagtagctgggattacaggcgcatgccaccacaccaggctagtttttgtatttttagtaaagatggggtttcaccatgttgcccaggctggtctcaaactcctgacctcaagtgatctgccctcctcagccttccaaagtgctggcattacaggcgtgagccactgcacctggccaccaatgtacatattttaatcaaaaatattttatggctgggcagggtggctcatgcctgtaatcccaacacttttggaggccgaggcaggcggatcatgaggtcaggagatctagaccatcttggccaacatggtgaaaccccgtctctattaaaatgcaaaaaattagcggggtatggtggcgtgcacctgtagtcccagctactcgggaggctgaggtaggggaatcacttgaacctgggaggtggaggttgcagtgagccaagatcatgccattgcactccagcctggcgacagagcaagactccatccaaaaaaaaaaaaatatatatatatatatataaaatataactaaaaaatgtgaattattatctgagccttcagtgaattataatctttttgctggtggagggtcttgccttgatatttgctgaagattaaggtggctctggcaatttcttaaaataaaataacaataaagtttcctacatgaattgactcttcctttcatgaaaaatttctctgtagcatgcaatactgttttgatatcattttacacatggtagggcttctttgaaaattggagttcattctctcacatcctgccattactttatctactaagtttatttaatattctaaattctttgctgtcatttcaacaatgtttacaccacattcaccaggaatatattccatttcaggaaaccacattctttgcttatccataagaagcaactcctcattggttcaagtgtgatcatgagattacagcaattcactcacatcttcaagctccacttctaattcttttgttatggtcaccacatgtacagttactttctccacttaagtctcaaacccctcaaagtcatccatgagtattggaattaagttcttccaacttcctatgaatgttggtattttcatctcctcccatgaattatgaatgttcttaatggcttctagaatggtgaatcccttccaaaaggttttcaatttattttgcccccagatctttcagaggaatcactatctatggaagctgtagccttacaaagtgtatttcttaaataatactacttaaaaattaaaattactccttgatccatggagtacagaatagatgttgtgttagcaggcatgaaaacaacatccatttccttgtacatctccatcagagttcatggatgactaggtacattatcagtgagcagtaatattttgaaaggaatctttttatctgagcaataggtctcaataatgggcttaaaatatccaataagccatgctgtaaacagatgtgctatcattcagacttcattgctgcatgtatagagcacaaggagaatagatttaggataattcttatggactccaggattttcagaaagataaaagagcattgacttcaactgaaagtcaccaattgcattagcccccaacaagaaagtcagcttgtccctcaaagctctgaagccagcattggctacttctctctagctttgaaattctaatggaatcgtcttttgattggatgttgtttcctctacattgaacatctgctgtttactgtagccaccttcatcaatgatcttagctagattttctgtataacctgatgcagtgtctgtatcagcacttgctgcttcactttgcacttacccgttatagagaaggcttttttcctcatgaaccaaattctgctagcttgaaacttttcttccacagcgtcttcacctcttggccttcatagagttgaggaaaattayggccttgctctgggttatgttttggcttaaggaaatgttgtagctggtttgatcttctagccagaccactaaaactttctccatatcagcaataaacctgtttgactttcttattcttgtgtgcagtggagtaacacttttaattttcttcaacaactttttctttgcagtcacagcttgactgtttgacacaagaggcccagcttttgccctgtcttgccttttgacatgccttcctcaccaagtttaatcatttgtagctttttatttaatgcagctccccctttcacttgaacacttagaagacattgtagagttattcattggcctaatttcaatatcatttatctcaggcaagagggaggcctgaggggtgggaggaaagaaaaggagggagaaagggatagggaatagctggttgttggagcagtcaaaacatacataatatttattgattaaatttgccatcttacatgggcatggttcagggcaccccaaaatgattataatagaaacatcaaagatcactgatcacggatctccataacagatacgataataatggaaaagtttgaaatattgcaagaacgaccaaaatgtggcacagagacatgaagtgagcacatgctgttggaaaaatggcaccaatagacttgctccctgcaggatgccacaaaattccaatttgtaaaaaatgtaatgtttgcaaagtaaaataaagtgcaataaaacaaggtatgcctatatatgacattctagaaagggcaaaactatggagagggtaaatggatcagtggttagtatgggttaggggaataggaagaatcaataggaagaggaccaagcatttttgaccgagtgaaactattctctatgatgtcaagtggtggatacatgtcattatgcatttgtcagaacccatggaatgtataacaccaagaatgtaccctaatgtaaactgtggactttgggtaatcattatccttcgttataggttctttgattgtaacaaatgtaacactctgaaggaggatattgataatggggaaagctatgcatgtgtagggatgggctatatgagaactacttattttccactctgttttgctgtggacctgaaactgctctaaaaatcaaggttattaatttaaaaaaagtagagggcatagaaccgagtcaccaccctagtgtcccttctttccacayggctgattttatcttctaacagcaggggctattgtagccaaaagtccttgccaaaccatatgagcttctcaatttttatttcatggaagtccactgggtaacacaagaaaagcaagcctccatcaggctagcaagtagtcaaaagcaaatagtgcctactgtgcccagggcgctgttctgagtgctaggaagacatctgtgaacaaaacagacatcagccctgttcccatggagaaagacacaataaaaataagtaaaaatctatcagatggggataaatattgtgaacagaaaataaaagcacctaggaagggcagagtgtgctgaggggtgggtgagggaggctgtcacttcatacaacatgagcattgttcagaaagcaataagacagttgtctattaggtatctggaaaaaaacctttccaagtgaagggacaagactggaatgtgagtggagttgggaggaggcagagaaaagagagggattgggtatcaggcagctcacaattatattgcaatcctattaggtgacaattggaatgcaaattatacatgaaattctgtggagtactgagagatttatttgttgtagaaaccagggcactgaccgcctactagatagtgatgttattgggggtctcagttaccccaaagggggctttttcctgtttggtgttgcaaaagccaatacacaaaactgaaagtgagtgtcaagcattactgtctttattcaatcatcatggaattggagaagtgggaacatagctcataaattaatttcccagctcctgagaaccaggcagttacaaatacagggtatctttaacatagggggttgggttgaagagcaaggggaggaatatttatgcttttcttttgaagggagtgagactttcctggaatcaaggagctgcctcttttctattttttcttggtctgctccagtcattgtcatggtgactgtcaactgtcatgatactggtgggagtgtcattcagcatggaaattggattataatgaagctagaagttcttcagaggttgagtaagctgcagttttggattttgctaacttcagctggtttatttctaagaaggaactcctgaccacagacatcctgtttgctaaaaataagcagagttaaagctgaataggaatctagttttgacgtattggcattgcactgggcaacataagtgggctaggagtccaactaatacatgtaggcactgcagtgggtaacagtgagtgactaattccagttgtgttttgcttcaagaacttgctttttctattagactgagatatcttgctaatcttaatgaggcatcatcaagtcattaactggttgagcccaatcactttgtccatattttcagccttcacaggagtcaggctggatcagataaaggatataccttcttttcctcatagatccttgtgagagtttctgcttatactttttttttttttatttaatcaattttccctggcaggtctgccttttaataggtataaagaaaagccaggctttggtctacaccatatacaacctcaaagagttttagttaatgtttcttttaccaaaaaatgctcaactaggttttctgaatacatctccttaactgcagatttctcccggtggcttttgacagaggcatggcagtatggagttaaggatgctggccagtgcgcactcagcacctcccaagatctttttttttttttttttttttgagaccgagtctcgctctatcgcccaggctggagtgcagtggcgcaatctcggctcactgcaaagctccgcctcctgggttcacgccattctcctgcctcagcctcccgagtagctgggactacaggcgcccaccaccatgcccggctaattttttgtatttttagtagagacggggtttcaccgtgttagccaggatgatctcgatctcctgacctcgtgatctgcccgcctcggcctcccaaagttctgggattacaggcgtgagccactgcgcccggcgcacctcccaagttctgtagtcttaagcaggctagttacactttttagtcttccttatttgtaacatgtgatattaatatcagtgtccatctcataggattctacatgtgaagagctcagataacattgtatgtactcaaagagcattcgttgttatgatgttgtctgttaggattttttttttttttttagacgcagtctcgctcctgttgcccaggctagagtgcaatggcgcgatctcagctgactgcaacctccgccttccgagttcaagcgattctcctgcctcagcctcctgagtagctgggattacaggcatgagccaccacatccggctgattttgtatttttagtagagatggggcttctatatgttggtcaggttggtctcaaactcccgacctcagttgatccacccacctcggcctcccaaagttctgggattacagacatgagccatcacacccggcttctgttaggatttttaagcataatggtctattcagaaatggaattgtgacataattattatagaagcagagtgtggaatctttattgcttatattccagttcttaccattaactctgtgatccaagtaccacctaaaactactagcacatatccttcaagatatgatagactaaattatgctacatttttaaaatgttgtaattgctttatgaatatcttttcttctaagcaacctaactcaaaattattttcagtggttggggttttcattgagggttcacgttgtaggttttagtaagtattgagcaaagaacaccaaaaacaatcaagaaaaaaatgttagaaaatgagtaacaaaagctatcatttatagtttgcttctgtgccaatcattgtgcttatgggttaatttagattacaatgattctgtgtttatttagcatcccatttgatggcataagattatagtgaaggaaatccagtcacacactgcatttctgcaactcttatggaaactagctgtatcctatactgatccttttttcaagygtgataggagattttgccacctcaaaaagataataacctcttggaaggcgggtgggatgcctcagatggtggtttctgaactccacagagcgacttatttcagctctgtgtatacagtaaatacttaaatagagacatactttcaaatgttctaaaagctactaagatatatttgtaaaaaygtagtgtaaggattaaagatcaaaagcagaagaaagtaagccttgatttaatcacttgcagatttattttcatggaatgcttattttgttaagcttttagcttcttctggcacagtataggtgttgacagaagctctctttttcatttatagataagtcaacctgtaaacaaagcctgaaaataaaaatgcttgctttgaaatgattttttaaaaatggtacaagtgaagaattcaaggctgcatatgtcgcatcttaattatgactatttaagatacacattttaagatcctttcctttttttgttttttgtttttctattacaacagtagtcactttatggttagtccaggctggcatttctgtttgcaattttcatttaagataattttatagttcctctttcttacgaaattaagatccatacctttctttttttttctttgtctttgatcttatgcttccccaagtgtgttgctcagaacactaatctcattagatatccctcaagaatggatcctatcatcaaatatgtttggaaaatgtcgcatgaaatatgcttttaagaggttcaatgtatattagaataatatagtttgtgaaaagttatgaagtaaaggaacattaaatgttgcctaatcacatatttctcaatattttttgttcttggaaaatgtcctctcccatacctagggatgatagttaaaatatttaaccagcatatcggctcacaagccagtctgctgcctaacctctttgttgggcaaaaagcatcctctgctcttttagagctcatgtccataggagactacagctcccataaatgtgcgactagaactggaagcatctcttagctgtgaatcaggacttacagaggggcactagaaattgccttccatgaccgggcgtggtggctcacgcctgtaatcccagtactttgggaggccgaggtgggtgaatcacaaggtcaggagatcgagaccatcctggctaacacggtgaaaccccatctctactaaaaatacaaaacattagctgggcatggtggcgggcgcctgtagtcccagctactcgggatgctgaggcaggagaatggcgtgaacccaggaggcggagcttgcagtgagccgagattgcgccactgcactccagcctgggtgacagagcgagactccgtctcaaaataataataataataataatamcaaaagaaagaaattgccttccatgatgcagtgccaacccaaggtcactgtgtcccccactggggagcagcctgattggcaaaggcatcgacagatcagcacaggtgtgttggtcttggtgctggagcaagttttttgaggatctctgctgtgccaggcctcaatcttttgattgctagactgtgaggaaacttgagaggcccctgagtgagagaccataggtgataagcctcgcaggaacaactactcagagaacttggtgcagtaactatttatcaactggtttgaaagtatttactatttttacttctgtaccaccataccaatgtacgccggctgattgttggttctaccgatgaaacttgtcaacactctatctaattccagttctttgggacacgcttggacaaccgctgatctgtaccacttggatgtgtgaaaatgcatcattttctctctatcaattgcttattacaaagccatgatgtttaaataggcaattctgctctagtggagaattatcaaaatttgggttaacttttgagctttgtaaaatcaagaaacaagtgatggcaccaaaaaataatgatagataccttgagggatctggattggtggatgaattatgttacaataagataaaaatgtccaataatatagtgtaagctttctgaaaaaaatgttgctaatgtaaatctaagtcactctattgtcatcttgtcacattgggattagagtttaatactcacccactcacccacccacacaaacacacacacacatgcaaataaggatgattgtatgtagcatccttataatataatcctcatttgcctttctatggcttgttttttaaatgtgaaaatcttcatcgagtagctcagggatcaagttaatagaaattataagaaactcttcacactctctatagactagttcctacttttttagtctcttttttcattattccactaggaaaattgaaccattttcttgtctctcatgtagtcttaccgatttccacctatcatcaggctaaatttattaatatagcagtatttacatgtttcattcttctcccaccatccccgcccccaggtagattttgcatctggtttttttgttctggaacttgtgagtattgttcagaataatgaatagaaaaaactgtacaataaaaggagatagaataaggctagcaagatgcgggagacacacaagaaagagaatgttgactcaggaggttaagataagaatggaaaaaaagacaaaacaccaagagtggactaggggccgggtgccttggctcacacctgtaatcccagaacttcgagagtttgaggcgggtggatcacctaaggtcaggagttcaaggccagcctgaccaacatggtgaaaccccatttctactaaaaatacaaaaattagctggatttggtgatgtgtgcctgtaatcccagctactcgggaggctgaggcaggagaatcgatcgaacccagaaggcggaagttgcggtgagcagagatcacccaactgcactccagcctgggtgacagagtgagactccgtctcawaaaagaaaaaaaaaaaaaaaaaaagcgaaaacaaagtggactgggctaggaaagaattcttcgatatttcttagagaataccagggaattccctcaaacaagctatgaattttggagaaaaagatagatttggaaggaagatgttaagaagttttgttgtgattcattaataagatatcctgtgaaatagctctggaatgctcctcaaatattcttgactatcaagctaatgtgtgtttgattatagtagtgcagagactggtcctgaaataagccaggtatatatttttgttacaaaggtaacatctagtctgtgatgctctttctaattttgttttctaaacttacccattttcaaggttcatagttctttcaagaagttttgcgtagtactttgttcctcggcgattaggaatggcatctaaatcctctgaagtgttgaccgttttctgtttgccatctatgtataaattttaggaagaaatatcttgaatttccagccagaataaatccttaattcctagctccaggatcacttttatgcagctttcttgctccagtgtttggtccactgtgtatactgaatggatggtagtgaggttgttaacatgcaattctgcttagtcgttatggcctataggaatttgtaacttttaccagtttcagaaattaattaagatgattacaatttttgtgtttttcgaattaaatcaactttaatttctaagcattgttaactcatatctctatctttgcacttaacatattctaaatatttgtttatatttctttctttcaaataaaattgtgacatacttgagagtagaggctgtgtgctatgtccttacacttagcaacactgtctggtaagtcttaggagtgctacaaatgtgaatgaatgaatgaatgaattttacaaacaatctcctaagaaaagaaagctgagaggaaattttatatcattttatgtctatgtcctttttatttatttatttattttttttgagatggagtcttgctctggacaagactccgcccaggctggagtgcagtggcacgatcttggctcactgcaacctccacctcccgggtttaatcagttctcctgccttggcctcccgagtagctgggattatagacgactgccaccatgcttggctaatttttgtatttttagtagagacagggtttcactatgttggccaggctggtctcaaactcctgacctcgtgacctgcctgcctcagcctcccaaagtgctgagattacaggtgtgagccagtgtgcctggcctttttttgttttgttttgaaacagagtcttgctctgtggtccaggctggagtgcagtggtgtgatctcggctcactacagtctctgcctcctggtttcaagtgattcttgtgcctcagcctcccaagtagctcggactacaggcatgtgccatcaggccaggctaatttttgcatttttgatagagaaggagtgtcgcaacgttggccaggcttgtctcgaattcctgacctcaagtgattcacccgtcttggtttcctaaagtgctggtattacaggcgtgagccactgtgcccagccctatattctttaaatttttttwaaaaaaaaaaaaaggaaaaaaaaaaaaagctgaggtataatgaaagcaacatggggcctaggcgaaartacctgaattcaatttctagctgtccatttatcaggaaattttttaaatttctttgaataagtcactgaagttcagccattttcatcaaagacagataataatccctattgtacatagttgtcatgatgatataataagattaaaattctgaaatagagtagaccttcatagagaaggtaattaaaagcaatttatttaatccgagtgaataatttattgaccaatggctaaagctgagaggctctataggaaaaaacagtgtcagtgtcgagaagtcatgtcctcctgactcaggattgcttaacactggaaaaggctatggagtatgaaattcatgaaatctcactgattattgagacattttcttgctcttaaataataagaaaagactgactgacctttgaagggactgacccaccatatattccctgactcatgaaagaaaacacaatttgttgataaatcaggagaacctgcttttctactgggccaaacataaagtaaaagtttggaaatgtcatatctgactamaaactctttaattctttggtcaaatcaagggacaccctcatctcttaatctttttaaattaaccacattctttatgcaatgtgcgtacattaaggagcagtagagagatggagttttaatttttaccaattcaatctaaatgcaaattttaaccactcacatgatgctactgtgtacataattaagcatcattatatactacatgaatcattgagaaacctcctgagagccattctactrtgtaaagcatgcattatactgacaagcagccaaatgacatatacttctgtcctcattaatgctctttttggattataggtcaaccgattatggaacaacctatgagaagctgaatgataaagttggtttgaaaaccattttgagctatctctatgtgtgtcctaccaacaagcgtaaggtaagaaatgtatattcagyatgctactcattcatgatgtgacttctgtcttggttggctaaccactctagctacctaaaaatccattacagttaatctgggattagaaatgtaaagatgggttgatggatgttaagattgtaaaatgtctgacacatcataattttcagatcagcagctgtgaatgtaagagggtgagggataggtagatcattaccatttccaaaaggcagctacaaagaatgagtcttgttgggtggatgctgctgactctctagtaagagttctgaccagtcaatcagaagagtcagaatgagtcttgacaagacagcagaaaagatggattttcatctgatgtcccagtttttccttgacatggaacaaatagattaactagaatttaagtgaatgcattgtcctgcagcagataggaagtttcatttttaaagtttgttcagtctgcacacaaatgtcaggatgaatgcagtgcatttagcagaatagagtagcttggaaagagtgataagattagtcccttctgagcatggatyttagcttcaagaagccttggagatcatcatctacaacaccgttattttacagataagaaaactgagattcagaggaaagaaatagtttgtgcccattgcagagttatggccataattaggactagagttaaggcgtcttggttagcagtcatactttttccactatgtcatacatctcctattatgagagcttatctactcctcaggtatgtcattttttaggaagaaaatattgtttttaaatgaggaagacatttatttgtccctgaaggggagtggtactacatctatacctttattttcataaacttgcattatcaaattccaaattctgacatacgattgttaagtagtacataggttacatgaactaatagtattaatcaggaaatagaaacgtgtcattcattaacataccctaaaccataatgtgttatgaaggtagcactgatgtctatgttctcatctcagatttttcattagctactgttagtgaccttgggtagggtctgcattttgccatctggaatatggaaggtgatgaaaatatctcttaagcaatcactctcaattctggctgcttgtcaaaagtggtccccaaacgtgcaagctctagccccaccactgttgctctggattagggctcaggtaactatatcttactaaagctccccagatgcttctgataggtatctaggattaagaaccactaatataaagtgtaatgttcattctggctgtaagcatttcaagttcttcagtagaaacagcataacttttcagttgagcatagactctggagtaagaagaagagagaaaacccagctaaacctattaccaagtatataagcatggtgatttacttaatctctccaagcacagtgggattcggtttaaaagggggacagttacagtacctacctacctcgtgtgggaagttgtaaggattatatgaaattaggcatttcaggtgcttagcacagaatagtaaaagcttaattaatgttttctcttcattcttttttyttgctgaagtgtccagcagaacttgatgatagaaattttcttctaagctcttctgtactttagacattaacaatttatggcttttgaatgtttgaaatatggctagtgttactgagtaattggattttaaatttcatttaattttaattaatttaaattgatatagctgtgggtggctgatggccacagtaccacacaaccaatactgtcaacctcacaaatttagaactacacccaaacattcctatcttcccttaattggctggctacttcatcaacaattacacctaaacaattttgatctgctgtatgcagtcccaaattaaggaactgaacttatatcttttatttttatgatgaaatttagttgtttgttggctttgtatcgatttttacaatctctcttaatttttcttctagttcacatttttagcaaatttaatttaacagtcaacaaactgtatgctaggcaatgtgctatgcactgtaggatgtaaagagaaataagccagcaactcatcctcagaggtcctatattctagtactaaatgtggcatgacgttttgtaattgaaagatccctgaactaagattcagaaatctaagtccctgccttgaatctacttccacctaacaggtgactctgggtgaatcatttacattttctccatttgtaaactaatataggaaaatggaagacatttatgcctggaagagacctcagagtaatcaatgatagtctctgtttcactgatgctgttagagagaaacatgaaaaaaaaaaaaaaaaaagatgccaaatatcaaatctgactataggcttttctgtagctgcagaatatatggtgatgatccagaaactccaggattgtttcaggagcaggacttaaggagtgagatgctcaagtccagatatagctgctaagactggaagggaagcagagaggtaataatacagcaaagagcctaaccatcaaatccactcaagtcaatataccatgaatcaggctgcataattagtccatagttatctgaaggacgtttaaaagggcatttagccatgggcattttactgttcttaagacttgacacaccctagttctacaaaaagagaagtccctgtgcatgactatgagggaatggctttctctgggactgttacccttcagagcagaggtggtcctgagctgtttaaatcacaatgttatgagtgaacctaaaggaagggatcttttcctctatagataaatgaggccttcatggtcactttctgagatgctgatagatttaagaaatattggaggacgatgaacgtcttaacaatggtacacaaatcaataaagttgacatcgcagtatatttgtgcatagtttttctacttataaggtgaatttatcaccatgaaatatgtactccgcccacccaaaggacatatttgaatcaaagagatagtacttgcacaacattttaaagtgtgaatatattttctccaatcaatgagaatttatgttaaaacaaaaagaaagaaatttcaggctctgttaattatgcagaacaaaggcagtgctcacatttgctccaattcttctaggacttaagctatcctccagtgaaaagggcagactcctttaaaaagttgtattaattctctcaggtctccgcggtgctatctagcaagtcaaaatcttttgtaccagatacttctctctgcttttcacgctagtgggagcaactggaataaaactgacaacatcagggtaactctcagcattcccggaaacctgttttgccttcacattcttatagctatttttagccatttgtgcggacaagagcagttcttcaatcatcatgttggaaacagcaggcttcatgccttgcctttgcaggcagcttgttaggggtactaccggggatcagagtccagaataaagcaggatcttatttacagtttaaattaatgatcatccatcgactgtttccctgcaagcctgctgtaaattacagcagctttccttggctaggtctgttacagtaaaaactgtaatctcaacatatgtcagtgtaagaaatcttgactaagagatagaaagaggggtcctaggtattagcctagattgttctttcaaaggaaacctgcatctggccgctgatatatgaggttagcccagaagaaaaggctgagtggtcccagtgccagaggagaggcaggctggctatctgtcacgatgtctcagagggagagcagttccccccaccccagttcatgataaatcccaaggcttgtttgtgtcagcagaggtttattggtcacataaagtctgctgtaagaaaagatgatttaacctgtaccggaaaggaacagctgggatgcagaaggtgatgggaagaactaatacaaatgtagcaaagaaaaaaaaaaaacttggctgggcgcagtggctcacgcctgtaatcccagcactatgggaggccgaggcgggtggatcacgaggtcaggagattgagaccatcctggctaacatggtgaaaccccgtctctactaaaaatacaaaataattagccaggcgtggtggcgggtgcctgtagtcccagctactcaggaggctgaggcaggagaatggcgtgaacctgggagacggacgttacagtgagctgagatcgcgccactgcactccagcctgggtgacagagcgagactcagtctcaaaaaaaaaaaaaaaaaaaaagttgaaatctcaatttcactctcaaattctctgagttgatgtgtattctgcctaaaaagaaaacttctatatactctgtgtgtctttatcagccatacctttcccatcacccccaactaacccaagctgttctcccttcacaaggatcgtgtaacatcttcaaggattaaagaatataaaacccctagtggaattcactggggaataaaaggaaaaaaaagtgttttgttttggttttttacttggaaaagccaattcttttagttgttttatccttgtggtctcagcacactatctagcaaagaaaaaactagacagtatttgttctttatgttttctgcacccccttcacactccagttttttctcatttctgtgttatcaccacttaatttacatcattcctgctgagagactcttctaagactttcattctataaagaggaccctagctcctcagaatacattggtcattcctacgggtctcttggtacataccagcattaaacactgtgttttctccagatgtttaagttttaattaccctattatatgtggcactttctaaataagggtttgattattgacttcttgtctctttatatctgagcatgcttaattcctcttgtcatttggttgagtagtttgtgtatcatgtatgtgactttttttttttttttttgagatgaagtctcactctattgcccaggctggagtgcagtggcacaatctcggctcactgcaacctccgcctcccgggttcaaaaaattctctgcctcagcctcccgagcagctgggattacaggcgtctactaccacacccagctaattttcatatttttagtagaggtggggttttaccatcttggccaggctggtcttgaactcctgacctcatgatccacccgcctcggcctcccaaagtgctgggattacaggtgtgggccaccacacccagccttttttttttttttttgagatagagtcttgctctgttgcctaggctggagtacagtggcacaaccgcaacctccgcctcctgagttgaagcaatccttctgcctcagcctcctgagtagctgggactaaaggcatgcaccaccacacccaactaatttttgtacttttggtagagatgggatttcaccatgttagccaggctggtttcgaactcctgaccccaggtgatccacccgcctcggcctcccaaagtgctgggattacaagcatgagccaccacgccaggcccatgtatgtgacttttgaggacagcaaagaggaatggttgataggatctgccaccttctcttaggaagaatcacgtatcattgaatctgaatctaaaagattttggggatattaaaattctactcttttctttaacagatatggagactgagtcccagagagtttagtgacttgtctgaarttacatgcagctggggaatgataagctaagatcattagaccttgaaagtgaaccttaaatgccacctcttccataaaatttaatcaatttccctgaggagacttgctcactccctcttatctccaagacatccgttttcttttttctagcactttactctcacttctgattatagttgttcttgaccatgtctaatactccctttagaatgcgaggacctagatggcataaagtgccttaatcagttatgtattctttaacgtgccgagcataggattttggtatacagtaggtgtccaatacatgactgaatatttgaattgaactttggttcgcttttggactcctaggctgaaacttaaatgaaatgctctgtgaaatcagctttgactcctttcttttctctaactataaatttaattatttcaagtgagtaaacaagaacagtaaagaatctctgtaggttttagtcatttctaggtcataatgtataattttgtctgttctaaccaagaagaacatgattaatattttaaatgccaggactttgcatagcactcacttgacattatctagggaggccaagaggagctagcgtattgtataatacatcaaagggggtgcatgacattcccttggcggacaagcaacacttgctcattccaccttaactctttcatctgtcactttgtacacaagatcatccatttgcctctaatctttttaacaaggatgtatgtttcattcataaagaaatggtccaggtgcggtggcttacacctgtaatcccaccactttgagaggccgaggtgggtggatcacctgaggtcgggagtttgagaccagcctggccaatatgctgaaaccctgtctctactaaaaatacaaaaaaattagccgggtgcggtggcaggtgcctgtaatcccagctacttgggagactgaggcgggagaatcacttgaacctgggaggtggaggttgtggtgagccgagatcataccactgcactccagcctgggcacaacagagcaatattcaaaaaaaaaaaaaaaaaaaaccacacatgaattcagagacatagtggaagtggcattttccaaacttcaataaaagtgacgtgtagtaagtaaatccttacttccctacacttaacctgaggaatgatggccaaagggaaaggtcctctcctttgatctttttttgggtaccgctgagtgtttatactgtttcagtccatgaagcattgttctgttttcttcctgaacattaaaaatataaaatccaagaaagcatgctgcatctctctttttacttggagtgattttccaacagtaatcccctgggtttcaaatgagctacagaataataagtgcagaatgctctctttgaaacagggttggagtgccaggagcagtgcccactccacaaccccttgtcactccaagaagtccctgcggaagcctctggaactcgtgggctctttggaacatagagaaaaacaacactgatctaagacactcctctctgtacactgacctatacccgaaattgccatatattctatattagtttatataaatcaaagcacctattataacattcataaatttaaaaatgctaataaaactacactcttaaattttaatacaatatgttacattacacactaagtacctagttgatttttctgggatattatctgtgtctaacactgatgtagtaaaaaataaattaattaatgataaatcaggttcaggcagtaaattctratcaatgcatacattccaaaacttactttttccttcctcctatcttttcttgtcccccatatctgctaatttgcctggttctcagaggtggtttactgctttacttcatgtggcattaagtacttttttttttttttatttttttgagatggrgtcttgctctgtcacccaggctggagtgcagtggcacgatctcggctcactgcaagctctgcctcccagggtcacgccattctcctgcctgagactcccgagtagctgggactacaggcgcccaccaacacgccyggctaatttttttgtatttttagtagagacatggtttcacagtcttagccaggatggtcttgatctcctgacctcgggatccgcccgcctcggcctcccaaagtgctgggattacaggcatgagccaccatgccctgcctagtacaaagtatttttttgatagaaagaagcttcctgcttaattaacatatttgttattcttcatttgtaagtgttatgtctatcacatataagaagcatctaatgcattacatattaatcatgaattggtgactttaaaaactaagttatatctgtatgatgatcaagtttatatgttattgacattataattcaaaattgtattagctacatttatgtatttttaaaagatacaggtatttagctagctcaataaataggtagaaaggtaatagataggtccacctataaatctcttctaagtttagataatgcttttttcattaaaaaatagactctatcttttggtttgatacctttttaacaaatgaaattaatcaaggtaatgatagcctaaattactctctaaatattatgaagattgatctggaaactgcatgttttttatatcactgagtggttcttggaaaataggttgcctctgtggccaagtgatcagaaattctcaaatacaaaaggaaaccttttggaagctgaccattcttcaagtaagcataatagactatctgcgcaatcttctttgagaacaatttgtttttaaagttatctgtctaattatttatttatttttgtctcatcatctgtccttattagagctcatgttctctgaggtctggctggccaaatattaagtgcccatccattacccttttatgaaggtcaaatgcattatttctggttggttccaagttatgctctgctgtggaaaatggtcagaggtcttttcaacattctggtctgtttgcttccagcacactccctgtggtttctcaggggtttccgtcatcttgtgtttgacatactgtatctagaacatttgtttctagtgaatagcctgtgctgctcttatataagatggatggagatgaatgctgtccgctacaggaaatttgcgatatttactagggtggagatgtttcactccaatgtatcagaactgccccaagctttctcctggtgctgtcatgaaaacaaagtcaatgtggatgaatctttaataaaaccactatttctcccctggrgaaattaagagtgcaccaccagcctcaggggctaaattgtttccattcaaacatttcttttgctgacctgacctttcccttgaccagatcttcttttgatggttttgtccctttgttcctcaaagcatcacttccctactttactgggtccttgacctctaatgtgctcttgttttacaacctttcaagtcaagtacttaaattaggttttgcagaacaaaaactatagcttgtaggtaacaggtaggcttagatgctcataggtgaaaaggcctgctgtatgggatatatacaatataacagctgggagagaaaaatcttttcctggctgcttgggscagtatgtgtgtttggggartagaatactaagtgttgccttgattgatggcatctggcaccaggaaatgaacatgcttatagtggagaaaatgacaatgtggatgtatccaaaaaacaaaagatatgtaaaaagaaaatatctggaatgcacagcctctcacagataagagaagaggcatagaaggaaggatacagaggtaaagccgagagagaagacgacagagattactgtgcagaatttaaagtaaccagagtaatgggagaatgctaatacaaagagcacaatgaagacagagggcagaagaaaaagaaataataaaattgtaaatattttcagcagtagaagtttaggaatctctggagatctctcagagagaggagagctaatttaccaggaacttattaagactttcagagggagtacaatttacccttatctttctgttcttcctgagtggtttcaaaggggtaaaagatattgatggctgtggttgaaatcggttttgccaggaaggaaagcacaattatgactcaagtgtgggggtgtggtaggcctagatctaggttctccagctcccctgcagcagattcaaatatcatcgctgctgcccacacttaatggatttttgtccttttaatgctctcttagctactccctcataccactgtgcaatgatctcttgtatttatatgtataccttgtattttctgcactcgtcacgtataccaactcagcacctatttcctgtcactgcggagatacactttgttatttgaaggtggtcattatgaatttttgctcaggggcatcattagttgtggaacagtatttaatataatggaccctggagccaggcgacctggccttaaattccagctaagctacataataattgtgtgcccttagacaacattttatttgttggtttatttgttgtaaacccctgcatgacacagtttcctcctctccaaactaaaatataatgattgtgtcaacatcctaaagtagttatgggaaataaagagtcaaaaccagcaaagaacagtgtctgagacctagcaagcrttcaacaaatgttagtctcattgttactcttcttaactgttccaaattatatggccatgccttatgctgtcttttgtcaactcaaccagaaggtattaaatgcctattttgttccagatcttttttaagaactgggaaatagaaatataagaggttgttcttactcttaatgattgcacagtctggttgaggagatgaatgtataaacaatctcttacagcacagtacttatgtatcatgatagctatgtacatagaactctatctttggagactaggaaggtttcacagagatgcaaatatttgtcaaaggagaaggggaaaggaagatgaaaacagtctttcggtgtatgtactatgagaaactagtgtccacaagcgcacaatgcatatcttgacgtagttttcagatttaaatgattaagagtgtctatttagactcgtaaaacatgttaatttccactgctatcttactatgctaattaaaccctaaaaaattccagctggaggtggtggctcacacctgtaatcccgccgaggcaggcggatcaccaggtcaagagatcgagactatcctggccaacatggtgaaaccccgtttctattaaaaatacaaaaatttgctgggcctggtggtgcgtgcctgtagtccaagctactcgggaggctgaggcaggaggatcacttgaacctgggaggtggagtttgcagtgagccaagatctcgccactgcactccagcctggtgacagagcaagaatccatctaaaaaaaaaaaaaaaaatcctcatgacccatttgaattacagtttttatgtaataatgtaatttattttcaggtgcaataaactttcttcctgtcttgcttgtaaaatcagtaaatgggcagtggtgacattattaatattgaattaatacaactaaaattcacattatagatttgatatattcagcatgtatcttaagtactactggccagtcagaactattgatgaaatttrggggtataatattaagaagagattaattgacatgttttattgaacacctggcttgtgccttgttctctgcaagcataaaggtgaatataaaagaaacatgaacctcgctttgctcttacggagtttaccatcccagctcaggaatgcaattaaataatataaggtagtagagtggattgtacagacaacaaaggctttaagagtttagagagggctgtaatctcacatagtcagggaagcagcataaaagggcttaagctgaccaatgaagcagatcagcataacacaaagtcatgacattcacaacagaaaaatatcatttagttgaaccaatatttattgactgccaggcagtagagatacaaacatgcataacacagggccctgtctgcagagagctcacagatggaagggagaactatgtagttggaaatgagcatcgagtttatactggtaaaggtactgtatctttcattctctagaatcttaataatgtgttattatgttacatattctactcttttgcctcttaaagctcataaaatgttcctttgatagatcgtttatgtaaattcttgatgtagagaatacagtctctctaaacttattggaccctgaggaggtggtctggatcacaggagtgggtgaatattgggaaagatgaggaaatgagaaaaatggagtaaaacatagcaataaaagaagcagccaagcatttgtggggaagcaggaggggcctggtgttccaatgattagtacttcatctttttctctactactttctaaaaagggcccaaattcccttgaacaagaataactacaactttaattgtggatgctatccccatcagcatccagatttcaccgggatggatgtagcttttcttaggagccaaacccatccaacttgactcaaataattaaagtgtttggattcsaggctgtccaggaaaacagctgaacttgtgctggggaaagagaggttggatcttataggaaggcatgtatttgatattgaagtagtctgttttcttttgaatctctgtgatgtggtgtgtttgtgtgtgtccaccacttttgctttattagtgcattatttaacgaactgatttacgtattttctccactcactaatactgtctttgttccttgggcccaagccctttgtgcttccatttggaagtacattgctgacatttacagactcccacagaggactcagtcaattactaccatagatgcccattgttccaagagagctgacctttacccctaggcaccaattaaaatccattgtttcttacccctgcagcgccagtgcttgctgtaattctggctcgatgcccattgcaactggtgggatgcattcattttagtcttcgttttattattattatttttttcaaacaagaagagagggacctgcaaaagaaaatgtatgctttctttaaaagaaggggcagaccaccagaattaccaatcattttcaattaaatgaccttttgtgtcaacataaataatgaccctaaataaataaaataattaggaaaaaattgggaagttgcctgtaggattatcccagcttcaaaaaacagcagagctctctaattacttcctgatgatgatttgttgctaaattgcagggccgttctgccctaggcatagctgggtatgctctatggcaagctgacagagagaccaaagtcccagcatgtgggacatcaggcactgagccctctacctatcaaattatatgagttaccagcacactgctaggctggtggcctctcaggtaaacgtaagtttcttcctataatcaaatttaggtttagggcatttggagccagaactagtttgtctgaaatcacagatgttcattgtagcaagattggtacttctgactgaccagtagccttaaagatgtgctaatttagagaaataaaaatgaaaaggtattgaaaggtttataattccctttgtaacttttttcactcttctatttccactaccttctgttgtgctaagggtttgatgctgctgacattttaatgggattcgaacccaaattctaccaaccaaattattttggtagaaatggccataatacaaacacagtggcccaaaaagaattctgagtttactcagattgagacaagaagtcccgatttgctaaaaagtaaatagagcttgaaatttgcctttccccgtttgatttaaaattcaagatctaagcaagttaaagcttgacagaaagaactggcctcttcttgtagaagtagcctcttcctcccacttcctccttgcacttttagtgctaacaaccacatgcagaaaatgcaattaattatttgatctgcagaggaagtggtttctgcagttatatttcccttctcccctctatttactatttgaaattttatagacttgtgaagattatacttgtatgagggcttaaaaattcccgagagccatagcatctcacttatcctaccccacaggccttggtggtatagactgagagtataatatgatgagtaggaggccatctggctccctggagacccaagtcagcattctcttacccaggtaccagtggaaactgatcaagctcatttgataaagcccagaagattatcaaacccaaaccatttggcttcaattattataaatacaaagttttgcccatggttcattatgttcctcccatacatacctaactygggggaattacaaagaacactgaaataaatatgtgggagagggccttgttgaaattggatactggatattatgtatctacaactgcttagtttgttgctattttattttcttccctctctccctccctttattccttccttttttctttccaaatatcatttattagaaggacagaggccgggttaggtggctcatgcctgtaaccctagcactttgggaggccaaggtgggtggatcacgaggtcaggagatcgagaccagcctgaccaacatggagaaaccccatctttactaaaaatagaaaaattagctgggtgtggtggcatgcacctgtatcccagctactcgggaggctgaggcaggagaagggcgtgaagccaggaggtggaggttgcagggagccgaagtcatgccactgcactccagcttaggcaacagagtgagactccgtctcaaaaactaaaaaataaataaaaggacagaatataagaccacctttttttttttttttttttttgagatggagtctcgctctgtcgcccaggctggagagcagtggcgcgatctgggctcactgcaagctccgcctcccaggtttacgtcattctcctgcctcagccttccaagtagctgggactacaggcgcccaccaccacgcctggctaatttttttgtatttttagtagagacgcggtttcaccacgttagccaggatggtctcgatctcctgacctcgtgatccrcccgccttggcctcccaaagtgctgggattacaggtgtgagcgactgcrcccggccaagaccaccttgtatatttacaacatagtatattttcagaatgattacagaactgtgagtatgaatgtgtaatcatcttatccttataaaaataccatgaggtgggtaggagaggttaaggcattgctgctttatatgtgaagcctagttagtgactggttgcctttaactagaaccccgatctttgcatttctggtctatgttcttctatcatagtttactgttttccaaaccttgctccagttttcttgtctggaaggttagtttttactagtgttcttcaggctgatccctctgtagatcttcaataaatttcgcgttttaaatacgaattatataatctcagataaaatacaaagcacagagaaaatgtaaaggcaaaccatatgtcatatttttaagttgccttatgtaaaataattcagcttgtcatttctggataacagccttgacagatttacaggataagcttgatgctttcagaagtctgaaaaggattctacatcgaggatcccaagaaaaccttgttgtaagtccaggtctcagtactggtttctaggaaggactcagtaaatacttgccaataagtcaatgaataaatacatgcatggatgaatgaatataatagataaaaggaagttgatggattttctcgttggtatttcttttgtttttgttttgagacaatgtctcactctgtagcctcagctggagtgcagtggtgtgatcatagctcactgcagccttcaattccygggctgragcaatcctcccaccccagcctccaatgtaagtagggatgacaggcacatgacaccgcccactgtcccctctgccagctaatttaaaaacattttttttgtaggtacatggtctccctatgttgcccaggctagtctcaaactcctgggcccaagtgatcctcctgcctcagcctctcaaagctttgggattgcaggcgtgagcccactctgcctggcccttggtatttctaagattagagttgccaacaataatcaagatagattttcaatggcagggagatgtcatgccatttctgtaacaagacaatatttcttgttctaactttaagatttcctggtggcctacagctgcctctctttactcacaacgtacattcgtttactctgggtttcttttctccattggagggaatgcatttcagaaatgcgcctgtcaggccgggcgcggtggttcatgtctgtaatcccagctctttgggaggccgaggtaggtaggatcacgaagtcagaagtttgagaacagcctggccaacatagtgaaaccccgtctctactaaaaatacaaaaaattagctgggcttgcgggtgggtgcctgtaatttcagctattcaggaggctgaggcaggagagtagcttgaacctgggaggcaggggttgcagtgagccaagatctcactattgcactccagcgagggcgacagtgcaagactccatctcaaaaaaaaaaaaaaaaaaaaaagaaaagagaagaaaaagaaacaaagaaatgcgcctgtcctactcacttatctgtggccagtgtcatgagggacaatacagttcgctgatgtttggtgcaaggatctgcttagataccattgccctaaatgatgattcttggagaagccacagctgagaaatggtcactacattattgcatgtgcgtgctgagcagaacttgttctttcccttgtacagcttttttcatgggctctgatcaaatcttgtggctctatcgttacctttaacctttgagatatactaccattaaatctgtaggtacttgctttttctgtaggaactactagtctttctcagctccctagaaaagagagatcctattcttccatgaaatttcctctgtagtataaatagctattaatatatacataatatacatacatgcatacatgtatgttgcatttactctattaaacactgaacacatggatcctagtgaataactctccccccactttttcagtgacagacactttttctatatcagatttataaaagaaactaatagaactaccacagggaaagatataaagacaaatattagaaagaaagctgtttacaactagacctaaattggaactagaaatctgcctttgccttttgagctaagtggtatttaaagtaacccacactcacacgttttaaagaagaaatagaacagcaatggctccagcttctcaaatcagtgattataataaactgtaagctctaagacatgcatatgtgaaatgtactgagaacattcccacgtatggtggtagtagattcagaaacaaaacaaaactccaggctgggtgcagtggctcacacctgtaatcccagcactttgggaggccgaggcgggcggatcatgaggtcaggagatcgagaccatcctggctaacacagtgaaaccacgtctctactaaaaatacaaaaaattagcaggatgcagtggcgggcgcctgtagtcccagctactcgggaggctgaggcaggagaatggcatgaacccgggaggcagagcttgcagtgagccaggatcaggccactgcactccagcctgggcgacagagctagactccatctcaaaacaaacaaacaaacaaacaaacaaactctgaaaccatcaaggtaagtatgataaactccattttcaagttgaggaaatgaagattcagtgagtggattgtccaggtcatgtagctggtaaccatgcaaggatgtggcaacctggagattttctcgagctttttggttaacattcacattctctacatagtaactaaagagtataatctccttagggccacaattatttccccaagggtgcctgggagttaatagcaactgctcaatgaagcaagcagtaacagtaatttctgtttcttagccatttatagcagagtactgctgcttgaatgttttgatatctttgcttttcccaatataaatgaaaatcctaaagatatgcccagttgcctttcaagggattagtgggatgaagtgcctaaattactactgaggttcttaaacgtccgcatatatgaaaatcatctagagagcttgttaaactgcagatctgggggcctatttctcagaaattctaggtcgttagttctgagaatctgcattttaacaagcatgtgccacttttccatctccctgcagttctgctgcacgtagaccaagtactacactttactaaacagaggtgagctgtgccaacaggaaggcattatttttcagtgaaactcttggttacattttctctttatgaaaaggctcttggtgttggtgatgcaaggataaatattgaagttatgtgtttgaaaccagcagtcctctactggacagtggaagttttgatttgaaaacttctggtggctcatgcctgtaatcccagcactttggaggccgaggtgggtggatcatgaggtcagaagatcaagaccagcctggccgagatggtgaaaccccgtctctactaaaaatacaaaaattagccggatgtggtggtaggcgcctgtaatcccagctacttgggaggctgaggcagagaattgcttgaacccaggaggcggaggttgcagtgagccaagaatgcaccgctgcactccagcctgggcgacagagtgagactccatctcaaaaaaaaaaaaaaagaaattataccctttttctccatttgtccctttgacataaaaactagcctcatgatttctctcctagaaagacagctgtattttgcatttggctgctggatgggtgaaggagagtacatagacatgctcagagcatctttgaaatttaaggaaatgggtagccacagcttttaggagtgcattaggagagcacagtgagcaggtagcactttcccctctgctcttccacttaggaattgaagtagggactggaattcataattcttagttacttcatggcatagaatgcttactagcagttgaacgttccagagccctgggaggccactattatggtgtattcaaagacatttgttaagcccagggaggggagcttcttggaattttgtttttcaaaagttccactccattattccagagttctaactttattccttagcacagcaagtgactctgtcttggtatgaaacacaggcatcccacataggcttattagatacaaagtgctattcaaagagcccttgaaagaagaacatttttttaaaaaattgcaggtatttttttaaaaaacaaatttgggaataaattctaacatatatcattgcctgcaagatgagtgaagagggggttatattgctttaaatttggactgatgtagctttaaggcagcttggactagtgggctactgcctgtcactgaacttaaacatttttttttttcctgagacggagtctcactgtgtcacccaggctggaatgcagtgacatgatctcagctcactgcaacctctgcctcccaggttcaagtgattctcctgcctcagcctcccaggtagttgggactacaggcgcgtgccacgacacytggctaatttttgtatttgtagtagagacgggcttttgccatgttggccaggctggtcttgaacccctgaccgcaggtgatccgcccgcctctgccttccgaaatgctgggattacaggcgtgggccactgcttttggctaacttaaacatttttcacctccccacaaaaagatgctattaatcatggacatgttctattccataattgtagtgcctcccttctgccatccacaaacagtagatgtgccttaaagtgaaataacaaaacacaagggaagaaaaggactattgtttgaaaagagacagacacaaatacacagaagagggttctttcactttaatagagagccaggtgctcatatcagcctacaaacagattctggagattttttatatatatatatagtgaaggggagtctgtgaaggctgtagaactaatggaagaataaatggtccagataccaccagatgtcacctttactagccccttcctttgtactcaggagctcagccttcctctgcccagtgctgccaaagctgggctgtcactcatctccattttgcattttggccgtcatgtctttcaagatcctgccgtgatgagtggaattgtacagggctagcagggggatcctggcatgatgagagagccttcctgggagcccagtacwgattggatcatgccatcttctcaaaagggcagcctggcagcagagcatctcagccaagagaaaagtaagctcctccaaccctggcatcttctgtccctgtgccaagcccaaggtcaacttcatttccaatgtctaagaacttcgagacttttagtctgggaggttttttattattattatttatttatttatttttattgtatacctattactccccattctcgcccctccccccacaaccacaaaaacaaaaacaaaacaaaacaaaaagaagaagaacgaaaaaagccttgtctagaaaaaagaaaatcatcatgcaaagactgaatctgagtctgatgacttggcttgaatcccatgtcttgtttactttacaactggcggtaaaagggacaactgcttccagattcctgcaggcttatacattgaagttattattttgacttggtttattcaaacacatgcaaagaaattgccacctctagagtggagggagtttcagattgagaacaaagatctctaaatgggatgaaagtagtggagtcctctggttttgattacccctccagctaacaaaagacattcagaaactttgctttacatatactcttttccggtgactcatgcctgtaatcccaacaccttgggaggccaaggtgggcggatcatgaggtcaggaggtggagaacatcctggctaacacagtgaaaccccgtctctactaaaaatacaaaaaattagccaggcgaggtggcgggcacctgtagtcccagctgctagggaggctgaggcaggagaatggtgtgaacccgggaggcggagcttgcagtgagccgagatcacgccactgcactccagactgggcgacagagcgacactccgcctcacataaataaataaataaaataaataaactcttttctgttgtgcacacaaaaccacacagttttgggtgccactctttatctccaaatattgataataacacatattctgttagctcattgcatgggagtgagggccaggaggtcacaaacacaaagggatgtgcatttattgagctgaatttaatatttaaaaacagcaccaggccaggtgcggtggctcacgcctgtaattccagcactttgggaggccaaggcaggtggatcacctgaggtcgggagttcaagaccctcctgaccaacatggaaaaaccctgtctctactaaaaatacaaaattagctgggcgtggtggtgcatgccttaatcccagctactcgggaggccgaggcaggagaattgcttgaacccaagagcagaggttgtggtgatccaagatcgcgccattgcgctccagcctgggcaacaagagcgaaactccatcaaaaaaataaaaataaataaaaatagagtcactaataccatgtagaagaagaaactcggaaaagggtgcaattgatctcaatctgagaggcttttgaaggactcattggaagagaagagatttgagctgwatcttggcaaatgggaagatgtaaagaatgcattgacattgcaaactaatacagcaatcattgcagacaacaaaggaggctgtggcagttggggctcactgtatgtattccttaaatgacttcactccagaaactgttttgacccaaacatagttggagcttagctgctgctgtattcttggcagagatgcagaagactgcatgggaagaggcttttgttataaactacctggtggaatgcaattacttgcaatggattctggccagggcaattgctgttaatattactacsttttgcagaaagtttccagggagtcttccttaaatgactgagtagtcagggcctttgttttacatctcagtgaaaaacctgcaaaaccacagccagaaatcaccaaccaagagaaattacttttcttgcatggatctacaaacatctgagctcaaaaagcaggggcaggcaatagggacttggggttcttagaggagagatgtaattgggagtcccagtgcttagtgaatgaaacaatttattttatcatgtcttaaatgccatttaaacagaagtttcaagtttcaaaaaagacagtttaccattcagtgctgctatgtggtctctgtctacacacaaacattaggaggagaaagttctttatctgcagtccttgcactctccgactgagattccctctctctccttccttccttccttcctccttccttccttccttcttcaaagcagattgttatgttagcagaaaacctttgatagtgtcattgaccaacactgcagtacaagctaagtatttagagaagtaatctaaagagaaagataaagggaaaactaattgggtttccctgaattttatactaaattatgacgagaagtaggatggtgaacatatgtgctttttttccccatgcctttattgatattgtgttcaggactatgggaattaaaatacacaatcttagctccacttatagcatgatagtatgtgagtaaggcgggatgttgaaaagagccaagcaattatgcatttgtcatgaataatagggaaggtggagttttctttatttgaaaggcttcctctcctccgggtgcggtggctcacgcctgtaatcccagcactccaggaggccagggtgggctgatcacgaggtcaggaggtggagaccatcctggctaacatggtgaaaccccgtctctactaaaaatacaaaaaattagctgggcgaggtggcgggcacctgtactcccagctactcgggaggctgaggcaggagaatggcgtgaacccgggaggcagagcttgcagtgaccggagatcatgccactgcactccagcctgggccacagtgcaagactccatctcaaaaaaaaaaaaaaaaaaaaaaaaaaaaggcttcctctctcatcagaagggctgtagtctctcaggatttatatccatgggtaggtagacgctactccatgattattttattttattttattttattttattttattttattttatttttattttattttatttttgaggaggagtctcactctgtcacccaggctggagtacaatggcctgatctcggctcactgcaacctctgcctcccgggttcaagccattctcctgcctcagcctcctgagtagctgggactataggttcacaccaccacatctggctaatttttgcatttttagtagagacggggtttcaccatgttggccaggatgatctcgatctcttgacctcgtgatccacacaccttggcctcccaaagtgctgggattacaggtgtgagccaccatgcccggcctactccatgattttttttttttttttttttttgagacggagtctagttctgtcgtccaggctagagtgcagtggtgcgatctcggctcactgcaagctctgcctcccgggttcacgccattctcgtgcctcagcctcccgagtagctgggactacaggcacctgccaccacgcctggctaattttttgtatttttttagtagagacggggtttcaccgtattagccaggatggtctcgatctcctgacctcgtgatccacctgtctcggcctcccagagtgctgggattacaggcgtgagccaccacgcccggctgatttttttttaaatctatttcctttacatcattatgatttatatgtatatatccagaaaaaattaataaatgccacatccagataccatataggcaaataaatcatttctgtcatggcatgaactagtattggaagcaatagatggcaagtgagtcaacaggcagggtggccttgggcaacttgtctcatcttcctggcattgggaataaagcacttagcatcataggatcttttttaaatcagttaaatggatagtaaccttaagatctcctataaatgtcatgaggtcctttctacttaacatattgtagttcctttgatgtctactgcagtctgctctctttacttgacctttactttgtaaaactaagtagtagtttgcagctgctggctttctgcayggggaccccaaaggtaatagattccaagcctcacaacatcagaggtacctcttcaaggagtaagttaatcctttcaaatctccctggttagtttcktaggatccttatcagactctctgctacttgtttgataatatcctttaatctaacccattgatttgttatctctaaacaccattttagtttaatttgcagctatgatgtccattagcaagtgattacagtgaatgaacttaactgctgtatattgagataaaataccttttcaagtcctttggaaggcctggggagtgataaatctgtagtgctcaggagggcttaaaaggttatgacaattgggttctgaggttgatacaaatggttttgaaattcactttctcatatttatagtttgcacataatcttagggcatcrgtgaatggtcattctgaaaatactgaataaccaggagctagtttgcaaaagtaaatataaatgaataccattttcttagtgcgcttatatcctatgtaatgggttatctatctttagaaacaatgatattctttttgggaccacctgctttaattctgagtacgcttctgtaccaggggttgctgtaatatatgttcatgaagaggtccatatatttcactatcacttgtgagtgcaccatgctaggaaaagtctatttaagtggatttcctagataactgaagcttatcttctactgaaaaatatttcaaaattagattacattctcgtcttcctttttcaagcatcttacatttggcatttcttttattttatgaattgtatatatgtttttgttctttgtaatggttctggtatatatttataaactttttactttattgattgaatttaagttgtgtgtgtttgttttaatttttgttgtggttaagcgatgtttcttccttctgtttaccatgtagaaggattattcttacaactaaattgttaagattttcaatttgttaggggtttattttattttattttattttattttattttattttattttctcttcggaaacagagtttcactctgtaaccagtctagagtgcagtcatgcaatcatggatcactgcagcacaagattaattatttccatacacagttgttaattatgtttccaaactgcagctgatatggcaagtagccatatttgtccccaagcacactctcctcatttttgataatgaagagattttctttgatacaataattatgagtactttttcactctctcccatcaatttgtttagattacctgtggcttgcccaactgacttcctctttctaatgaaacactcaggtttggaaattcctttctttttcagatgctatccccacaaattggccccatagtctcctggaatttaacctgtaaaataggctgattgttaaatggtcrtgtgtcacttttgttcacatgagtcatctgtagagtagatgtttagagattctgatatgaaaaatgtccttgcagaaatcaactgtaatgggaaatggttcccagaaattctctgctgcaaacctagattgggagccagggagaagatgcacagtaatctatttcattgcatcccttggctgtaacaattctgacagacactacattcagaaactcttttatcagttgttcataaccttcaaagaatgttctaccctccctacattattcacatcagtcaataaacaatatataagctggagagacaccaaaatgtatcattgagataacaagacctaaagagctgatagaggttggagagaagatactgagtatgaccagtacccagaacagattggaatctgaccaacaagcttcagccatgctatcaagaggacagaatctaatcactcaaatgtacaaagtattgtgagaatgaaaactagtgctagacatcaaagtttctgcgtttatctgtaggtgaatgatttgataaaaactagccttttacaataaatactcttataagtgtggtcaagtgccctggtatgttttccatataagtgtgtgtcccttttgtaatacaaaatattattctttggaaagatatggatatgtaaatgaataattttgttaccataaatctgtttcatcaagaatactaccctcattcttgaaccacgattttcatttattggtacattggttaagtttcttataaatattgcaagctggctgattttggtttggtgagcagaggtttgggcccaaggtctgcgttctaggttggtgtcgtgtcaacatatgttacagactattgaggccatcgcatgtgatcaagtgaaagagaagtagcccagtctccctaatcagaagggagaagatcattcctgactaaaggatagttctttcctttctgtcataatttgccttgagccagcattttaacgaagtttttaaaaatactgtaaagtcaggccgggcatgatggctcacacctgtaatcccttttgggaggccaaggcgggaggatcatctgaggtcaggagtttgagaccagcctggccaacatggtgaaaccctgtctctactaaaaatacaaaaattaggctgggcacggtggctcacgcctgtaattccagcactttgggaggccgaggtgggcaaatcagcagacgtcaggagttcgaaaccagcctggccaacatggtgaaaccccgtctctactaaaaatacaaaaattagctgggcatggtggggcatgcctrtaatcccagctacgtgggaggctgaggcaggagaatcacttgaacctgggaggcggagattgcagtgtgccaatatcatgccactgtactccagcctgggcaaaaagagtgaaactccatctcgaaaaaaaaaaaaaaattagctgggtttagtggctcatgtctgtaatcctggctactctggaggctgaggcagaaggattgtttgaacccgggaggcagaggttgcagtgagctgtgatcgtgtcactgcactccagcctgggtgacagagtgagactccgtctcaaaaaaagtgtaaagttaaattttgctaagtggcccttccattgtacatatgtttctctgccttttgtggatgcaaatcttccctgaagccaggctcaccttatcactctcataatactttctttgactacaccatccttaaacatttcttctgattctgtactcctacagtatgtatgctctttttgggactctgtctttactctccatatgcaactttctgtcttagaagatatgacatgtacttggtaaaggaactgataatataaagcagtggcttagacatgtatatccctcctgtgcctgaccaaatggcgtgaactttgagaatgaaagtacttaataaatgcttgcaaattcgagatggagccgcatagcataatggatgaaaacgctgacactagagctaaactaactacattcaatcctggtttggccacttatcatctatgtggtcttggactagtcatgaaacttttttgtgcctcagcatattcatctgtaaactgtcgtctatactagctgggcacggtggctcacgcctgtaatcccagcactttgggaggccaaggagggcagatcacaaggtcaggagatcgagaccrtcctggctaacacagtgaaaccacatctctagtaaaaatacaaaaaaattagccgggcgtggtggcgggcgcctgtagtcccagctactcgggaggctgaggcaggagaatggcgtgaacctgggaggcggagctttgcagtgagccgagatcccaccactgcactccagcctgggagacagagcragactccgtctcaaaaaaaaaaaaaaaaaaaaatggctatactaatagttcctgcccaataaattcgtgggtttacatgagttaatatatgcaaatcccttaaaatgagcctaacacatagtaagggctattaaatgtttgctattactgtgatgttttataaattagtaaaaaaaatagaccaattatggttaatatataaagcacatttagaaatttttcttaattccccaaaccatactatttagaaactttatccttccttctcttgcctttattcctttcctattttcttctttctgtttattctcttgtccttcctgctttccttaaaattatgaatagcacatatttaatatgatagtatgtgaaaattaggtgttcatataaatatttaatgagctaatttctaaatacatattataaaattaagaaaatattttgtttgtccattcaatcatcagacattgattaacaacttactatgtagaggccctagagatagtgaactaaagaygatgaaaggttccagtgtgtggtattgatattccagtctggaaaaggagatacacaaataaggaaataacgacaaagtagaattgatctggggatagcattaatcccagggtgcttttgaaggactgaggaaggtcacctaatccagcccactgaaggcctaggagaccctctgtttctttttaagattcacctggaactggccrggtacggtggctcatgcctgtaatcccagcactttgggagactgmggcaggcagatcacaaggtcaggagatcgagaccatcctggctaacacggtgaaaccccgtctctactaaaacaaaacaaaacaaacaaacaaacaaaaaaattasctgggtgtgkcggtgtgcgcctgtagtcccagctgctggggaggctgaggtaggggaatggcatgaacccgggaggtggagcttgcagtgagccgagatcgcgccactacactccagcctaggcaacagagcaagactccatctaaaaaaaaaaaaaaaaaaaaaaaaaagattcacctagaacctatgtatcttttggcccctcaatctctgctgttgatggtatgttggtgaactataacacacagacacagaaatcccttgtgtatggtattgtacacaatcctagaaatgttctgttaaacagagatatcaacctttaggaagtcttacagtcatatggaggttttatgtaagtatcacttagcatatacttttttatttttcaaaatgattcatggacaygaccaattactttccttggtgggtgagtcctactggtacatttaattatttattaatagattattattattttttgcttgagaggttagagctagtgttagaaggtatcaccctctataggtcaattacaaatgagacaacatatccagctgtagcagtgcatcaaaatcaagagcctggtctaagttgtagaaaaatagggcaggcagacaattctgactccctgtaataggtcctgcttgatctctataaccaaatgttacatttgtggcaatgcatataatagttctgctttcagtcacttctgaatctagacatcctaggcttcttgcaggaamttgaagaataaagtgacagaaggcaattccccttttaggacctgtgttagtctattttcatgctgctgataaagacatactcaaatggtatttctagttctagatccttgaggaatcgccacactgtcttccacaatggttgaactagtttacagtcccaccaacagtggaaaagtgttcctatttctccacttcctctccagcacgtgttgtttcctgactttttaatgatcaccattctaactggtgtgagacggttactcattgtggttttgatctgcgtttctctgatggccagtgatgatgagcattttttcatgtgtctgttggctgcataaatgtctttttttgagaattgtctgttcatatcctttgcccactttttgatggggttgtttgttttcttcttgtaagtttgtttgagttctttgtagattctggatattagccctytgtcagatgagtagattgcaaaaattttcttccattctgtaggttgcctgttcactctgatggtagtttctttkgctgtgcagaagctcgttagtttaattagatcccatttgtcagttttggcttttgttgccattgcttttggtgttttagacatgaagtgcttgcccatgcctaggtcctgaatggtattgcctaggttttcttctagggtttttatggttttaggtctgacatttaagtctctaatccatcttgaattaatttttgtataaggtgtaaggaagggatccagtttcagctttctacatatggctagccagttttcccagcaccatttattaaataggaaatcctttccccatttcttgtttttgtcaggtttgtcaaagatcagatggttgtggatgtgtggcattatttctgagggctctgttctgttccrttgatctatatctctgttttggtaccagtaccatgctgttttggttactgtagctttgtagtatagtttgaagtcaggtagtgtgatgcctccagctttgttcttttggcttaggattgtcttggcaatgcgggctcttttatggttccatatgaacttcaaagtagttttttccaattcagtgaaaaaaagtcattggtagcttgatggagatggcatttgacccagccatcccattactgggtatatacccaaagcattataaatcatgctgctgtaaagacacatgcatacgtatgtttattgcggcactattcacaatagcaaagacttggaaccaacccaaatgtccaacaatgatagactggattaagaaaatgtggcacatatacaccatggaatactatgcagccacaaaaaagagtgagatcacatcctttgtagggacatgggtgaagctggaaaccatcattctcagcaaactatcgcaaggacaaaaaaccaaacactgcatgttctcattcataggtgggaattgaacaatgagaacacttggacacaggaaggggaacatcacacaccagggcctgtcgtgggtggggggagggaggaaggatarcattaggaggtatacctaatgtaaatgacaagttaataggtgcagcacaccaacatgacacatgtatacatatgtaacaaacctgcacgttgtgcacatgtaccatagaacttaaagtataaaaaaaagacaagactgggcaatttacaaaagaaagaggtttaatggacttaaagttgcacggggctggggaggactcacaatcatggcagaaggtgaaaggcatttctcccatggatgcagacaagagaacagagcttatgaagggaaactctgccttataaagccatcagatctcgtgagacttattcgctatcacaagaacagcatggagaagatctgccccccaggattcaattaccttccaccaggtacctcccacagtacrtgggaattcaagatgagatttgggtggggacacagccaaaccatatcagtacccataagaaatggtacctcatatttcaaggaaagttccggtaaactttctgtgtcagattgctttatatcttagcccatctctgcctacggttagttttaaaaacattttagaggattatgtggttatttttactttttacatctgtgtgccactctggggttgccctgctccctgggtacctggactgcacaatcagagatgcagtctgaaaaagccatcatctgggagcatctggctgcatggactgaaggtggtaaaagcaaattggccatctgctggggctggtatagacatggagatgatactgaataatattcagattgatgttttaccccaagcrtgcttggagaggttttgttttgcatgtttttcagcagacctggtttaaaaattcatgaatgcacctggttggttgtttctaccctctgtttttcatgtattctggcactgctaaaaaaaaaaagcaactcctcagcaagagactaaattggaaaaggattgtattcagagtttagaagaaaatctgtgtggttttcatgaaaatcacctaagtatagatgttggggtcargatttccaagagttaacaacatcatgtagtttacttttcagtcttagagaaatttaggcaaatgatatatttgaaaaaaaaaattgtatatttgagttaaatgccattgtctaggaattccaaaatgctcagaggtttttgaaacactttgatgcagataaaaagagccagagcaaaatgacagtgtttttcccagtaaagaatcttactgaatctcttagaataaagatgaaagataagtaaaaaagtggttgttatcctgtctgagaaaggtacattcttttatttttattattattatctttttgagactgagtcttgctctgtcgcccatgctggagtgcagtggcgtgatcccggcttactgcaacctccgtctcccaggttcaagcgagtctcctgcctcagcctcccgagtagctaggactacaggcacccgccaccacgcccggctaacttttgtgtttttagtagagacgggatttcaccatgttggcaggatggtctcaatcttctgacttcgtaatccatccgccttggcctcccaaagtgctgggattacaggcaagagccactgtgcccggccaggtacattattttctaggtaagatttacttttggtttgagtggaaactctagttaaactatggattagacaaattaaatttggttaggatccagggaaccaatttcagatccattagtaaaagtttctagttcccaaactctgctcgctctctttctccccacccccaactgtccctgtccctgtcaatctttgtctctctcactctttcccaggaaaagagaagaaagatatttagcctaaaggctgagctttaatacagaaaatgacctttacattttagctcaaagaagtaaatataatcttataagtatcattggcaattgagtcttgccgggatgggacttatgagtataatgcagcagtggaagaattttccttcagggaaaaaaacaaatttgataaagggactggtgagaaacattgtatgtcaagaagatctacatcttcttgaaaatttctgwtcttagatttagaaacatgctgaagtttctataatttaaagcttccatttagcacagacttaatgtctgctgtgtccttggcaccctaggtttaccttgattttagaaaatctgaactgtcaacatgtaaatgtagaaattcttcactttacacaaagaagcagtgcagacattttaaaaaatagcaggcagtccttgtatgttttgctaaataagggcaaaacttaagactaaaatgctaagatccagtgccacaggaagatcaattaatggtgagaaatggcatttttggaaaatgtaatatcaatttataggtatataagatttgattcactaaaatttgatttgttcataacctcactagcatgcatctctcaccccagaaaaaccacatgatgtttgaactggaagatcactagaaactttctcttctaactcagcatttgaccatgatgaaatttgggctcacagatgttagttggttttctcccagcgtcttagaactagacagtggcagagatggaccccgtatctcattccacggcacactgcctccccctgctgtctcttagaggttgacccacctttacagaatgttcccattcaatctctttcttaattctagagttgtagcaaatttccttcattatactggataacttcagaatatgtagcaaataccttgatgcctataaataccaaagatcacacgaacacccattatttyaatggctcagaatgttatggatttgatcatctcccgaaacagaaaggatcattatagccagagcttcttacccctcttttagccagcaaccccacatcacgtggtctagtcctcagtgttcctattgttattattttgcatcttgttttcacagataaacttgaaaaagctgaatttgatctaaaccttacagaaattctagatccagttctaagaatgagttgataactgttaagtatctactatgtaccaaaaagggatactaaccaatcactagtatcccaaagtatgtttctcagaaccttagttctctagaagcttcctgggcaaaaaacaaaaaacaaacaaaaaaaaacaactagattatatctttgaatacatttgacaaattatcttcgactcttcttgctgtaggatgcactttccaaagactttaataaaccaaaggaacctgttttattttctgcattctggtatcccccaaatttacatgactattgaattcttatggtgttagaacttttaatttcacttagaaaatgctacattcattgtgttagctccatcaaatcataatgaacacccactctgtgaattgtgtattgttagcctcatttcatagctatagaaataaaggatcagacataagaagtgatttcctaaggtcgtgtgagtgagcagaattgggggacccctggttaagtttatgatcttagctcctacaggagtctcaactcaaatacctattgacttacacaggtaattgtagatgaatggagtgactagggagtctatgaatacagraactttattttaagaaaaggaaacaatgagggcccggtgtggtggctcacgcctgtaatcccagcactttgggaggccgaggtgggcggatcatgaggtcaggaggtcgagaccatcctggctaacacggtgaaaacccgtctctactaaaaaacacgaaaaattagccgggcgtggtggcgggcgcctgtagttccagctactcgggagactgaggcaggagaatggcgtgaacccgggaggcacagcttgcagtgagccgagatcgtgccactgcactccagcctgggcgacagtgcgagactctgtctcaaaaaaaaaaaaaaaaaagaaaaagaaaaggaaacaatgctagtgagcataggacrttgtaggaagtgaggaatatttccagtgtttaatgtgctctctgcccgctaaatctgtttgttgttctgtttgaacagccagaaggatgcaatactttgttttagctaagaatgtatgcttttttccccttacatcaataagaaatgccaacagagacctgcttttagttttaacaagataacaaaagatgatgtgggtggtggtaacctggaaagcttatgacctctctataggggatagcagttctagagttgttgtagagtatggccatatgggaataatgtccaggacatctggacattgttggaaaatctgttaaacagtgctctttgggccaatattatctacatcaaatagaactcgggtgctggtcagagtcagtctgtggactatggggttctaatgtttgcatttcactatgctacttgccaaagaaaaaaggtctgccactgaaatcattctttgtagcctgatggtttcctttgtggcagttatacattctgtggcttcaggaatttgttgaacattgaaaaggcacatgtgctcatttacattgttggcaagtgttaaattggggagacatatgttttgtttattctctcttcctgttagatccttaaagaggattgattgtcagactcagcagtagctttataagtagtgtgttttggaaaagtattttcagaattgccagtacttatacatttggctggaaatagctataaagtatgcttggaatcctggtggacatattttgggtaatgcttaactggtcatctgcctggatttaagagtatttttcttttgcctaacgctgttattgtgtgtttctgaaacactcctcttagctgaaccaatgtaataacctcttagcttgaacttcctgccccccattctcttgtctttaacacaatctctgtattacctccaaagtgatcattctgaatgagctatactctttctcttcccctgcttaaaaatcttgattctgtatgtatgcccctgartaaataggttctgttgctttagtcaaaatcgctttacctggcaagtaagtctctttcaacttggctgtagactgctttgcctaactttagccaaactgaggaacttgccattaccaaaacatgtaatgcatgcccgcattcctctgcttttgcatacgtgattcccctgtcacgaatctttcctacttattctgttaaacacctttacttccttcagaactaattttggtgtcaggtattctgtggttacatctcttattccagcaataggaaaaaaaagtgcttttccgtgttctagtaaaattttgtacatttcaatagctctgcaatggtagtttcattgatctgttatttttgtggtgttatctgttgtaataaggcatttagtgtctttttcattatttaatcccaagtcttaagcacagggactgtcacttggttrcagaaacttcttaaattagattttaaaaaaaatgaaatgaatggttgaatgatgaacatctgctcatcccacaaagaatgaaattttcctctcaaaaaagtgatgtttttccaaaagtcgtgtttttctatttgttcttgaaaggcctaaaaaaggattctaaaaattttaatttttttgaatatttattatattcattaaaatattttatagacaaggcacataaggttccatttagtgtatcacttatgaattgagtgtaacgtgtgtcaaagagagaatttctatttatttcacattttcacttatgttttagacaaattttaaaatgttggttagttactctataagcccgtgcttacgaagacctgcttattatgtgctctaatggttaagatgcagtcctgggaaaccaggtacttgggtgtgagccatggaaatgccaaggatgctctggaataatcttggaggaatgattatgtctctccatgcctaatttcactctcttgaggtttgtttcaatttccagttggaatatcctaattaacatttgtaaagcgctgtgtaatgcttaaatgaaaaacgtcatgtgagtataaaatcttttgaaatagcagtttaacaaatttgagttttttgtgcaatgagctattttttaacatcttagaatttataaaaggataaccagaaaggtttgactgggaattgatgacatagtacaaaaaggagaaataatgtttttctacagctcctttatttcgggaacgcaattactgaaatatgcagtttagagtttctaatttcttaattgtcttmgagcttgaaatacgcacttgggatcacccatgtctatgtgtgtataatatgtgcagaatgctactgtgttgtctttttccagaaatgtagatgaagatagaaagtgtgcataagcagacttataaacagactatgaagtaagaataacaatgtatacaaatcaataagaaaaagagacatacccagaattttaaatggagaaaaatatgaccagtctgtgtatcaaatgaggatttcaagtgagtaaacataaatgacaaaaggataaaagggagggaaaaaggaatgaaaaaattcactgtcattaggaatgaaagtggtatatattgacataaaatacatctttttctccagtcatcttagaaaacaatataaaaagacagacaaaacctagtgttgygataggcacttccagttaaattagtatactcttctgaaaaacacttggtagtgtgtatcaaaagtggttgcaaaattcatattctttttttgtttttgtcgaaataatgtcttgctctgtcgccaggctggagtgcagtggcccgatctcagctcactgcaacctatgcctcctgggttcaagcgattctcctgccttagcctcctgagtagctaggactacagctgtgcaccaccacgcccaactaattttgtatttttaatagagagagagtttcacagtgttggccaggttggtctcgatcttttgacctcatgatccatctgcccgcctcggcctcccaaagtggtgggatgacaggtgtgagccaccgtacctggccaaaattcatattctttatccataaatttcactactaggaaattacttgaggaaatagtaattgacatacagaaatgttaatctacattaatcataatattagtgaaaattggaaacctggtaaataagagattaattacatagtggcatatttgtacaatcaatactatatcaccaataaaaatgataacacagaagaatattgaaaaccatagaaaatcttcgaagtgcggctttaaagtgggaaaagcakgttaaaaagcaggaagtgtcacacgacaccctcttgctgtataaatttctctttctcccactttgtgtctctttctgacacccataaacatttatgtatatgtgtgtatatctatatatgcataaaacaaagattgaaaacaaatatcaaagtgtcagtgacaataatctctgcatagtgatgcttaagtgattgttcttttattctgagtacgtttttggggacatttttcaaaaatgtctgcagttaatgcatattttttcttgttcatatgtgaacacaatacctaaactttaaagcaaataatatgactaaatgaaaagaaacaaaattattgtaactttgacacaaagattcatacctagcaagagctagacatcggacaagtagcttaaaaacctgtccggccatcactaggagcactctttgtcttcattcttttattctgaatttgaaaccaacccaatagtcccatagactgtcgttttggataaacatagaaattgacctttctggtcaattgaagcttgaggcttacatttgttttatctgagttccttccttaggaaaggaccttcaagcctctcaaaaaaaagtatcaaataactgaaactcaccagattaccacatcctgacaatgagaagcttggacccctctttcactttgattgcttccttgcccttccttagttcctgttttcttacacacgattacatttcttccctgctatataaacccctagtttcagtcagtcagggagatggatttgagactgagttcccagctcattggctgcagcaccggattaaagcctttttccttggtaataactcatcgtctcagtgattggctttctgtgtggtgagcatcaggacctagaacaaacctctgatgttacagtaacaaattgaaggaattaagtccagtaccaattgttgagcatcaggacctagaacaaatctctgatgttrcagtaacaarttgaaggaattaagtccagtatcaattgtttatgaattgagaagcaccatgatgtggttaggctttgtgtccctacccaaatctaatcttgaattgttatccttaggtgttgagggagagacctggatcatggggatggtccccacccgaccctaactattctcatgatagtgagtgagttctcaagagatctgatggttttgtgtttggtagttcctcttgctcacctcttctttctcctgccgccctgtgaagagttgccttctgccatgattgtcagtttcctgtggcctccccagccacgcagaactgtgagtcaattacacttctttgctttataaattacctaatcttgggcagttctttagagcagtgtgagaacagactaatacagtgaattggtactgcagagagtggagtactggtataaattgaaactgcataacaggcagaggttagaacagtttggagggatcagaagactggaagatgtgggaaagtttggaacttccyagagattggtgaatggttttgaccaaaatgctgattagtgatataaacagtgaagtccaggctgaggtggtttcagatagagatgaggaatttgttgggaaccagagcaaagatcactcttgctatactttagcaaagagactggtggcattttgcccctgccctagagatctgtggaactttgaacttgagagagatgatttagggtatctggcagaagaaatttcaaagcagcaaagcattcaggaggaagcagagcatgaatttgaaaaatttgcagtctgacaatgcagtagaaaagaaaaacccattttctggggaggaattcaagctgcctgtagaaatttgcataattagcaggcagccaaatgttaattgccaagacaagggggaaaatgtctccagggcatgtcagagaacttcatggctgtccctcctatcagagacttggaggcataggagggaaaaatggttttgtgggccgggcccagggcactgctgctgctctgtgcagcctagggacttggtgccctctgtcgcaggcgtggctgaaagggaccaccacacagctcaggccattgctgtggagggtgcaagtcctaagccttggtgacttccacatggtattgggcctgcatgtgcacaaagtcaagaattgagatttgggaacctctacctagattttagaggatgtatggaaatgcctggatgtcttgacagaagtttgaggcaggggcagaggcctcatggagaacctctgctagggcagtgcagaagggaaatgggtcagtgcccccacacagagtgcccactggggcactgcctattggtgctgtaagaagagggccaccgtcctccagaccccaaagtggtagatccactgatagcttgcactgtgcccctggaaaagccacagacactcaacagcagcccatgaaagcagctggtgtgggaggggtgccgtaccctgcaaagccacagggggagagctgcccaagacaatgggagcccacctcctgcatcagcatgacctcaatgtgagacatagagtcaaaggagatcattttggagctttaaggtttaatgattgccccgctggatttcagacttgtgtgggacctgtagcccctttgttttggccaatttctcccatttggtgtgagcatttacccaatacctgtacctccattgtattttggaagtaactaacttgcttttgattttacaagctcagaggcagaagggacttgatttgtctcagatgagactttggactgtagattttcgagtcaatgctgaaatgagttgagactttggaggactgttgggaaggcataattggttattaaatatgaaaagacatgagatttgggaggggcccagggcagaatgatatggttaggctttatgtccctacccaaatctcatcttgaattgtaattcctgggtgttgaaggagagaccttgatcatgagggtggttcccctcatgctgttctcatgatagtgagtgagttctcatgagctctgttggttttataactgtttgattagttaatttatcatccaagtcatatctgcatgtcagtaataatatttatgatggtgctataggaataagccaagactttcaaaggcaacatgtaatgtatgttcaccctattcatgacacattcaaagaaagccaaaccatctatgaactgtctttcatatgatcaaggcagctcttgaatcaagatcagacaacttttaaaatgacrgtatcttcatgaacttattcaacttatcatgaatatgaacctgggtctgaaaatggcttttgtatagtcacaaaacagaattggagcttttataattggacttcatggtagccccttgattaggaattattctgattgatgaggatccttgcctataagcaattgtggtgactagctgtataaaagatactaggccagatccataaaagatcgtgttgtttgaaacggtttaaagaaggcaacatttttgttccctttgcatacaaaatacttttggggtgttgagaaataccactgatgtcaagagagctgattttgtggttattttcttgaagtgtggattccctgttggtaataacttggagcagatgagtgttttatagggttggcatagcagcagcaggaattgagctatgcagccagatgcaaatacaattttaaaaaataataaaataaaaattttagatggttttatgtgggcctgggcatgataaaaattgaactttctttatgtttctagaatacatttaccattcactttcagacctaaatggccttttgttgttgttagcccaaggatacctgaaaatcattaggtttattttaagatccattttccaaactgaagggaacactaagtatcctattttcaatttctggtttatgttgtaaatgatatcagtgctttctctgtgagcatagaagagcaaggacyactttgctcttaagaaacccatatttcatgatatcagatccttaattaaatgaggggattataatgcctagatataggttcttttattagagagttgcttaggcacactttaatggacattgaactggtctattcttctataatttaatctgggtaatttatgtaccctgaaaattcacacactgaaattactcaaccttggctcccttaatgtccctgagagggactaaacaatgcaattcacttggtcttcaataaatacacttaccttaatctgataacagattagaatttttcagccttcaaaagtttaaggtaagacccaatgaaaattctggcaacttcaagatatctatatcccaggaattctatgattatgaggacattttaattcatattgaatataataattacaactttttatcatatctatttttaaaaattatgtgacaagttttacagaagatagttgtggttacttatcttcaatatggcttgcttctgtgtgtgtgtgtttgtgtgtgtgtgcgtgtgcatgcttttcttcccttgagaggtgaagtctatttttttcctcccattaagtctggcccagaattctttgaccaatagcatgtggcaaaattgatgtcctgggtcttccaaggatgggtcatgcaaagctttgcaccttccactttagccctttggaatacttgatcttgggacattcacactgaaggaaaccactgctatataagaaattcaactattatgaaactgccatgttatgtgatgttcagccacatggggggtcctggaggatgtgatgtcatgcagagagaaagggagaggtccaaccagatacaggaatgaaggagccatcttggaagtgaaatatccaactctggccaccacagttgacatcatgtggatttgagactacctactcagctcagcttttcccaaattcctgacccacaaaatcttaaacaaaacaaaatgcttgtttgaagccactgttctgagatagattgttatacaatacataagtagaatagaactccttttctctttagtatactatgtcagttctaatgcttctgaggtatgtatattgagatagaattaaacctagaatatgcagtcatgaaaaaaatcatcttcataaaacaccgcactgctgtctttcctgctgtgactgaaatccaaaaagagagaggaaagcagcagatgatgtaattatgctctgacatgtcaattaagcacattgacccttttccacctctcatcaacaacttgagatgatcaatgtttgtcattaaataactgaagaaggaaggaaaattttacatgaaatggacctcattgttaatatgagaggcttcctcctggatgaccccctctaggcccatcttccaaagagctctgcagtagagctgcaccaggctattctcacttcactaatctgcaaatcctgtataagagaaatccctggtggtctccgtagtcttttcaggaaagctttaatagtcaaatacattagcaaggtctcacgtggctgagacttcattaatcttccccagtacaccctagtatatttgccagtttatcatgaagcattaatataagtaaaattaaaacgtacttgttagtgtaggaaagggaaaaaattccctctaccctctgagtgctttataattgagtccatgaaataaaccatcactggacagattaataagagaacaggtaaacaaatgtattacatgtacaggggcatcacatgaaagaaaagtgaataccaaaaacccagtgagatctaaaagcttatatgcccacttcataggaaggaggagaggagggatgtaggcaatttagggaaaagtaaatgaattttgggaaagacgaatgggccctcagaagaacaggtgatagcgagtctggttgtaatgtcaacttctagtctcttctgtaatctgagttcatctttggttgatgagattcctggggaaggaaattatgacaattgagttattttagatcagtcttcagacagataaggagagctcagagagagctcctgccagcattggctgttccccaagagccctcagtttgaggtaatcagtgtaccaaagcagggtattttggggtggcatttcctgaactccttcattaggatgatgatacaaatacagcaagggatgaagaatgtggatggattctgttcactgatttttagagtggattaatgtctatggacttttcattttactttcctgactttcaacttgacacttattcaaactctaaagtcaagtacacaacttacagattttaccaaaaatggatttccctcacttaaatcaatgttaaratagactgatagcttctctttcctgctctctcttccttctcacctgtgtttctttatcatttcttrtggaataaagagatttcttatcattaaatgaacatcatttcttgtaaagtttcccatgagcaaagaagatgaatgtctgtttctcttagcatcatggctccttctgatagcagctaacattttaaaatgatgtaaccttttggcatttatagacctttggggatttaagagagaagttactttgggacttgtaatgttgatggaagtgtgttctgattgggttggaacggaggctataggataatgagatttttaaggtggctcaaatattctcaaggtatttaattagttctcatagtgactgcaataataaaaacattctttgaatgtgtacatcattatttcccyctgaaataccatgtttaggtttttttttttttttttgacggagtctccctctgtcgcccaggctggagagcagtggcgcgatcttggctcactgcaagctccgcctcctgggttcatgccattctcctgcctcagcctcctgagtagctgagactacaggcacccaccaccacgcccagctaactttttgtatttttagtagagatggggtttcactgtgttagccaggatggtctcgatttcctgacctcatgatccgcctgcctcggcctcccaaagtgctgggattacaggcgtgagccactgcacccggccccakgtttagttttttaaaccagatgacccaatgctaagcattagtgaatattccatattctscactgtcacctcatatgatattaataatagcaatttctccagtaaaatgagtctgttttttttttaaatgacagttaagcatgggatgcacttattaggaaaatagttacactgtaatagttcttatttgctttagcataaacttctttgcgaactagcatgtgggaaaatgtttctccaccaataagaacattacatcagagatttttgcccattcctattatccttttcccawccatttttatgataaagcataaaatccaatctacggaagaatcatgctggaaggacaaggtaaaggaagccagagccattgtgaaaaatctggggtatgaaccataactggctgttttgatcttctgactgtatatttaaaaccaagaaattatctttatttgttcaagaatatagtgtcgtcttacacttgttactggaattctccattatcttacaccccatttcttcttgctgcctcttttttttcatctaggcaatatttttatgagatatttgtaatgccagatttaaatctctttccctctcttttttggaattcaactatcatattttagcagaacataaagtactatatatgtcatcctttgtgaggtaaacgcaatatttgcacaaaacttaacagtgcttttgcacagataatcttatctgatcttcacacgaatctctgcagggcatgacatagataaccttaccactgactagctgtgcaaccttgagcaaattgcctcatctctctaagcccgatatcaaatggacataatgatatctacctaaagtagttttcataaacaatctgatggaataatttagtttaaagctttagcagggagcctgatacacaacagctcaataaatggcaacttgtttgtggtatcactactgtcttcaatgaggaaactgagactcaaaaaaaaggatttaatgagctataaggtattcaaagtggcacaactgataatagcagagaagaaattcaaatccgagtttttaaacccaggccccttactatttcttgtgattgtagcttacctttcttctcatggtgtgaatgaccttcactaagcacactcccttcttttctattttgtgaggaaaagtacacattcatgaagacattgactagagccaggtttaggattaggttatggctcttcctgtggaacagaagtctgtggtgcaccagccccatgctcagccctgtggatcaacccgccatggaaatatatacgtggacatatatttcctttatagaagttcagtgccattcacaatggtggaagcagattcttacagtaaaatagtgtttgtacgtttgggtttctctaaattgtctcaaaggagaagactatgttcagtagtcccaagtgaaataagaagagatgtcctatacgttttcttttttgaatcatcttccaaggactgtaactcatatgttgtcattcctgataaaccttactcatctyctatgtactctgtggaattggccaagaggtactgaatgactcctcattattgttacaaataataattaatgggttgggtctcctgacaaggcaattaacacacatatgaaggactgaaattacatgctccttaaaaaaatgtttcttcccagccttacatggtggctcatgcctataatctgagtgttttgggaggccgagatgggaggatcccttgagcccaggagtttgaggctgtgatcattcaactgcactccagcyggggcgacagagcaagatcttgtcttaaaaaatgttttttatgcttgtttttttccgttaaaaaatctgagtctgtggatcctcattagaaaaccagtttgaaatcaaaaggacagaataaactctttaaaatacaatgccatagtttcccagtcatttcactgaatcactttccaggtcacaagyagacagtctgttgcctaaatgttctgttcatctcagtattgaatgacgcgattttgtgctaataaacaaagatggcacataggtaagcttcgctgagtttggaaggatgggatttaggaaaattggttgtgtcatttccatcttcttacagactcatttctatcagtgtgtgcttgatttgactcatttctatcagtgtgtgcttgatttgagcttttttctttttaatccccttcctccccttccttcactgtttgtatttctgtgattttctttccatggttcattctgggatcctgttcaactttccctaacactgtcctccaaatagttgccaattgataagcacttaattgctctttccctcagctcatctgggaaggataagtactcagccctcattgagaataggtagcttttccaccctcrttggtcagcagatgacttactttctctgattacrttttgcttaatttgattttaattttgagrtcagaggtttgcaaatagacttttattctgtttatagagagaaatatttctgtttgaatraagtgggtarcagtagataactggagtgcctaattgctgctgttgctgtttttctttgctgttgtcattatcattatgaaaagcatttattatgcacctgtgatatgggcatctggagctgaattaagctctgagtaaagcaaaagagatatccacacagcagcccattacctctgcttgattccagcccatttatgacaaagaatagacaaatgagccaacaaataatgamcaacatataaaataaatactttttccattaggaccaaagaaatggtacgaaaaagtatatgcccggaggtggtgaagaactttttattaactccacgccacataaaccaataaatggtggaattccaagaacagcatatctaggaaaagaatttggaaaactaaatagtagcagcattcctctgggaagaaggcccgcaggagacgacaactggaaggatcagaaagctgcctgccaaccttttgtagaattacttcctgtagccatatgttgaatctggagcaaactaaagacagtgaaagtgcatttaatttttgatgacactgagctgtcagaaggactaataccaaaaaaaaaaaaaaggagaagtgacgtatttgaaatctataaattgcatttcatgttcatttgtctactctaggaaaagcaaataaagtttcttcttccttctgaagtgggtgatgaatgattgcttggagttgggtggtaggatcctgtgttgccattattgactttctatggaaacaattcatctgcaggtgcagtcagtcggcacaccctgcaaggcataagtaaactggttctaatcactcatgggtggaactgaacagggaataattactttcctgataaaggcagtgtctttctcttatcttcaccttccttgcctcaagtagaacagtgaggatttgctcaaggggactggaaatcccagtgttgcaggggcccctggcctgcaggcagcagaaggcaggaatgaaaaggactcattcatttattcattcctttattcatttacaacagcatgtggacctactatggaacaagctttgatcctggcagacaatgacctctctttttggagagcttactttaggaatctgcaaagcttggattcatgccttttacaaaggcatgctaaaattctgttgtccagaacatrctccagaatacagagaagtaaacacaacaaaacattatttgttcaaagttacatgaagagtcagaaggggataaagagtcattctaaactagcaaaaatagggattgttaggcatctttaagaaatgtaatctattgtttttgaagaatatttgctaatttgaacttactattttgaaaatatttctgagcagaaaatcttgtgagaagatatgacttattcatttatgaacaatatcatctatgtctaaagactggatcatatttattattttcagtgtttgtttctcaagtatgttaaggcttttttatttagatcgcattaaattttttacttattagcttatttatattttattactgataaaatggtaggacaaacatcaattcatttgaagcaaaattattaaagaatttgaatttaagactaaaataataagattttacttattcaattaacaattaggtacatactatgtttcagtcattacaacaatcataatttaattaatttgaaggttgtgattaattggagtacattatacagtcatgtgtgttaacgtgtgtgcatttgtgtgtctatggctcagttaaaaatgaatatttggggggctgggcacagtggttcatgcctgtaatcccagcactttgggaggctgaggcaggcagatcacctgaggtcaggggttcgagaccagcctagccaacatggcgaaccccatctctactaaaatacaaaaattagccaggaggcagagggcagaggttgcagtgagctgagattgtgtcactgcattacagcctgggcaacagagcgatactcttgtctcaaaaaaaaaaaaaaaaaaaatatgggccataatgtcaaacttaaaagaaaaaaccagaataaaatcctcaatccacaataggatatagagatgtggataaagaagtagaaagaaacacaaacatggtttaacttgcaatgatagggtcatgagtttgttttctttttcttttgaattctaccagaggtcttatggagttgtttctgcaataagaaaaataactaatgaaaaatggatccagattgacctgtttgttctgagtagaattgaacagaaatttaagagagcagccactggaatgtttctgtagtacagacatacctataaagctcaccgggaaatttctatttcccattatttccaaaatgtcaaattctcagatggagagttttaggtgagggctgcatagagaaggtgggattttggtctgcctattttcaacatccagaaaaaaagccaaagatacgagtcgctttatttttataayattaagtttccatctgttgggaaatatgtgcgttactctgccactcrcacccaatattacctgatacaggatgtcttatgcagtctgatcacgtggagcataaatgggtatcaaaaatactttaaagtgattgataaaaatcagcttgctttgggaatattctgtaggcctagtttrtaattgtgtttaattttattttgattaagtattctgccaggagaagcaggtggggagatctatactcatgggaaaagaggaaagcatattctggctaacagggaactagaaaatcagagtggggaagggaatcaccttgcctgagacaatagatgttctataaaattgagcttcttcatattatcatggaaatgacttttcggcagtagtgcaaaaargttgttttacattattgttaattgtgattggagacacaaaacaatatgatcatttgatggcttatttgttattcaaaaaatgacaggttttatgtattcataaatatgaactcacttggaaatattcctgtgaatttaggagccatctaaatgtacttgcttaatgcatacactagattttaatgaagccatatgagtttatacttcgtagattacctgatggctccttgtcggccatctgatgagggaacgccgtctgcttggtgaatgtgagacagagaaatccatamctttgtcagaatttatggttggtgggcagtggctttcctggaacatggtacaagaggcaattagtcttcagttttgtgtgcgcttttcatcttgtcgggagtgtagctgatagcaacagcattgccttcaccccattacatcccttttctcctcttcaagaaggggaggttgaaagaacagcaaggaaccttaaattcgtcctggatagcataaacagagtttgggcagagtgtctggcatgcaatccttttgtgccatttacagtgacaggacaccactttcaaagatgacactaactgttcagaggctttaatatgattkcctccaaatgcttgagaaagctccatgtgtttgcctggcactctgctcttttaagatatgattctattcccctctctctctctttcttggaagtgcagcatcctcagctggtaatctttaatccttgggctgcagtgatttcttttcatacagcaacacattaaacacatatttcatgcttccctgaaccaaattcagaaagtaccaattaataagttgatggggaagaggtcaacgggtagcattaaggccacctgtctggagacattaggtgcacactttgaatgaaagacccacagagagttgggaatgaagtaatttatcacacattcrtgaaggcataaaatgaggatttaaggcagtttcgaaggcagctcctccatcttgctgctattgtgattgatcccattgctctggacaaaattgggcatcccaatgagacagtgtaaaacgtctgaagctgtgaatttttacgtatttatagcttcttctgtggtgcagactgtgcagagcaaccaacttttctttcagagagttttagagagtcatgtagacttagaagttgtgaagcttccatccatatctcagagtgttctgggcatctttctatgcattcatttattcattcattcgacaaatatttatcagtgtaccatgcatactggaccttagtctagctgctgggaattcatctgtgaactatacagacagctatctctgttcgcacagggtttattttttagtagaggttatatagacaagaaacaaaataaataagtaaattatatagtaggctagaaggtgatgagggtggtggggtaaaatagcctttgtgaaattcctagagaaagctttagagcctagactgacttaagactcagaaaatcaggctaagtttggatggcgtaggaaatcattgaagtggaatgaaaagattcgaggtagggaagaaaaacaatggactccatcctctttctcttccacttttcccacagcagactataaccagtctgttaatcccycaaaatggaaagtgcataaggcacagtaggaagaagggaagaagggtaagtgttccaggttcaggaaataaccttggaaataaaacaaagagtcccctaaaagagaagagaatacagttatctatttcatccctcgttcttccagcttctcctactcccttcatttctttgtagaaatatttctgtagcattgatccaagatggaaaaataakcctgacagagtcaaggtccctgtttggccaagcattctttgcctgmccctgtccttcccttgtcaaarattagctaattttcaagttttgcaaatttgtaaacttaattttctgttgtttctttctccaacaattctttgctgcagataatgttactcacagacccggagattgagagcagtttattgatcagctcagatgaaggggcaacttatcaaaagtaccggctgaacttctacattcaaagcttgctttttcaccccaaacaagaagactggattctggcatacagtcaagaccaaaaggtgagcatacttaccttgtttgagacaatgaagcatggttctccggggaaaatagtgctaatttaatcatctctccatttcacctcagtgatcatttttgttctgagcagtagcctgacctctgtgctaatgggacaagggaaagcaaggagagtctcaggttgcttgtttaaatcatgtaaatatctgaaaccacttaccaaataaagattaggtgtactaagtaagacatggtggagaagcagttctcagcatagatgcttaaggcagtcaggagcctctgacccccactgaattggagacagtgtcttatgtttgtggattggtgatcatttctcttggtgaaagacccatggcttttctcaaactcttaaagggaagcataaccctgaaaagtttaagaacacgaagcagggttgttctaaaacactgagagaaatggccagaggaacaataatgatgtatataggtaaccttatgcagaacctagtcatctcagaacttttcttcacttggtggtaaagttgaagaagtccacttcgtaagaaaggattaaatgagctcatggtattagctgtgtgtgtgtatatgtgcatatgacccataaaatgtcatcctataatatatattatgtactctatacgacatatatactataacatacatatggtccctgcctttaaggaacttgctttctcaggtagaataaaaggctagcaatagctaataaaattaaattaaaatgaaaagaaacagcatttacacaggcaaatgtgagagagactctggccataaaaaccagagggataattggtgaaatactagaatactccttgtgaaatgcattatgcagtgaagtcattctgagaattctccttagagggatcatgaattagaaattatataaatttaaagaaatactggacttaactaagtgaggtgaatattctggggtttcatttgtctgggtttgcatagatatgtggcatttttgaaggtaggagaatggtatgagcaacttcccaaggtctctactgacaggagcattttaaaggaagcaaattaaaattcttaagattggagttttattcatgctgcccctactgccaaataaaatgcacattaatcctaaaaatagaaagaatttacaattcatttttttttcctgttgagcagcctggctaccctttcagcagaatgtacaattttgtttctggagtcaagccacagtgcatctggtccaggatggtgcaattaacagaggcgaagcctgaccagctcagacagagtattagtcatttaatccacagggttgttacattttattcgacagttggttaattcccccccaccgatgccagaggcacagcgaggaccagatttacctgcctaagtaaaagctttgcatctttgcagttatgctggaggagatgcccaaatatgtaaccctttcgttcccagcacttcaaagagtgcctcccatggtcactgtggcagagtggatgatacaagaccagttaggatgcctgggctgtgacttcatcccagctacttatggtgaatagtatttagcgttggtttcctttgcgttaaaatgtgtttgtatggataattataattgtaggtacccttccaaagtgatttaaaaagaaacaaatgttagatgccacatctcttttaagtgccatgcatgatacagtgttgatataaaataacaatattctatccatctggagatagatgattaacacatatgagttgaccaatagtttaagagaggccacaaaggcagtgctgtcactgaatattatatacaagggactggatgaattacattaaattggtagcycaaagttcaggagatagagatctagtgatctgtctactctagaagtcttacaaaatgacttcagctggactttaatggatatgtcggatttctattgtaacagtaggggaggccaattttttacaacaggaatgtcatatacatgaaattgtaaaaatcacatttacaaaattgcaaatttttctatttggctgaaactaaaatttgttatagctagttataatttacacacacacacacacacacacacacacacacactttggaacctaatccttattatttttcactgttttggctgtttgatttttaggaaaactaatttttgtttccttaattaggagccttcagaaatttgcatccagagaatgatatgtttagggctatagatttcaagcgttaatcagtagtaatatcagtataaactgtggtaatatgaggtcaaaaacaagaccagttgggatgatattacagcagtcctggcatcagatgctaagggtaagaaccaaaaggtaccctttgtgaccacagacccaatgaatcctgtcattttaaagttggaagcagtcttcatttatttgttgttgtttttctgtatgaggccaaggatctaaatatctaagaggttaacacattttctcaaagggaaaaatcactaattggtatcacatgtggatattctacaaatggggtaaggggctacctgacgtttgatagtgttctcattctttttttttttgagatggagtcttgccctgtcacccaggctggagtgcaatggcgcaatctgggctcactgcaatctctgcctccagggttcaggcgattctcctgcctcagcctcccaagtagctgggattacaggtgtgtgccaccacgcctggctaattttttgtatctttagtagagacggggtttcgccttgttggccaggctggtctcaaactcctgaccttgtgatccacccaccttggcctcccaaagtgctgggattacggacatgagccaccacgcccagccagggttctcgtttttgaaggtgatattttgagatgaacagatgggaaagagccaggctttctactgayctctctgtttctttaagagaggatgaaggataaatcatactggaaaaaacacatcatggatagccagctctacaagtaggaatcagagaagacctccgtatctcaaggcttgaatcacagaatagggagtggggcattcgctggaagggagtgagccgcagccgttagctgatggcattggctggaagtcaagttgagagggtctgtggccactcaggtgggtcagtgatayggaaataaaagctgacagtcccccatgggtcgtggaacttttagcactgatgagatgtgtggcaacaaggaggaccatgtgctggtgttggctggccagtgactgcccttgcctaggaaacaggaacatttattctttcatgtaagtattgctcatcagtttttctgtgacagctgctaatgtcactgctgcagatctcccagctaggatcttacttagtattatctctgctggatgctgttttacatcaaattgtggtgaacaatcccttagaaaatgcattattgaggtggcaattcctatgaacagggtcctcctcttttctctttttctttatttgctggcttcyttgtttttttaaggcatactctccgtcttttgaacacatagccacatttattttccccttatctccctgacattgctttttctctccttcagtgcmtgtgacttttaagctcctaaggacagagtttggagctccggcctgcaggatagaccstatatgagctgcggtaccctgctctaattgtgtttcattttgggtgcctaaatcccagtggaggctttttgatgtgggcattataagggactcaaagagttttgttgaacaggtgttcctttctggtccaagatagaattttactggatatcagtcctatgggaggtcatattaagattttaaaaggtggttttaatcagggaagaatgtgtatggccaaatgtcctcagaattcacaaaccaaggtttttgatattttttgtttttacttagaaggagaaatctatttgtgatattcaacatctaggtggttgtattattaaggattctccaaagaaacagaaccaataaggggaggagagagagagaggaggggagagagagagagagagagattgattgattgattgattgattgattatgggaatttactcatgtaattgtggaggcttataagtcccaagatctgccatctgcaagctggacaaccaagaatgccagtggtataattcagtccaagtttgaaggcctgagaattggttgggggtggaaccaatggtgtaagtcctggtccaagtccaaagtcctgagaaccaggaactctgatgtctgagggccaggggagacagatggatatcccagctcaaaaagaaagagggaattcaccctccctctgccttttctattcaacacctccaaggattggatgatgcttgcccacactggagagggtggattttctcagcctactgatttaggcactaatgtcttctaaaaaaacccttacagatatacccagataagttttatcagctctttgggcatctcttagccaagtcgacacataaaattgaccaccatcatagttgccaagaggtaaatgctatcttgtctggggatgtggctatccaggcaccastagaatgactgaaaggaaaatgtgtggagccttttacccattgaaattcttaaataagtagcctgcgttcataggaaaccctgccctgagacttaycgagtaaagacataggagctggacttggcctctgaagggcctatgtgaggaygtgcctttggaaagccctgaaatcttcagaaaaaggaacattatagatacaattatagagattctgtttcaaatggacagggggctacttggtgtctacaatcccacccctcacatttttaaaacaatgaatccttgtggaaagtatgaagaattccatggcatttattataggagcaccaaaatgttgctttcttttattaatttactttttttatttctataatttaaacagtaggcaaaccaagcattctacccatttaaaaaaattctttgcatttggaaactgagcagataagagaaaggagatatagtcctttacttcattgctagctgactttcttgcctcaatacaggaaaccacccaaggaaggcttagcagaaggctgagcctgccagattacatctttatttcaatttggcaataaactagtgtacaaactgtgctataaaacattgcctccaacggcatctctcagtctgtcttaaacacctcactaaacatgatgtgttgggaaacatttgaaatgagagaaaacaaagagcagatgtgactgtaaggaaatttaaaaaaaaaaaacaggagagaagtataagaatctgtgtatacctcagctttgctgtctatgccggggtaagggctcttggagcctctgttaggatttgcaacggagacgtgatttgtaaaggggagagtgccatgttgtgaaaccaacatgaacgctgtcaggactcttgctgctgagtggctggagagcagaggccccttgctgtccttatccagacctcttcttcaggtagctccagagaagggcctgctgccccttaccaggagcaggaagggctgctcttctcctgtcctgtgcaattcccacccttgtggacgttcaagaccacgtagagcatgaacgcagttcctatacaaacaggcaagaagtacaactgaacaaaacaggctgggtccaggctgtgggaagttggagagcaggtgttcatttagaaggagggagggatattgtcaagctctagcctgctgttcttgccatgtaggaaggtgggtccaatgtcaccagaccttcagaattctttctttttttgagagaagtaattctgctttgttttcaatgtgaagttttcttatttttatgtgtgtaacaatgacctcagaaatttaaaaagaagcactgcataggacaaataaacctcatctgctgccctgtggttgtcctttcttctttcccattatctttgtttttctttgttcatgggtctctcttttgattttatttgagaagatgttaattttttttttttttgcgattttttgaaaaaagtacattcaaataaatgatcggttttgtcgagggagaataaaacttttaggacagtttggtgggccaccctttattttgtggcagttctagactatttgtaagtttatattgactcgcttattttggagctctatgagtccaagtaagaacatgtggaaaacttgcttcattcctgatcttctttaaattccaaaggatcacagtttatgaaataaacagaaaatcctaaggcctgtatgttggccttcccttcaacattttttggtacatatgtgtcagataccaaaacatacttttaaaggcagaaaacaggctttgatagggaggttctgtttacaaataatggaaaatctaattttttcttctttttttgagacagtcttactgtcttgcccaggctggagtgcagtgatgtcatcttggctcactgcaacctctgcttcctgggttccagcgattctcctgcctcagcttcccgcatagctgggattacaggcacctgccaccatgcctgtctaatttttgcatttttttagtagagactgggtttgaccatgttggccaggctggtctcgaactcctggcctcaagtgatccgcctcggcctctgaaagtgctgggattacaggcgtgagccctgtgcctggctggaaactctaaatattaacagctggcattctcttcagaaatgaaggctgactttcagttaaaatcatatggtgatagaaaaggaaaaatggactgccaatgtgatgaacagccaatgacagaattttagtaacatgcataaaagtgaattttattaaaaaagaactaattttagttctctgycttctttctctctctaccagtcctgcaatgtttttaaagtttcatatctattctacatgtatatctataaacatatctataaacaaaaaatcttctctttattccttttaattgttcctttctttctttctttttttttttttttttgagacggagtctagctctgtcacccaggctggagtgcaatggcgcgatctcagctcactgtaacctccgcctcctggcttcaagcgattctcctgcctcagcctcccaagtagctgggattactggcacccgcccccacgcccggctaatttttgtattttttagtagagacggggcttcactgtgttggccaggctggcctcaaactcctgaccttgtgatctgcctgcctcagcctcccaaagtgctgggattacaagcgtgagccaccgctcccagccaattgttcctttcttttcctgagtgagccttcacagaaggacaatacttatcatggctgctttcaatggcagacattccctgggaaatattgactacttaataaagaaatagatgccagcgctttcaaaatctcagtcatactaaggtttctcaccactgaccgacagtagagtgagctggtaagaggatcagctctctgctctgtcacgtcctacccctgctctgtgaccttcaacaggtcgtttaaatgtagtttctccaactgtaaagtggraacaataataagagtacctggctcatgggactatttgatgatactgagataacgcatgcaaaatatgaacacagagcctgacacatagcaaacatggcatagatgccagccagtgtattatccaaagacctgaaagaaagcacccctggtgtggtgcagctggaattagacaaagcatgtcttaggcagaggctgtcttatccctgtgcctttccagtacgcagagctacaggcactttaatcaatttaatttaaatgcctttttagacaatcactaaaaggtcccatggaagcagaatgaatggaacaggaccgacagatatgtggtacttagaaatattattgattataacaatagaaaaccattaaatattaaagtatttatcttcacattaactctatttgttttttaatagacctagcagccccttaatgtcaaaagggcaagattgagataaagacaaattgatccttgaaattcaaccccctggggatattcaaatgatttctgcacaagcacaaacacttaggaaactgatatctacctaatgccatcatgtttccccaaggcactgcattaagttaaaaggcactcagttttttataagaaatatgttgagcattatataccatgctggtttggcaggattttcatgtgcttgaaatttcccagtgtcagatctgatttctaacctcatgaatatgtgagtaatttaagtatccaagtacaaaactggcaattagagtggaaaccagggagctcgctaaatgtcaaccccaacacttgtttataaaacgaattctcaagctgaaatgccatcatatgcaaacaaggaaggcctactacgttcaccttagatactgtgtttaaacaggttgtatcattatttttcaattgctacctggaacagtttgatttgcctgtttctaatgatttcgggaaaaaaaaatagagctacaagaataaggagaaatgaacattttaaaacaagcaattgggtttaagatttgaacaggcacaattgtgctatttaatagttttgtaggctttgaaagagaggtatttgtttgtccaaatttttagctagttcttcatctgttctatgccaccaacgcttgtctttaagaacctttaaggggccgggcgtggtggctcatgcctgtaatctcagcactttaggaggccaaggcaggcagatctcttgaggtcatgagtttgagaccagcctggtcaacatcgtgaaaccacccctctctactaaaaatacaaaaattagccgggcgtggtggtgcatgcctgtgatcctagctaatggggaggctgaggcaggggaatctcttgaaccctggaggcagaggttgcagtgagccgagatggcgccactgtactccaacctgaacaacagagcgaaactctgtctcaaaaataaataaataaataaatatataagaatctttaaggccaagattttatcttatcattttcctatatacctccagacctgaatgcacaggaggtgttcacaaatcaaactcgcccacagtcatatattggccctcccttcccaaccggctctagttccgtaagtctaatcttccaagcttcagagtaccaccctcaactgtagggcatttgacagacttcagtgacagctggggaatgggcagtgacaaatttgataaatccagctgtaggagagattggtggaaccagcaataggccatcattcctgcccagccttcatcagcaaagcctgactgttcagctttgatactcttatcttttgaccttaatgacatttggatccagtctacatcagctccccacaagtattggtaagattgcacctacccagcctggttccaggctctctttrtagccccagcttccacttcactctattatgtatcccagccaaactgggtctcttgctattgaccaaagaaatgtgagaacatcaccytgagttttgctgctctgtttatttgcacagactgacccattcccctagaacactttttctgcatgtcttcattctaagacatattaattgtattacaaagcccgctgtgaattcttttgcaaattccaaactttttctctacaacataggccactacaacactgtgcacaaaatattacacattactgtaggttgtctgtgatatcactaatacacaacattttctttgagaaacttaaatctattggggcagggttgggtgtgggggtctggattgggcatcatggctctttcactatctgctctctgtacggaacagccaagttaaagacttgtgtcagctcttagtgaagtttatggaatccttttaagtgttgtagattttggttcccctttgcatgggtcgtggccccctcctatgctgtggaaccagagcatcagaacatacttctgaggaccgcatttttctctggactgattctctttcttcctattgagggtgatggaaaaaagaacttgatatttgtgatgcctcaggcctggcattaggaatttatatgaagtccttaaggtaccatctctttcttgctaaaaaaggatggaggaacagcagtgagaagcagagagtcakaaggtggatgagtgctttgtacccaggccatccccagggcagtattaggatgaggcaaataaaatagaactggcaggattttctgtcagccttttcaagaagtacaatttgcaggccccctgcttccaaaatgttaagaggagagaaggaaagaggagtgggcaggcaaccttgaaaagagcygacagcaggatgttttccgccaacacaggcgcctcctaaggagcctgtgtggaggatccccaggaaactaccccttgaccggggaagccaccgtgggaagctttgtggtgaacaacatctggtcccatgaaccaaagacttaaaacgttatcacaactcttagcttctatggaattctcgtagcacaaatttctttgaaatggatgctctttcactcatttcccagctgcaaaagagaattctatcacgtgcacctgtctaacaatctgaaaagagaggatacgttgatccgatttaggaatattgaaaagactttctagggacactgacaattgcaagcttgtggatcaccacaaggagttgaatttcttatctagtagcaagttgtcactcttctagggatttaaccaaaatgtgaatgttaaggtggaaatgaaagttggaaatggctgctacccttctctcatcccatcttcatctgctgtagactaggaattgagcaaaaccagtgcatcccattctttccctcccccaggctattttgccctgctgtggcatccctctttgtcagtgcctaccacccaacyggcagctccaaagacattcagaggatggcgccagagatgcctaacagttggctcaaagctctcaatgaaactaaccctggcaatttcatcctttggaattaagtgtatttttatctgcattcttcttaaagcaaacaaagacagatggcaaggaaacaagccaatgtgaaagatgtcttaaaaaaaaaaacccttcaggagaggaacatgtcaggatagagagagaagtgctaatagccccagagtagcataatgacagtgtggagggttaggccctaaggctgctaatagatcttgagcacaggtgagtgttgggtttgtgctcattaagttgtatttactaatgcaatgtagtcacagatactttagaatgattttacacagaaaggattttctgtgttgcattcttattgcagatataaccagaatctttccctgttctctaacatttctgctccttcagttctttttcaacatttatactaatgttagctaaacaaaatcaaacccaagaatggcttttttttttttttttttttttgagacagtgtcttgctctgttgcccaggctggagtgcagtggcgcgatctcggctcactgcaagctccacatcccaggttcacaccatcctcctgcctcagtctcccgagtagctgggactacaggcaccggccaccacgcccagctaattttttgtatttttagtagagacggagtttcaccgtgttagccaggatggtctcaatctcctgacctcgtgatccgcccgcctcgccctcccaaagtgctgggattacaggcgtgagccaccgcgcccggccaagaatggcatttttaagttcatgacacggcactagtagaggaatagtgccctcctaaaactagtttaagtactctttcattctcttcctaatctttctatctttctctaagcttggcatagctagagaaagctgctgctgctttctctgatgtgacagatagtaatgatagttctcagttccgtgttctgacagtcaaaagaaaccttggagtcagagacagacagggagggaaataaatcttacttaggtgctgccaacactatgaattttattaaaggacattgactcattctacagggaaagccttccgctggtggctgagacagtcattgggtaaaatgctttgataccattcccttctttgtggaggagcactttgcttccagactctgtaggtttaattaacacgttaacttgaatggcagagttgttgttttctttttggtcggtataacaccaggctggacaattaattttttagggagaaaatgtctgaagtagtaggtggagaatatagagcaattttgtctaaaagtgaatattcaagactctgctttcaaatccttgggagtttcaaatatactgatatttatagggttttgtggatgtgtgttttatttgttttttaggtatacgcctctagttataaatccatggaagcaaaacatattcctctgataaattttctttgtacaccaattgtgaaacctgtgttctctattaggtagaaacgtgactaggaaattcacgtggtacaaaatcattatctttttcctttatcatctactgtgtttgaggcacccgtacacrtagaaggataggatttccaacatctaaaagctttgcaatctcattaaagaggcaggaagtggtcttagatattttagagtaattttagatagaaaggaatttctgccttgcatttgtgaaaggttctcttgaaaggctattaagagaattaaatataaatacgtggctggtagtttgatagcatctgctcttgttccacagttctttggagatgagaccggtaggaatcttagtaggtagaggagggttcatagaagaggtggcctttcatctggctctgaaaacaagactggtgttgaagaaggaaagtcttgaagccacttctgccagagtgggcagcctcagtgaaggcgtagcagggcrtgtgtgagaaggtgacagggccagcccaccaggaccgaaagttacctttggagagagtaaattgaaagaatctcagtaagctgaataagagaggcttggtttagtggattgttttgtatacccaccacttgaggggcctctatatgctcacaaataacaaagttgctctttgaagatataaacaaatgtcatgggacatacctgagtggtccacaggctccagattcaagcttaggggatacatttaacaagagaaaaaaagaaccacaaacgctggcgcccaacaattcctcacagagatgaattctctgtgggagcaggaatagcaatcctttggtatagccataggagcacacagagtttatatattattcttgcagcatgtatatgagttcagcctgttacccagacatattattattttgaactgtcctgatacttttacatttgcattaatttttgtatgttactaaatatcgatatatctatatgacataggcacaccacaatggtatgaactctgttccctttaaacttatagaaagaagtagagctccgggcttaaaaaaaagaagacaaaggggagagagagagaagcggatactctcgggttgggtgcctgctgttgttgtacagtcctctgtgttgaaataccaggtgttcaggayatgctgagagcaagaagcaggccatgtatacactggctgtttgagttctcagttaagacagtgtgacctgtcccatcttctgttatctctatgaggggagttgtcacccatctctccttggcactcataaaatatatcaaacatgaaatgtacccaggaaaccagtctcccccaggcatgatggccaaagaatgaataataggctgggcacggtggctcacgcctgtaatcccagcgctttgggaggccgaggtgggcggatcatgaggtcaggagatcgagaccatcctgactaacatggtgaaaccccatctctactaaaaatacaaaaaaaaaaattagccgggcttggtggcaggcacctgtagtcccagctacttgggaggctgaggcagtagaatggcgtgaacccgggaggcagagcttgcagtgagccgaggtcacaccactgcactccagcctgggcgacagagcaagactctgtctcaaaaaaaaaaaaaaaaaaaaaaaaaagaataataaaaaagacttagaaagaaaaagttacagattctccttggctagatgcctgaataatgtgtaattattacttagataagcttacatagataagctaggcttatttatatcttgtccctgtctatcttaccactttaactcatgttgttccttttgtgaataatgctatttttgtccatttgaatgctgtcattcgttcaggtcccagctgtttcaccacagcatctggaaagcatccctaaattggctcctgtcttctgcattattttctcactggctgcctcgtgcatttctcattatgtgagccaggttcaggttacattgcgtactcttccagaaccaggtctagattttgcacttctttgcatcacccacaatgctcagcacatgctaggtcaagtggcacagctgactttatcgccaggcagaacagggtgtgcattccagttcattcaaccacttctttgacatgtaatttctcacaagtcggttaatccttctaagcttcagtttcctcaactgtaaaatgatgatattagtctgacttgcagaatttgtataaggaatagagayggtacacatggagcactcaccttgtatatggcaggtgttcagtaaatgttgggtattattattattactattgatccaatgaactgatgtttgtgtatttgatgtactatagaaccatagtgctgagtaatttctgttctttacagttatacagctctgctgaatttgggagaagatggcagcttatccaagaaggggttgtaccaaacaggttctactggtaagtctcactttatcttgtagcacattaagatatgacctagtcagatatgacctagtaaatgcccattggaatcttgttctcaccagtgctctcacataaggtctgttcttattgggacatgcccacatcccctcagggcaggatgtgacattagagtaagaaacactttaagagaatgttaaaaaatgtgtcacagtcttcttgaaaaacctcaaatggattatggaggttagtgaactgcaggggctttatgagaattgctttgttatattttggtggaacctttgagacagacatttaaaaaaatctaatagtgactttttattattaaaagcattatatacacatatatcgcatattcagatgaagattttcagtctaaataagtaggttttatttagtctaaaagtagatcttcctctcattcctgattttagatcttgtaggccttctccttgttatttatttatttatttattttagacagtctcactctgtcrcccaggctgcagtgcagtggtgcggtctgagctccctgcaacttctgtttgctttgttcaaatgattccccttcctcatccttcccagtagcttggattataggtgcacgccaccatgcctggctactttttggatttttagtagagatggggtttcaccatgttggccaggctggtcttgaactcctgacctcaagtggtccacccacctcagcttcccaaagtgctgggattacaggtgtgagccagcatgcctggccggccttccccttgtcatgtgggacacagttgctattgctagtttctcaattatctttctagaaatgttctgtgaattgccaaatgtgcrtgtgtgtgtgtgtgtgtgtgtgtgttagtgtgtgtgtgtgtttgtgtgtatgtagtcttactttgcttgggttgccgtaacagaataccatagactgggtggcttaaacaacggatatttattcttcgttgttctggaggctggggagttcgagatcaatgtgccggcagatttggttcctgctaacgactccctttctggcttgcagatggctgccttctgtctgtgtccatacatggtagaaagagagagctctgatctctcttcctcttttttttttttttttttttttttgagacggagtctcactctgtcaccaggctggagtgcagtggtctgatctcagctcactgcaagctctgcctcccaggttcacgccattctcctgcctcagccacccaagtagctgggactacaggcgcccaccatcacgcctggctaagtttttgtatttttagtagagacggagtttcaccgtgttagccaggatggtctcgatctaatgacctcaagatccccccacctcggcctcccaaagtgctgggattacaggcgtgagccatcacgcccggcctcttcctcctcttatcagggcattaatcccatcataaggaccctatcctcatgatctaagctaaacctaatcacttcttaaaggccctatttgcaaataccatcacatcatagtgggttatggtttcaacatatgaattttgaggagacaaaaatattcagtccctaacatatatagatagagatacttgcatttacataaatggtagctgtgcacactgttctatgccttgttttttttgagggatgcagtttattatgcatatatcattatttttagttaactacatatcattttgctctaaaaatatagattggaggtaaatcttatgcctaattaatgcaaaacataaactatatatgttagcgggaatctgtgtatgggaaaagagaaatacgtgaagagagagagaagggggcagcaagagaaagaaagggacaaaggaaatagcattcctttctttaactgcctcagttcatccccctaattaaactagaggtggctgtgtccatgggaatgggtgggtaaaattgaaaacaagaaaaatatcagaagttaactgtggcttttaagtttccaagatcttagattctggcaaagtaagaacaaagcacagaacattctagtgtgattttgatattaatatttatcaatacctttgaatgtacatcctacctcctgccaaaagacgtgattctaccttaccctaatttctctaatctgcctgtggaaaagacatttaggttgtttcaagatttttactactataaaccgtgttacaaggaattggctcagacaagagtttaaatatcctttattcatgtcatttagaatcactgtgacagtgaccttttaggagccaatgatctccctgtaatgagggcagtgaaagtatctcctcttgattcctcctgaaatcacactgcctctcatcagcctttagagttacaggcagaatagatcaccgaagtacataatagcttcccacctccactccaattctttcgcttttatatgaacttctaagaggaatgcatttttatctttctcattttcaaacactgccctaaaacccctgtgggagttgaaagccagagaactacattagagaaatctcttaaaaagctagcaaaactgcctgaaaawgttagacaagctatttgcaaacaaactggctcagagataacacagggacttctatatggtaagataccactttttcccctatcataatgagacatttgtaactaaaggaggtttttgttgcacagaagcttatttacctctctccctctggtgctcttgttcargatgctgtgagccttgcttctaaagtccaaattgacatcttctttctccaggatctcaactctgtctcttactgaatcttccttctctggtcagcgtttttttctccctctcttactaattttgtatcgtattcatgagaaaccttcatctctgtgtgttttacatgtaaagtataaagttagtttatggaagagagggttcatgtctttttctttcattctctccctttttgggggtgttatatgtgcatagaaaggcctcagaaagtaagcaaatgaaggactgaaataaatgaatgttgtccccctagtttatcctggaaatggagttgctgctttgctaatgaaaaagcatgagggacaaatcttttctcaagtcctactttcaaatgactgcaaatatctgtacatggtgcccagaactagagggtaggaagtagggcttggcagaagttggttcctaccaatagaaacaatgaaaaatattgaaaggatgggcaagagaaaggaactgagatgagaacayttcccatgtaartggtacatatatacagtgttttctatgtcaccagaggtcttatttatgcattattataacctgaacagacctcaccactgcttccgccagtgctaattgcaatattttctttcctattccttgaagaaggaatcttctatgtgaaagcttgatcagcaaagctcttctaatcaaaagccataaaattatttttataaaagccattacacattattgtatgtgaattctgattgatstgttaagtaaaataaataaaacctccttcttttgtttttgaatacagacatatcttgcccattcacgtcttagtagtgcaacaagcactacttaaacttaagctatktaatcctcataacaaccttctgaagtaagcttctcattatcatcattaacagatagggaacctatggcatagagaaggtaagtaatttggctaaagttacccagctggaaagtgccagagccagaatttgaatgaaggctgtctgtcaccacagtctgtgctctactaaatcaacaaatgctcttgtctctgcctcttagccttacgttcttggctgggactgtgagccctggaaatctagcccactcaggcatatcagtggtgagagcccaaagttcttttgaccacagtgccaactgtgcttgtcaaatggctcacaagggttccttaagcttggatgatttttctagagaaggcatgggaactcgtaaattgcatagtaccatgactgttgatgaaaatctcggtctctgcccacatggtctgtattttctaactctgagcaactaccttaagctgacagaaaagttgtcaatcaaagcaatatttattagactcacttctggaaaccagttacttcaaattatgtaggaactatggggctatctaggataattcagcaagcgtagttaaaagaaacctcctttaatcatttctgcttggaacctggctattgggggtgtgtatgggactgagggagatttctctagtgttaaatcaaattgttaagttaccatgggtaataacatagaatttccctagagaagaaatgaaggcaaattcatattttttcctcatcacctaacatattgataattatttttatttctggtagcaatggtcatgccacccctggaagtaataaatagcaattgtgaaataattatggcatgcaacagcttattcttacgttatcacagtggtttctgataatgttaccaaagcactggaggtttggtcaagaccctactgcacacaaagccagtcactgagacagcaagtattgccaaagaagaaggctttaatcaggtgctgcagccaaggagacgggggctcagtctcaaatccatctccctggctaaaagtatgggtttatatagcaggaaatcaatgtaacagggtgtaaaacaggaactagggaggggcaaggaggcatctggttcatgatctggtgagtttcagttctttaatactttttttttgagaggcttgaagatcctttcctgaggaaggaactcagataaaacaaatacaagtttcaagctttaacagcagaagggtcaatttctatgtttatctaaaagaacagtgtatgggagtattgagctggttttattaatactaccatagcaaccataaataagaactttcctccaaggagttcagattgtttctaaaactgacttacatatataggacatcatgtaagagacagcataatattaccattaatagaataggtgtccttttaatttaactgacagcaacagtggtcttgttctttcctgtgctggaaatcaattatattgggaggcagtacaacttgcaggtcaaggggttcaaggacactgaggtttactttctagcattgccatttactaagtaaaaaaatcatggggaagttacataacttctgtgtgactcagttttttcccctgtaaaataattaatacctacttcatcaaatgagatgcttcttgtgagttggttacatgccttgtgcctaagaaccatattgaatgcccactggctaccagtgttaatattattcatatctatttctatctctattagttttgtttttctttgtgttgtcttatgatcaggtttgctttccccattttgtgacagcagtggacactagcagctttaggcttacttattttatttatttttttttttgagacattgtcttgctctgtcacccaggctggagtgcagtggtgcaatctcagctcattgccacctctgcctcccgggttcaagagattctcctgcctcagcctcctgagtagttgagactacaggcacaggccaccatgcctggctaattttttgtattttagtagagacggaatttcaccgtgttggccaggctggtcttgaactcctgagctcaggcaatccgcctgcctcagcctcccaaagtgctaggattacaggtgtgggccgccatgcccagcctaggcttacattttaacagcttagaagccccatcaagccagtctgtctctttttctctatttccagggattgaatctgagaggcctggcttggatcaaggacatacaagataattcattactcatgtaggtcagacacatatctaccccaagaattgaaatacagtctggggttgagacctaatcaaactgcatggttcaaggttggaggaaatgtaattcctaaaaagggaaaaaaagacacacacacacacacacacacaaagattatgttactgtaagggaagatgggttttcttcttagggaaaaaatatagagatgggagaactgagtgtcataaggatataattccatcaggggatttatatttgttgagtaactacattggtctagctagccacatgataatcatgctatttgatcctcttaacaagattatatggtagcggttattatccccattctgatgaaacagaaaagtgaagtgatgttgtttatccaacataacacataatttgtaacagccaggttttgaaagatcagttcaaattcaagacttactcccttctcatcctccaataaaagacaggagaaaaaactttaaattttgaaattgtattttagtttagcacttcagtaggtaaaagctaaggtgccgcatttgacactgaacaaagaacatggtggtggacgatcagtggtatccaaatgccttaaataaggaaacctcctgccaaaagccaaattctctactggaggatggtgagtgtggtttgttaggatctgagtcaagtttagtataaagcaatggaaggcatttctcattagaaactcttcagcaacctattaattatgcaaaagacaatgcaatcttggggctgtttcacttaattaaaaataggttcagccttaccttattgattatgttgctctgacatacagacagctggcttgaaatagggacagctgaatggtgatacatattttctgtgactaattcacacatggaaaatcaagagctgactcagcaatgaacctttgttattttggaatgccagctatgtttcaaggatgtccctccgggagttatatgacatctgtattatatagcagaaggataaatgtttatccttatgctatactcagtgcatttcagcatgtatacacattctcattcttccccacagttcaatgccagtcaatgtgaatgacttcccattccccatctttttcaacaagtcccatttgttgagcatttactgtgtgccaagccttgtgctaagtattttgcatatatcgtttaaatcaatcctcaaataattgatgtgaaatagtttattgatcaagactctttcaagatatgtgatagaaaaatgcatcctgttttaagaagaaaaaaattttaaagagatattggcttatgggtctggaaagtcagaaggaactttattagactccactgtatccataggcttcttaaaggcataagagcttgatctstccccatcattccactctcctttcctctgttttagcttcacttgggcaaaatatctctttgcagtggcctctagaagcttctatcttcccaattcactccaatgttaaagaaaaggacttcttgcttgttccagaaaaactcctagcattaaatcttatgggctctgattaggtaaaatgcccatagatagacctcgggctagaatcaactttactaaaccacatggacagaaagtaaggaatatgatgccccaggagagactaaggtgcttttaccaaaagacgtggggaagataatgcgaaggcatcaacaagaggtacccattatccagagatgtttcagtcctctttttcagaggagaaataaataaggtaaataaataaacacaatcttatataattttgcctaatgtttcccactagtagacaatagtaatgaaatttaaacccaggtatgtctggctagagagcctgtgttatctgcacactatgctataatctacctccagtgtatcttcatggcgcccactgtgctatggaccaataaagtctggcttttgagcttgagttctcttcttacgtaaaactcctacactggcagatactttatccatatccactgggcctcaccgctagtccttgaagtgacttttttttttttttaatatacctggcctattatcgctgccccaaattttctcctctaaccttgagtatcaaggctgacacgaaagaggcagcttcataaacttttgctaacatacctgtccatgatcagaaaacactccagaatataaaatagcctctctctctctctgattctgactcgtatcattaccattcattctcaaggccttgttgaatattgctgccgagccaacttcaggtttttatccctcttattattgtttgatagtttgttatatacacacgaggtcaccatggccattcctcttcctccttcagatataccagctattcagcacagtacccctaagacttctctaagccacccacaccaaagagacttagagaatgtggcgcgagatggctgtaactctttcctcttcctgccccctggtgaatttagtggattcagtaacaagasactgagcctctgcatttttccttctccaggttctgcaaactggaaataggatgaagtctaaaaaggttacaaaaaaaggagagaaagagcataaaactctattagataaaaatgaccagatataccgataatatattaggaagggggtatggctttttttttttccaagatactctgcctcatctcttactcaaagctatgaagcaggtcactgtctgcaaaaaacttcaaaatgaataccatcactcactttcaatttatgttgcggtggcagtggaatatcttaccatttagaatcagctttttaaaaataggcttccatatttcctgattcctcatatcccagtgtgaatactcttgggtcatatttatctctgctgtcttacctcttcttaaatatgtggatttccaagttgtgtcagttcttccctcatagtattatccctgcccacttcctcccccattctccttagcattaccctggtttagctccaccaccaacaccccaatgagaaataatgaaaaagcctctccattcatcttcctatatcactgcccaaggactcttgtgtctccccaatcaaatatttgtctcattcctcattgtttgcaacataaattgaagaggaagaatctaactaggttcttgccattgtggggttgaatgtactttttctgacctactacccactctaattctgtatgctaaattccaggagtccaggtaagtaatagtaagcactagtaagtctatggatctgtcaatacttcttatatctgtccttatttattttagcaatgattaatttttagcacctattatgagccaggacagttttagtctttgaatacaaagatgctgtgtgaggatttttgtcatttattaggatcacagtggatctttctggccktatacsaaagcccacctgtgccatggagccttctttagttcttcctgcttttggggacaaaagaaatctctttcttctctgaatttaaatgtgatgatgtcacagataaaatgtaatatatcataccatgtaccagattgcagctctatatatgtgattggtaggaaaagcatggatttaggatgaacatattcaggtgtaaatttctagctttactattaactaactaggtgattccaagaaacaatttcacctgcccaagcttcaatttcctgctacaaagtcttatttttagcattaaaaatgacatattatcattattaccattaagtaacttagcacttagtatgttctccatatatatttctttattgtcttcttttcatttccttctagaagataagttttttaaggttcaaggctctgcctttaacatatttctatcttgtgtactacagtaaatagagcagcagaaacttgtgcatacacacacacagggtactaaaattcatcagatttacacatgcttgtacatgtacacatgtaaatccatcaacgcagagactgaaatatcttgagtagacctcattagttaaattagagagctatagtaggtaacctctgtatttccctctagcatgaaaatgccagaattctaaatcactggagtatatatattgaaggaatgaaaattttagatccatgaaaggcacacttttccatgcactaggctatttattaactccttaggctgtcctaaggagtaatgagatccctgtaaccagagaaattcaagcaaaaacagaaagactcatcctagactgctctcacagtgcgagcctgtcctttactgctgattttgacaggtcttgatacatttcagaatatggagttcaggagaagaactcasaaagcccttttctttgagaatggactttgttcgctcttcttttacactttccctaattctctgaggcagtctcttctaattctgagcccctgccctctgagtagaatcctgtatggtttggataaggagcagggagaagtggcagagaatcttcccagagatcccttcccaaggtctactgaggcgtttytagtgcctgcactaggagtgctagataagaaaatttttattaccttgagaggcgtggtatttcttcttctttttttattgttaatgatctccacatgaatgctgcttgctaacgcttttgcacctcctccgcattttttttttttttttttttttttttttttttttttgagacggagtctcaccctgtcgcccaggctggagtgcagtggcactatctcggctcactgcaacctctgcctcacagtttcacgccattctcccgcctcagcctccctagtagctgggactacggcgcccgccaccacgcccagctgatttttttatatttttagtagagagggggtttcaccgtgttagccaggatggtctccatctcttgacctcgtgatccgcccgcctcggcctcccaaagtgctgggattacaggcatgagccacagcgcccggccttttctttttcttttctttttttttttttttttttttttttttttttttgagagggagtctcaccctgtcgcccagtctggagtgcagtggtgcgatctcggctcactgcaagttccgtctcccaggttcacgccattctcctgcctcagcctcccgagtagctgggactacaggcatccgccaccaagcctggctaattttttgtatttttaatagagacggggtttcaccgtgttagccaggatcgtctcgatctcctatctcgtaatccgcccgcctcggcctcccaaagtgctggtattgcaggcctgaaccactgcgcccggcccctcctccacttcttaatcttttcctgtgattagcaagttttaccttcaaattaagttaaatttccccttctgcagtgtgagcccatcacttttcatgcgaccttcattcactaatggccatcactgattcctgtgatccttatcttgatgatgcctgtccccataggctgcagcttctctatctttgaacaatattcagtcacttctcgagacttcactaagaattcctatgatggcagaatgcaagtgattaccatgagtgagrgtaagagggaaaaaaaatcctcataattgtgtcttcttaatttataattttattaggaggagtttacttggccctagtgatcacacctcacttagctttcaaattaagggcctctaagtttgcttcacgtctttgtatgcttatccttgttcattcaatcatcgattttgaatgttgcctttagtcaataggagatggtgtttaatgtgtaaaaattggagttctggagtcagaatacctttgccagaatcctgttttcaaggggtgtgacattgagctctttaattaacttctttaagccttacagtattcatcagtaaaatggtcctcataagagtatcttcctcgtatactcattgtaaggattaaaatgagatcattcaggttggttrcatatgtgatgagtaaatgttaactgctgctaaaargaggaatagggaagagttggrtattaatgtgtttctgaaatgtggcaatctcattttgattcgattgaataatttatattttcaatgggaatttttaatgtgtgcatgtattttacttctttgttgtccagaatcaggaacagtggatagaaaatcagctgaaggttttatttgtagcttctcaattttatattattcaactcatttaattagtttcaatggagtgattttacaggccaaattctggccacaaagatgtaggaaacacagttccttccataaaggggcttgcagctgcttaggtaggactgcaaagagaatgcctaaggaagcatatggaaggatattttccctgcatagctactgctcagtgagtttgcagccaagcaggtttggggcctgaggtcacaaggcgggcagtctcaagtaaaactgggcatggaattgggaagagaagaacaaggacaaactagaacctgtcgggacatctgcatctgcctctcactacctctaactaaaatgagtcttggaaggaattgactgcgcccctttcctgccttccaaatctcatatttcctattggtgaattgtaatatgaaaccttacagagactctgagaaatatagttcaggcagaagtaaatcacagtctatcctttgaaaacttgtcacctgtgcaggtattttgaaaccatgtataactcccaaataaaagcaaaagcaaaattatgcttctacctagcatgatggcatttctgttcctccataacttaaatgtgataaataactttccccaaaatgaaatcatttgtgtatgccacattatgtatatttaggtaatattcctcctctggttgagtcatgcttcccctttctatatcctgaaagcaaaatgctgagatgtaggattagtcaatataatcaatattgacatattttctgcagaaaacataggtaaatgtgggagaagaagacaaaaggaaaggattgttacacacactcacacacaggtgtaagaagaaattgaccacagagcagagacagcaaagtgcctagaacagttggtggcatgtaatgttatcataaagtctaaattttcatcaaatggaggtgcattattattttatgtatcagcaaaaaaaaatgctgccaattaaactacaggtatatctaagatatattgtgggtttcgttccagactagcacgaataagtgaatgttgcaatattcttgcatctcggggaatagggaggcctgaggagagggagagagatgggggaatcgctggtctgtggagccatcagaacacacatgccattaagtttgcaattaagtttgcatcaattaagtttgcagtcttatatggttgttgtttgtggcactcaaaaacaatcacaatagtcacatcaaagatcactgaccacacatcgccgtaacagatgttataatcatgaaaaagtttgaaatattgcaaaaattagcaaaatgtggcacggagacatgaagtgagcacgtgcttttggaaaaatggcactgatagaattgctgcatgaagggctgccacaaaccttctatttgtaaaaaacaaacaaaacaaaacaaaaaaactcagtatctatgaagagcaataaaaagaagtgcaatcaaagtatgcctgtataacatttgaacaatcataagatacctactgatgtacaagatgttaaaatgagaaaaaatttgcattttggaatggatggaagaggtgctcaataaatattttctgagtgagtgaaaaatgtaggacagatgatgggaatgaggtggcattatttattcattttatttattttaatatttcaattgacacgtaatagtacatatttatgggatacatatatatatagttatcggatcagagtaattagcatatccatcttctcaaacatttatttctttgggctgggatcattctatatcctctcctcttgctattggaaaatatataatagattattgttaactgtagtcaccctgttgtgctatagaacacgagcacttatgcttcctatctatctgtcatgttgtatctttaagtacattttcaaattgaaggttaaatagggttgtcatagtagataactaccgagatgcrgaatgctaaattcaagacagaagagtagagaagacccaaaaactgaaggttgacttatttgactgagcacaaaagaaaggcagagtagatagaggaaaattctaaaaccaactgtaagactagtgaatctatgtaggtgatgagccctgatgtatttatgcatcggaatctcaggatcaaagataacttagaagacatctcatctgaccccctatgacttgcaggaatctcttctaaaaaatgctagagaaatggatggaaacatcattttggtttgggaatggaacttggtctgtctgtcaggatctgtcttcctctaaagagaataactagaggaaatggagctgtcccactattttttattgttgactctggcacttaaaacatcaacacctctaaacaggacaattctataatttagagaaagctgtcaaggttttcacaggcatggcaagatgtgccctggggtgagggacagaacctgcgtttatgagatttatggtaaagggttttacatgagtgctgaagtttaaggcagctaaatcccagaagacaaatactaccaataattgaattacaaagccattatcatgtgctgaacasagcaattttatgactctattgtgacaggatgaaacctgttagaatatttatgcacttgggatagcttctgcttcaccatcccagggaacaaaccagctcttccattgccttctatgatcagttggccttcctgagtaattgagtagtcaaggaaagcgagatgcctaagagagaggaatccaaaagagacatagcagacaaccacatcaggcacaagcctcacatttgacctcacatttcagcagctcctggacccaacatctttatgttgtcatctgctatcaggttctgtctgtggtaaccagggaagcccaagaataaataagaacgctggctgtcagcattgttttctacttatgaataaatcaaaaataaaaacatcccagaaataagagccactaaaacaaccttaacacttttttgaaaaatgaagtagcttaattattttgtgattgtcgaaatgcctgaatcataaatataagacagctgaagtgatacagttgtttaccttctttaatgacagtataaccagtccattccatgtgatgaggctgacttactgaatagattactttcctctttgtaggaaattgtggctttgctctaattcatgtccttaataagatttgggcataggatttttttcctcttttatttaaamataattttagaattgcagaacaattacaaagataatacagagagttcccatatcctattcacccagctttacctaatgttaacatcttacattaccatggtgcaatgtttaccaataaaaaattaacattggtaaaaaacagtgaactaaaatagagactgtctggttttctccagattttctactaatatcccccgcttttttttttcctgacccagggtacaatccagaatcccaaattgcatttatttttcatgtctttttagtctcttcaaatccataggagttcctccgtctttccttgtctctgatgacctggacagttttgaagagtactagtcaggtattttgtagagtgcccctcaaattgggttagttagtctgatattttctcatgattacagggttatagattgttgggaagaatatcaaagaaatgatgtacccttctcatcacctcatatcaaggagtacaagatatcaatatgtcttattactgatgatgttaactttgatcacttggkgaagggggcgtctcccaggtttctccattgcaaagttactttttttcttgtcccgtactctatttgttggaagctcccagatttctccattgaaaagttactctttttcttgtcccatactctgtttgttggaagcaagtaactaagttcagcccacactcaaaggaaggagaattaagctctaactcctggcaggataagtatcaaaaagtgtgtgaacatatgttaatataaccagaaaattgatcaagattttggagagatacgttgagaacatgcgttttgcctactatagtattcatagccaatcttgcctacagcaattattactgtagtgtgctaatgaaggtgaataagctcaattctagattgtgttttgttgtttctttttttctttttctttttcttttctttttttttttttagacgttgtctcactctgtcgcccaggctggagtgtggtggcacaatctccgcttattgcaagctccacctcccaggttcacccattctcctgcctcagcctcccgagtagctgggactacaggcacctgccaccatgcccagctaatttttgtatttttagtagagatggggtttcaccatgttagccaggatggtcttgatctcctgacctcttggtctgcccggcctcccaaagtgctgggattacaggtgtgaaccaccgcacctggcccttattgtttctttactaatatctctttctcactttaggtgtccctctgccctggctctgagctattgtcaagaggatccctgttgacctactaattaagggcaagactttttggctaataaactttttgttggtctttttttaaggagcattttagagtctgacctggaatggagacgtcagaagcaaatgcactttctctgtgactgattttcttggttgaccatggaggtggggttctcacccagtagttctgagctttcctctttgttcagttgggcaactcacacatcttttccaaaaggaagatgttatacacatacacacacatgcacacactcacactcacactctgttttaccttttcctgtctctcctctgtcttaaccaaggaaaaaagcaagcctggctgctcccaaaaacaaaacagacctgtaagcaggctactaacctctgtgtttaagtcattttaattcccaaaacaaagaatgaaggttctaaattcaccaattaaaaaatacatgaaaaatatggtatagtcataaggtaaatattctaaacattgtaagcactcttataccttatggacttaaactttgtgggtaagggaagactacaatatctcctcttataacagttgttcctattgaaaaactagagagattagagacacatacagatatttacctacaaagatcatcagtgcagcatcatgtctaaaagtaacatgatggccgggcacggtggctcaagcctgaaataccaggactttgagaggccgaggtgggcggatcacgaggtcaggagattgagaccatcctggctaacacggtgaaaccccgtctctactaaaactacaaaaaaattagctgggcctggtggcgggcgcctgtagtcccagctacttgggagactgaggcaggagaatggcgtgaacccaggaggtggagcttgcagtgagctgagatcgcgccactgcactccagcctgggtgacagagcgagactctatgtcaagtaaataaataaataaataaataaaagtaaaacgatagatattaccaatactctgtgatcagaaaactagttaagtcaactatagaatattgtacggctggcaaaacagtgygttctaatattacatcgtgtgttacgctgtgttcgtgatatgatgcaaaagtcttaaaaagaaaaaggagtgcctacacgaacactgaaaaagtactgaaggattaacagcaaaatattaaaggtggttaattctagatggagggattgtaagaatgttttagtttccttttttttacttctgtatacttagtattatattttcaatgaatacatactccttttgcagtcagatttttcacagcggtgttatttttaaagcatgctatttaaataaattatacaggccgggtgcggtggctcacacctataatcccagcactttaggaggccaaggtgggtggatcacttgaggtcaggagttagagaccagcctgaccaacatggtgaaaccccgtctccactaaacatacaaaaattagccaggcacggtggtatgyacctgtagttccagctactcaggaggctgaggcaggagaatcacttgaacctgggaggcggaggttgcagtgagctgagatcgcaccattgctctgcactccagcctgggtggcagaatgagactccttctcaataaaataaaatatacaaataatgataataataaagcagtcaaacatatttccagatggatggtggtgtggtgggactggtggcagccaggcagcaggagggcatggtgacccctgtggaatagtcatagcgaagaaagtctcctctctctggcttctctttcctccctttctatcctcattctgtctccaatgccttcatttgcccttctcattctcctatcctctctttcccatgttctcttttactccctctctttccctttccctcctccacttctctcttttctttgtcacattgagatattttcaaaaccaactttaggaattcacatccatagtggactactgatttaaaaacagaccccaaaatgagataaattaagaggtgtgtttttctttttttgtcatcacactagtttccttggccaaggagtttacatgagttcaaaagcaaactggcacagcctttaaattattttcacaaaatagcttccctgtctttgcccagtttcaaatcccttcacaccttatactcagaactccagaaatttttcatcaacaaacaaagtacaggtagtacagccctaatttgaaaatccccaaccataaatgctccaaaatctgaaactttttgagtgacaacatgatgtcacaagtgggaaatttcataccatacttcgtgccatgggttctggtcgaaatgcagtcacaacttggttttatgcacagaactaataaacgtattgtatgaaattggccaggcgtggtgactcacacctgtaatcccagcactttgggaggccgaggcaggtggatcacttgaggtcaagagtttgagaccaacctggccaacatagtgaaacctcatttccactaaaaatacaaaaattagccgggtgtggtggcatgcgcctatagtcccagccacttgggaggctgaggcatgagaatcacttgaacccagaagacagaggctgcagtgagctgagattgtgccactgtactccagcctgggcaacagagctagactccatctcaaaaaaaaaattgtgtaaaattatcttctggctatatgtacaaggtgttataaaacataaatggattttgtgtttagacttgcgttccatccctaagatatctcagtatgtatatgtagacattctaaaatctgaaaaataaaatccaaaatctgaaaccttctggtcccaagtacttcagataagggatactcaacctctgctaaggagagcagttgccatttcgcaccccaggaattgcctctccaatgaagatcaatctaatttcctcctatatctaacccaattctattcttactcccttccaagctttactgactggatctcttttccttctcagttgaagtatttgagggcaatagcctcttagtgtatttttgcagaagtaccaatacccaaccataaagcaagagaagactttgtgtcataataatctgacgaagtatggaaaagcgactacaaggatagctaaaccagccttacctacaggccaggcactgagctgtccgtgtaaaaactgacactgtgttttctgagaagggagagaatgtattagtcattttgcaagtgactgcaaaaaagccaccttcaaacttagaaaccctgctatttaaggtctaagctgaagaaattaatatctagtctgtttccaatctctgggacatgggacccctcatatatgtctaggctcatgtatgccaatacacttaacgcttgcaggatgttgaaatgtcaggattttccattctctctctctctcactctctctctctctatatataattattattattttttgagacaaagagtctcactctgtcacccaggccggattgcagtgacgcaatcttggctcactgcaaactctgcttcctgggttcaggtgattctcctgcctcaccctcccaggtagctgggattacaggtgcatgccaccacgccagctaatttttgtatttttagtagaaacggggtttcaccatgttggctaggctggtcttcacctcctggcttcaaacaatccacctgccttagcctctcaaactgctagaattacaggtgtgagtcatcacgtctggcttctccttatctttttagtgtgtaagacacacattatcttcctagttaacactgtcttgcctcagacactaaggggtaatttttttttctatgaaaagaattattgacatgagttaaggacctgggttagtaattccaaccttgatacactctgagtggtatgactttggacatggtatttgctctctggaagcctgggctttcttaattgtaacaggaggtatttgaactagttaatctctaacagactttctgtccctaaaggattccttgattcatactcttgacagtagtagtagctacacgtatttcgtcttttacctttcacaacaatcgtattattyggtactattatctctactcttttttacaggtggtgtatagagccctagagaaattagaatgcctaggttccagtctgattgtatcttttattagctctatgcccttaggcaagtaaattgctttcagagataacactgtctttctcttatcttttcattatttttcctgaatttgtgtcatgtatgaattttctaggcacacaacatgtattttcacccaagttgttgacaattgatgagcaggacaccaacaagagcacagccttgtggccctatatgacatcaatctcacacttaatagatggaaaccagccattgattgacaccggggaacaatgggtttttttttctgatggagctaaatgccttgtattttatatatttttcctcacacagctttcaagaaatgttatgagcatcacctgacatgtttatttttaatttctctgtgttccatattgaattgtaagcttcacaaggtacagggatttttcttttttattcaattttaaacccctaatgtctagaactacacctagcatttgtagttactcagtaaacatattcaaaaatttatttatttattcattaaaaaattaattcagaatcaaccatctgccatgcctggtgttaaatattaaggatatcccaggaatyctcagtttagagcaacagtctccatggtgacttacctgcacccrcaccctaggggggtaattggtgattcactgaggtgtgggaagaagatactttctgattattctttgctccgattttagtttctattttgtgtatattttctaaagttagtatgtaagtactgtactgcatttccacaacttatatctaataaaccatcatgtattgggggtgcctaatttcccccccttgcttgatgtgttcaaacaaaacatgtggagatagctgttctggaattctcttatggaatatcatttccatggggtcaggttatctccagcagcaaaatgctcaggtttaaattttctttttttttttttttttgagacagagtctcactctgtcgcccaggctggagctcaatggcgtgatctcagctcattgcaagctctgcctccgggttgacgccattgtcctgcctcagcctcccaagtagctgggactacaggtgcccaccaccacatccagctaattttttgtgttttttagtagagacggggtttcaccacattagccaggattatcttgatctcctgacctcgtgatctgcccgactcggcctcccaaagtgctgggattacggygctcgccaccacacccagctatatatatatatwttttttgtatttttagtagagacggggtttcatcgtgttagccagatggtctcgatcttctgacctcgtgatccacctgcctcggcctcccaaagtgctgggattacaggcatgagccaccacgcccrgcctggtttaaattttcaattccttttttttttttttctttttgagacagtctctctctctctgtcrcccagactggagtgcagtggtgcaatcttggctcactgcrgcctctgcctcctgggttcaagtgattctcctgcctcagcctcttgagtagctgggattgcaggtatgtgccaccacgccaggataatttttgtatttttagtgagatgaggtttcaccatgttggccaggctggtctcaaactcctgacctaaagtgatccacctaccttgaactcccaaagtgctaggattacaggcatgagccaccatgcccagccaagacaatgacagttttccccaggggaagagtgggccaaactctggactttcttctctgaatttccatcttctctcagtttttggcctcatgattcttttatttcyttgctwggtctcttattacttttaatatttacccaacctttctgrtcatccatagtgagtctgtagttcaaatacctagtccactaaccttgccttttaaaacaatccctggctggccacagcggctcacgcctgtcatctcagaactttgggaggccaaagtggacagattgcttgagtccaggagttcaagaccagccggggcagtatagtgagaccctgggattacagacgtgagccactgtgcctggcctttttaaaaatttttaatagagatggggtctggctttgttgcccaggctggtctcaaactcctggagtcaagcgatcctcccatctcagcctccyaaaatactgggattacaggtgtgagccactgcgctgagcaattcctttaaacttatatttgttctaccctctartctgaagttctttgtccttaacagaaatggataaagagaggagaagtggagaggttctctcttctccctgtcttctgtcactgtggcccctcyggccccacgcrggatctccagcctccttcctctcacactgawtttaacatcaacacaagcacrcccctccaggaagtccttagcactgcttctctgaccacaactcttctaggctttcaccttcctggccctctcactaagatggtgtctgacttataagtattcaagatttgagaaaatcccaggtctcctccctacrgaaatgtcactcatccttttttctctccctttgtgatttgctcayatttactacccacttagaytttattttccagatggagaatattttctttttattaatagtacagctgtattaattattagacaatcrcatatatacatcttccttataaaagttcttaaattactgataaagataaggatccctttgactattacccacaacccccaaactctaccaaaagtgactacaattatgaatttttaatgtgtatctccagttttttcttccccrtttatgtatattttttctttgcgtccatcaatagacaacgactgaawaaatcggatattttcatttaataggttgcaataaaatagttagagatttatctcattaattttttgttctggtatggaaccatctccaagatatattattgagtacatttaacaagttgctaaaaatangcagggtatgataccactaaagtttaaaaagataaaaagaaaccttattaaaaatattttaagcttttcctttaccttaatctcatgctctttttgatcagttgaagtgcatttctctgtatctcattggcactgtgatttttgtttggggatcaggagcactgatntgagcatggtccctggtatctctctagaccccccacatacttttatcctttttttgggggggtgggtaggggagtgcagtggcatgatttcggctcactgcaacctccgcctcctgagttcaagcaattcgcctgcctcagcctcctgagtagctgggattacagatgtgtgccaccacgcctggctaatttttatatttttagtagagatggggtttcattatgttggccaggctcgtctcgaacttccaacatcaagtgatccacccaccttggcctcccaaagtgtgtgagccaccatgcctgcaccaycccctctttaaaaaaaatatttatttaagaaacaacaaagacaaagagggggcataaaagtggggaaataagaaggaaacagaaaaatgcaaacactgatggaaaaagcaaagtcattaaattagaaaagggaaagtggggaaaggaaggggagagctgctgcagaaagcttcttcttggctggtttaggtctggtcattgtgatgtctttagagacaggttgcttgtttctaaacattgttgtttaaacttttagtcctatttaccaagccctttgctcaataaacatcttcatctcctcactgctctcctgagctttatgtatttcttcattccaggtcagacttgcgtgcctcactttgctcccygacacctacacatacacacacactcacaygcacacacacacacacactttgctgcagacatcatagaaataaacacttgggcttctggcttggggagtaaggatgacaaaatgcagcaygtrgagggcytcaggttgctggcaatgctgattctcagtaggccattgtgcattgaggagattaagcattgtttttatctgtctgtttatctattgatctatttatttgttatttttagtaggcacctttggttctggagaaccaatgtgactgacagtgtcgggggccagaggaataaaagcagaaagcagacatgtttcttaggctaaagggagaggttaaatggcaccttcggctgctttgtagattatctggcccatttgcccgtgttggacgcagacgagacctcaggctaagatgatctattcaaaaacaaaaactgtggccttaaccagggttatctttttttttttttttttttaaccagggttatcttgatgatgtttttctgagggcctaattatagtggcaggtgaaggggaaacccttgactgtaggagaggaaaccaaggtatgtcactgccaatacctgccaggcactttggtagcagacaggacctgttgccctcatggactttgtttatgaagaggggctgtgggaacatgaagaggaaggcaggggtctccaaccttccagcctctgttcctctgcaggtccctcctcgtttcttcccatatgccattaactgcaattctgaatctgaataaataggtgctatcccatcatgatatttattttgtaatacttgctctgcggttatctacatcaggacattttgtggctctgcagcatttattgggcactatattaagctggtataaactcagacaaaatgccaggcgaatgataaactagtgacatttctgagtttctctgtagaaaatgtctacaaaggctgcatttggctgattgtatttcagaaggctgatgttgygctgctatgtcactggtatactatttcagagtgtgatttgtttttattcatattcttgtctttagtgatctttaggttttatttcaaaatagctcytaaatgtgaaaacctacttaagatactggaagtatagatgtaggaggctgcaatgggctttgtcttgttttcatcaacaaagctcatctagatgacctgtgcaacttcgcctcatactccctcaatagcgaggaccacacatagaccaggactgaagtcttttcacctgcttataaatgtataygcttacctttctttagcaccatctcatggcttttaggatcaaatacaaaacctgagcattacacaaaaggtgctttttgattgggcccctggtgtcttttcagttctcttttgctaatctactttggaaacactggatccatcctattgacttacaatagatacatatatgggtcatcctttctttgagctagggccccagtacctgctatttgtctgtaaatggaatgctcttcactccttctgtccattgatcctattgctgcatrtacttgaagatttgattcatttactccaaagggttcctggaccttgcttttcctccaggtttccatctgcaggtgaaaggtcattcctcctgtgtcttcaaatagcaccttgaatgttagaaccctttcttcattgggttactgcctcttctgtagttctaaagctcttaagtgcagtaattatgtagccckcattcttawttcatagtaggggtttggaatgtttcactgactaaataaatgaataaataattgaattgtatttattcatataattgatctctgagccattgactcattttttgtctattgacttatgacaatcaataattttgatagatcatttctgttagcaaggcatccatgatatgtcaagaattttttttttttttttttgagatggagtctcgctcttgtcgcccagcctggagtgcactggcttgatctcggctcactgcaacctccacctcccgggttcaagcgattttcctgcctcagcctcctgagtagctgggattacagcygcctgccaccatgcccggctaatttttgtayttttagtagagayggggttttgccatgttggccagtctggtctcaaactcctgacctcaggtgatcctcggattataggtrtgagccaccacgcctggtcaagagttttttaataccagcatacattttaatttcttaggtattaatattcccccacccatttcttgaaataaaaagggggaaaaagagaagaaataaattaactgtatttcctgagccctagctctgtgccaggagtcttctaggtacttaaagatgtayattataggaaaaatatagaaaaaattatgttaacttattttaaagactaaaaaagtgayggcacagagatgttaactaacttaacaaaagttacatatacagataaattaatacatgctgatatggctggtttgtgtacttctcttttctcaaaagccattcagttaatgctttttgmtaatctmtctgtggcatgcaggtgcctggcacagaggtacagaaaggtttgagtctgtctgtcaataaaggagattgacaaatgagtcaccaattataacatggcctaattttttctgtgcaaaagtatgttcatcattctgaaagtctcagaaaggataaccaacttggcttaagtggcacccccactgagaagcctgttttcaacttcagtcatctgcagctgagccacagcaataagagttatgaaggcagaagaaggatgagaggagatcccaggcagacaccaggatgtacacagaaagactccctttcccttccataaaattcacttcaagaagggagttcattttcctrgttcaacataaaggcagtgtaaaggtacacaagatacatctacctattgcctttttttaaataattaaaatatcctagacaaaatttttatcatatatttacagagaggttctgagtcccagaaagaataacatgctgtattggatgttagtaaatattgactggtgcaaaaatgttgtatatgtatttactgagaaaacttgcttctctgtacttaggcaagcagagagagttcagtgataaaagacagaacacttgcctttgggagtccggtgtattaagagagtcatttatgcagacatgtagcaaatcattatgaactatgacagtgatatgtgtcggataatctagaggcataaaacaaaggtgcccaatcccttatacttaataccagaagtcagatttaccaacgtctttggatagagatgcttgaatatcagtctcaagatctcattctgcaagtaagaccatgaagagttcattttgtattaaattctatgttgatgctgtttttctttgatgattataatgatgatgacagtgatgtttaatgatgaggatgaggatgaaacacatagttggtcttaaaacacacagaatgctacctaactctgtagctccagctaaaatttagcagcatatataggctagagtaatgatatcatttgggtcaactgcaatgatatgcttttctaaggtatctggtcaatgacaggaccgttaaaatcagcacttatacagacattcagcattgattggcctcagcaattaagaactcactaggccataaagtaaaarcagcaataattctttatcatctgtaactgctagagatactcttggaccacaggtctaggggtgaggcatcatcaaataaaaatyattggaaacactgtggtttgactttcatatgtaaagctttgttttgtagttgtaattgttttactatagatgagaaaacatttaggcagaataaggaggtttgttagccacagtagatttggggagaacagagaactctgttttgctcttgcctcttttttttctttttcttttcttttcttttcttttcttttcttttttttgaaatggagtatcactttgtygcccatgctagagtacagcagtgtgatcttggctcactgcaacctccacctcccaggttcaagggattttcctgactcagcctcccgawacaggyacacaccaccacacccagctaatttctgtagttttagtagatacggggtttcaccatgttggccaggatggtctcaatctcttgacctcattatccgcctrccttagcctcccacagtgctgggattacaggcgtgagccactgcacctggccttgcctgttttttgtttgttgataaggcagtgggagatgtcactggaaacaacagctttgccattaaagataatacaagatttttaaaaactactgntattatttatttgagactatacgcacatggaaagctacactgaatccagcgtaattattttgcctcccgttgacactagccgtaagccaagtagataggcttgcatgctagttttaaccttgtgtttctggggtactgcntttctcctgggaataagtggtggtagtcatttcaaggatgaaacttaaggcaaggtggacagttgaacaacatgtaactgcccattttgaaataaaacagttaactgctgagctttctggattgaggcttgtcaagcagctcattttcttttttaatgctcatgacttgcagtcttgtcagaaaaggtcacctgcggatccagttaatgcttcagtgtgaggagagtcaccacccaaagcctagtagtygctgcagtacktaactgaaattctgatgaaagggtcactttctgcctggattcaagcagattccagtgattaaaatgtgcaaatgcatgtcccatgtctatatgagggaaattatgagacccttattaggaaatatctgcttcctaggggaagaacaaagtaggatttaatgtttcaagcataggctctgaattgcaggccatgtatcaatcagagaaaacttaytgacagcrataacagggctttaaggagacttcttttctccagatgaagagtgattaagccagctagccactcagcttctttgagttggaaaaatgagtttaagtaagtagagttctgggaataaccctagaacaatgattaatgtacttacttcagaaaacccgcagacctttatagccccttcgctttctttctctttacctccttcctcttgtcctccctgcctttcctcctaacttctttccttttctttagtctttccttcattccttccttctttcatttcacatttgactstctgttatataccaggaactatatctatgaatataaagtgtgtaaagagaagaccttccagtagctttattgggtatctctgtgtgtgtatcttttgtatttgtgtgttgtgtgtgtgtctgttgggggaagaggatgccttcatattggaaaaacacaaaaataattctttataacaaactctgataaggaycttacaggatttataacaaacacttgctgatmggaggaaaagsctttccctgtcgtaaatgagacatatttaacagaggaagtgacttttcacttgtgtcttaaactatgattcaggggttaggtgaagctggagaagagcatctcaacctgaaggcagaagcttagagactcacagaggggcgaggaaatgagtgtggcactttcagacaatggcaacatctttcagtgtggcaggagatgaggcagcaaaagtgagatggacccagtctgtgcagggtcgtggataccgcactaggctctggagagataagtactttttttttttttttttttttttttytttgagacggagtctcactccgtcacccaggctggagtgcagtggtgcgatctcggctcactgcaagctctacctcccrggttcatgcctctggagcagctggggctacaggcaccccaccaccacgcccggctaattttttgtwtttttagtagagatggggtttcaccgtgttagccaggatggtctcaatctcctgaccttgtgatccgcccacctcagcctcccaaagtgctgggattacaggcgtgagccaccacgcccggcccagggataagtagttttaacatctgcattttctagccttgattgagtggctgggctgagtggctgggggcaggcagagggaccagtttggaggcatttcgctgttttctgtgtagaaatggaataaattaaagttctgcaaagcctgattttttcaaaaagtgcagatgttcccaagtttaattaatctcattgtataaaaatcctagagataaagcgtgattgcccatattatttatgttccagaataataattattttctatttaatatagcttactgcaggattacacaaaataatatgtgtctccaaggcattttaaataggcttttattttgcttacacatatggtttcaggcacgtatcagaaagtgaggtgcatctatttctcttcacacgggttcgacaatacagagaatcatcactctgctgtaactgctgctgtattggttgagtcacagggtttgttcatagggcagtcgtaggtggtttggcaaatttcagtgaaaaaattaattagatcagtgtgctatgggaatcgctgatcaagtcacccagctgaagcagcatgcctgcctaataagttttgaaagtttaatacactgtcactggggttgttgcaagagtacacrcccaacatgcgtaggacctgtatgcaagtcccagctaataacatgcaacatccttgctagaatgcagcctgcctttcatcaartgtagttttcattatcatttttattttaagtggaaattttactgtcaggctgtataaatacatagagtagatatattctaaggattgtgggtttagatgcctgtggatattaatagtctgggggctctgccgagttccactaaggcacatgtgaagtsattaatatggatgtttcttttcatgtttctccattttttaggtctgtgatggggtcaaataaagaaccagaccttgtgcatcttgaggccagaactgtggatsgtcgtaagtaaatcaactttgcckcaatactcatagtaatattagttctatgactctgtcatgaactgagtctgtgtaataatctcatggtgtatgcagagtaatagtggatgtgtggtttctgaggatttggggttgcaggggtgacctgcttcttttgactctaagctagtaaagtgcaggtatcttctgttcggaagagctaaggataggtaggcaggcacagtggcacagtggcaataatngtgtgatttaggcatgaagacatttcctgtcttcagtaatacaaaatagtcttaataatttttcataaatatatattttcacatatatttgtaaatataaatatataggttatccagaaatatgcatattttgatagtggtgataccagcacagccctctcatccaatcaaagtgtctttccaggtaaagagaatacttccaaactcttgattcctaaagtgtttcattgttgttgctgctgctactcttttgtgttgaattgtttcttcagtctccttattttgtcagataccatccaggccatgcctcactgtcttgtttggagattcacaaaacacttggaaagaattaaaaaaaaaaaagagagagagagaatttttctgtgtgtccccatgagaggcagcaggaggagagtcagttgagtgaattgctcacctgtcagtagttcttatcaactccgggtggttatgctgcagtgaaggacaggactacactttgtagcctcatgacaatgttgtaggttgtttttctcatttcacatatgaagaagcaaaggcatagaaagcttaagtaataatatagctaagctaatatggtaaataagtagaggacagtgatgtctatctcacagagcctattcaggtgagaattcaagaaacccatgcatatacaatacttcacacagtgcctgacctactaacaccagcaatgaatgtttccttccccttctctggtacagaggatcctcagaagggctaagcatttgcaggggtaccgctaggcctaggatagagcactccaggtgagggggtaaaagaaaatgagaaaagggggaaactgtatatagaagagggtgaggggaraaaagacagggagaaaggaagaggtctcagatgtagaggagaggaagagaatggactatccacaattaccacagagcaatgaggctgttgtaggctacccagcgctggcccagagagtgaccatctcatttccaagaccttyccagtttctaaaatatccctcacaattcaaaagcaccctaatcactgccgtttgtgcctaccagtccttggctcttctgaacacaaaggcagaaggtcctgcactttaccagcttacagccaaacaaagcaggwcanccctataacccaaactccccagaaaccacacatttttcattactatgcatgtaccatgagatttctcatctctaaaggtttgtttcccttttgggggagtgaatatattttttgacagagtcagttggggcacaggttagggatcaaggctgaccatcatcctctgtaacccaggcaaagctgccacatgtaacatgcccagcactgtgcctgacacagaatgagctcaacaggtcagagcagctttcccacctcctcagggggctcgctctggtggtgacgtctccatttccctggagcagatgatgttatcttggattccaaggtccagttcttgctacataacagagatcaatattttcttaatgcaaaagtaaacacatcattgtttaaaagtcttgcttactggagatagagaccatcctggccaacatggtgagaccccatctctactaaaaatacaaaaattagctgagtgtggtggtgcgtgcctgttgtcccagcgacttgggaggtggaggcaggataatcacttgaacccaggaggcggaggttgcagtgagctgagatcgcaccactgctctccagcctggcgacagagccagactccgtctcaaaaaaaaaaaagtcttgcttacttcccattgctttgatgataaagagctaaattctcatcttgacctatagctccagcataacttgtgtctgcccattccctcagcctaatcttagtctgccctctcctcactcgttgcctgcaggcctttaggcgggttttcaattcttggaacatacaggggtatgtgtcttgccataaagccttggtacatgctgttttctctatctggaatacccttctttcttgcccataccctgaccaatcgagcataattgattactgtggatggttgagacctcaggttaatcgcctatttcttagaaaagcctctcgtaaactctcagtctaaatgagtttcttattttgattgcttttatacaactattttttttctttatcatgttcttctctgtttgaaattatactttctttttacgtgtttattcgatcacaaccgtttctcgccaccagtctgtaagttttatgagagcagggaccatgtatatcatattcagtattgtgtctccagagccaggaatggtagcacacatctgtagtcccagctagtcagaaggctgaggcagggggatcatttgagcccaggagttcaagactgtagtgcactrtgaacacaactgtgaatagcaactttactccagcctgggcaatatagtgagatcccatgtcaaaacaaaaacattatgtctccagcacatgccatggcatctacatgtagagagatctcactaagcatatgttgaatgatggcatacccggctgaccagttgtcagggctaccagtggctatctcacctcacttaccaggttgtctgaaaatgctagagcctcacatcttaaaccttagcatgtatgctacccacctagggaccttgttaagatctgcattgtaattcagtaggggcctgagagtctgcatttcttttttctttttttttttttttgagacagagtctysctctgtcacgcaggctggagtgcagtggcactatctcggctcactgcaagctccgcctcccaggttcaggccattctcctgcctcagcctcctgagtagctgggactacaggcacccrctaccacgcccggctaattttttgtatttttagtagagacggggtttcaccgtgttagccaggatggtctcgatctcctcacctcgtgatccgcccgtctcggcctcccaaagtgctgggattataggcgtgagccaccgcacccggccgagagtctgcatttctaacaagctcctagatgatatccatgctgcgggtctgtgaaacatgctttgagtagcaaagttccacaacagaaaattagtgaaagagcttgagggtctgtttcccatgattgcacccctagtttaggaagctctggatggaattggtagcatcccgggttgctttcattttcaagcttttgggcatatgctgctgttttctggcttgtggcatccaatgcacatgacgctttatcctaaaaacaatgaggccatcactctctgtgatctgcacattttcttacacccagcattattcctgtgctccctgaaggcatggcggttgataatgccaaactgtcatctcaggcttagctttcacaaagcatgaaatgtatcagttctaattttatttattttactttttttttttttttttttttttttttttgcgaaggcagcatcttcagaaactatccaagggtgaaaattcaataaaaggatttaatttgaaaagttagccctgtcgaaacaaaacaggaaaaaaaaaatctaccaattgttttaaagggtccaagcataacacctgacctgtcacagtgtaaaaaaaaaaaaaaaaaaaaaagagagggaaagagattgtctcaataaccaaggctccagttaaaacaacaacaacaacaacaaaataaacagagaggaggaggttggaagtaaatagcacagagaggtcagggtagcaaggtgtcagcaaatgtagtgggcaaagtttgacagtgtatttatcaaaatcaggttacagtctcatcagctgcactacgaatttcatatctctgtgttatctctttctcatttcctatttttttttttttttcctgagacagagtctcactctgtcacccagtctggagtgcactggcaccatctcggctcactgcaacctctgccccctgggttcaagccatcctcctgcctcagcctcccaaggagctgggactccaggcgtgcaccaccacaccaggctaatttttgtatttttggtagagatggggttttgccgtgttggctaggctgctctcgaactcctgacctcaagtgatccgcctgcctctgcctctcaaagtactgggattacaagcgtgagccaccatggctggcctctttctcatttcctaattgagatcctctgtttttttctccatccattcattactgttattatttatttatttatttatttatttatttatttatttatttttgtgtatgtgatggagttttgctcttgttgcctaggctggagtgtaatggcgcgatctcagctcactgcaacctccgcctcctgggttcaagtgattctcctgcctcagcctcctgagtagctgggattataggtgcccgccaccacacccagctggttttttgcatttttagcagagatggggtttcactatgttggccgagctggtatggaactcctgatctcaggtgatccacctgcctcggcctttcaaagtgctgtgattacagacatgagccactgcgcccgaccccattcattattgtttatgtatatggaacccatggtttttattctaggttgtacatcctgtagagtatatgccaaatatactttacaataatataatgtttttattttgttttgttttgttttgttttgagatgaagtctctctctgttgcccagcccggagtgcagtggtgcactctcagctcactgcaacctctgcctcctggattcaagggattctcctgcctcagcctccccagtagctaggattacaggcacctaccaccacacctggctgatttttgtatttttagtagagatgaggttttgccatgttggtcagactgatctcaaactcctgacctcaagtgatccacccacgctggcctcctaaagggctgagattacaggcatgagccaccacacctggccatcatgtttttgactttgaaccagaaattattttctgattttagtgtgttcacatattttgtagtcaagatactgagacatttgacacaggaaaaatcccycacttgccagtttggctcttccccatggagtgtgttgtgaattcttatctgggtttgttattcaaaatttagttttggtctatttcagatgtccctagattacatgttatacttaatttctgtttccattgaagttcccatatttsaggggaggtgagctctggaaagctttagttttttacatgagaaaaaagaattatatctttatttttatttttttatttttattttattttattttgtttttttttcttgagatggagtctcactctgtctcctaggctggagtgcaatggtgcaatctcagtttactgcaacctccacctcctgggttcaagcgattcgcctcagcctcctgagtagctgggattacaggtgcacaccaccacgcccagctaattttggtatttttagtagagatggggtttcaccatgttggtcagactggtcttgaacccctgaccttgagatccgcccgcctcggcctcccaaagtgctgggattacaggcgtgagccaccatgcccggccttatatctttatttttataaaccttataacttacaagattactttcaattgtaagggttggaaattaactcgagtagtattagcaatataagcgactttgttgcaatagaaatcacagaaatttttatatcataatacagtcattacatctgaaaatattatttatgctcattctttcctcaaaattgtagtagttatcagacctgccagtagatcttgatatataatatattaatttaaaaagtacatacaagggtattaaatatttgttttttaatcttttaataactttatttaaatttaattgaattagttttttttggtctattctgggtaatttattttatgcattaaaaacattctgaaaaaatgggtccacaggctttctcagattgctgatggggtccatggcacagattctgaacctttgctcccaaagcaacaagtgtctgcataggaatgtgtggttatttatataaactagtactttatcttagatcctttagaaagcttttgttctgtgagagtctatggttggcactgatgtttcttaccaactatcctctaatatgtagatatcttgtagtttacatctgtgacaaggatgttattctttattgtattactttctgccttgggaggtgagctgaaaagagcaggctcaactacaatcaatcacgggaggtattactggaaatttttgaacatatttattggatgtggcatttattattggcccctgagttcaaagaagacaaattgacaggtcctcatccatgaagcagatcttttattgtttaaatattctgtgtgtgtgtgtgtgtgtgtgtgtgtgcatcgtaggagcccagtacattaaaatactaaaaaggaaacctacattctattgatttacctaacataggtgcatttgtgtatgtgtgtgtgtaatgcatatagttaaagagaaaacgttgaccaaactgttggattgaaagctgtgtgaaaagttgtatcttatttaatctccgttctatgtccaaaagataacttagagcccaaaacattcttttttattttattttacgtttttagtagagataaggtctcaccatgttgcccaggctggtcttaaactcctgggctcaagcgatcctcctgccttgaccaagtgctgggataggcatgagccaccacacccagatgaaacatttaatatttgttgaataaatatattaatgtgtcactgtttaggtatatctactgaaagaaggatctttaaccactgggtctgtggagtcctggagcactaacagatgaatgcaagagacttactacctccctgaaactgggtgccacattttatgcatatttgattttggaggaaaataacataacttttatcagaatttttcacatggcaattacacatggatatatagttgtatattatggtcatctgtaagagaacctgcagtaccacctttggccattattgcttctcccttttacttctgaaataaaaggcccaacccgcaacctgaatgtttctgtactggtggtgatctgtgccagcaggaacaggggacaggggacaattactggtcccagtgtttattttcatgaataagtaacctcataacaagtttcccaaggactaatctcattcaccggggaacaacaaaccttggccctttaaccaactgtgaaaatgactgcctgagaactctgtgaaatgaacctcaaactagcattttaacaagcagaaataaaagaaactcacaactttatataactatgcatcccactaattctggtcttgggtaagaactggaaatctcattttctacttcctatccaccagctttccaacctagtttccgtattgaacagtaagtatgtcaaaatctggataaggtaarcgctgctgaaatgctttggggaggtaatagagatctcagttctcaaagtcttcaatatctcagctacagagtgtgtttactatgaatatagattacttttataccaacaaaaatagcaatgataacaataaaaaggtatatatatatataaactcttatctttttattgttatatatatatgtgtgtgtgtgtgtgtgtrtgtgtgtgtgtgtgtgtrtttatatatttgctatatttctccagaaattgtttaggcttatacagatgagtatgtatatgtatagacacgtatacttacacgcatgttcttgttgaaaaattgttgtggcaaatttagtgtttgtgmatacaaatataagttaaaaatcttttcatatcagcacatataaatttagcaacttcatggttaattgatacatagaactccattataaagtcaactatatttagtaattactaaattatagagacctttgtagatatacagacctctggttatttcaaacaatgcgaatatatacacatacacacatattatttatttggttagtccgcattcaagctcgcgtaagcagcaaacactacggaaagagaatttatgaaggaaaattcctgggtcagagattatatacatttcaaatttttgtaaacattgtcagattgccttctgaaatatttgcaacaataaatagtctatcagtatcataatgcctgtgtttgcaagccctcagcaatcttggacattatcaaagacttttcaaatataacccatctgagagcaaattttaaaaaggcatatccttattgttttaatctgtatttatttaattaggagtgaggttgagaatttttatttgtttttcgtcactacctttatttcttcttgahtaaaaaatcaaatcttttgaatagaaaagatgaaacctttggcattgatacacacatttaaaaatatcagattgctacccccactttggccaaagttccaacactagcacaacagttgccattattagaccccgcatttcatagtcttcctttatcttttttttagtcaatttattaataacttccaaggtagaccttggaagaggttagacgtttccatttctggtcagcttcagattctaacagatccttaccacttcctgacatgctgagaaaatgcacattctcacctctcttctatccccaaataaagcatcaaggtttagctagtatagccagaatctagtactatgctttttttttttctagcagtgttattctgaccccatatttcgtattgcaaaaggctcttgatttcaatgactagtgatatccacttgacctctctgatttagtagcctgaagacagccctaacaaccacccagaaaagcatgaaataagataacacgggcctcctagcacagcattgaaaagcctgatagtgacagtwcaacaacaggctcagctgggcagctttcaaattgggttctttgtagccattatatgccacttcctctgcttcccaggtgcccacccacctgcatgaagctctgtgcccttatcttccatgctgaggctgagagaacaaaggtgcacagaaaacttttcactcacaggccttaactttaggacaaagatctaggctttgggtccttggtatccctcagaatacaatagcagcactccatataacatgcaggtgtggtaatccccaagtgaaaaatttctaatgtttctggctccggcttaaaaaaaaagtagcatcgtacttaaaaaaaaagtagcatcggcatttactcacatattttcttcctttgtcctctaaattctcaagtgacartgatgctaggatcatgcattatattcctattatttatctggtgtgagcacactagatacttttcagctgccttacttataacaatccttggaggtagacactattcttattttcctcattttaatgatggggaagtggggcttacaaagattaagtgttttttccattgtttcagagttaggatttaaagccaggtctgtttcactctggacctattattcattcattcaaaaaatattgttggacatctacgccacatcagatgctcttctaggcatgaatgagggatgattaggaattgatgcaaaggctctgctctcataaagtttaccttctagttaggggagatgttataaaaaatgcatgaagtatttgtatgagaagtggagctacaaatgtgtgagaaaaacagagtagggagaatagagagtgatcagagaaagagggccatcaaggaagaaatctcggataaggtggcatttggtatttaagccaagtctgtatggaaatatgggagagacttgtgtgtctgcctggtggaagagcattccagacaaatggaagagtacatgcaaaggatatggatatgaggatgcttagcatggctgargcataacagaaggccaggtggctggaatagagagaggggcgggcaaacgtgtcatctgtctttattccattatctgagacaaggactgtgccatactgttctttgttgagcatctcttatgtttcaggtatgatagctggtatggagggtgataaaaataatcaagaagttattcattgaggccgggcgcagtggctcatgcctgtaaygccagcactttggaaggccgaggcaggtggatcacaacatcaagagatcgagaccatcctggccaacatggtgaaaccccgtctctactaaaaatacaaaaagtagctgggcactgtgttacttgtctatagtcccagctacttgggaggctgaggcaggagaatygcttgaacctgggagacggaggttgcagtgagccaagatggtgccactgcattccagcctggcgacagagcgagactccatcaaaaaaaaaaaaaagaaagaaagaaactgttcattgaatatatccacatgtcttagaggcagkgtctctctgttctgaaattaatcttatagcgtgtagacacatctaagtaaatgtgcacaccttctcccctcactcccccttccaaaaataaaaataaaacacctggagaagaaactggaaactgtatgctttctccttcatgagctaaatggtttcatttcttcctccccactttccacttttcattcttgcttgctttcttcttttcttcctactttttatccttctctctctgtctctgtcgctctttaactccttcccctactccctactgtctttgtaaacttaatttggacatgagaggtgaagctgggtgggcttctggattgggtggggacttggagaacttttgtgtctagctaaaggtttgtaaacgcactaatcagtgctttgtgtctagctaaaggtttgtaaacgcaccaatcagcactctgtaaaaacgcacccatcagcggtctgtgtctagctaaaggtttgtaaaygcaccaatcagcactctgtaaaaacgcacccatcagcggtctgtgtctagctaaaggtttgtaaatccaccaatcagcactctgtaaaaacacaccagtcagcactctgtgtctagccaaaggtttgtaartgcaccaatcagcactctgtaaaaacggaccaatcagcactctgtaaaatggaccaatcagcaggacgtgggcagggccaaataagggaataaaagctggccaccccagccagcagtggcaacccactcgggttcccttccatgctgtggcagctttgttcttttgctctttgcaataaatcttgctgctgctcactctttgggtctgcattacctttatgagctgtaacagcgcgaaggtttgcggcttcactcctgaagtcagaaagaccacgaacccaccagaaggaagaaactctggacacatctgaacatctgaaggaataaactccgggcacaccatctttaagaactgtaacactcaccgtgagggtctgcagcttcattcatgaagtcagcaagaccaagaacccaccagaaggaaccaattgcggacacagaaagttatgtgatgtgcttctcagttctccatgattgagtgtgactttgtatatgattttctgtctttacccaactaaactaggttctagtgtgggtttccagtaggactttctcgcaaaacacacagccagtgttccccaaacacatctcacattctctcttgcctctctgctcctgcccagtgctccttctttctggaataatgagttatccttgtcatcattccaggcagccttctaggctttccctcagcttttccatcatgtccccatccctgacgaaagtaattcactctataacatagtctgaatagtaaaatagtctctagcctaaagaggactaaataggccatgaaagaataacaagtccacagctctgtgtgatacaaagtgaaataaattcagagtcacaggaaaagtttctagcacagagtaaaacatctgtgcagaggtatgaggattaaatatttcacyggcaagcccatagcacttccattcatcctagratgcgctcaccatgctgcattgtaattggacagtgaactttctgtatttatattattagattggtgcaaaggtaattgyggtttttggcaattactgcagttactttttgcaccaacctaatagtgtgcttttgttttctctctcatgttcccagtttttagtttcatgcttggctaaattttatgatcccagaattttccctgtagtagtcatggyctcctgaatgcctgaaggccaacaataaaatacaatatttagtcaattacactggtcccaaatcaagaaatttcacagaagaaagcaatgctaaatcacactcatcatgccaagctagaacatttgatgtaagtctataattttcacagaagtatcttgtcctctgtgtagactttctggaaccaagactagaatctcacttttgacattctcaatttctagctggtacatgtgacagagggcactagaatcctgataggaattaagtgtatatgaacagcagcgtgttgacacgtgtgtgcgtgcgtgatgagtgagaacatttaatacagaagtttcaaaataagtaatagagcagtagaacaaaaggaaaagttatatgcgcttgtatgggctttaaaatctgttctgcttttaaacagattgcttaaattgctgatttaaattgtttccaagtggaaacaatgaggaataggtgagtttcaaagtgcttatgcttgcctgcatcgtttctagctttgtttataattaaacgtctacaatattagggaaaattaaagtatttggtgctaaataaacacttgttgaatgatagaatggatggatagagtcccagagacctgtaatatatttttttgctgtgttggtcaggctggtcgcaaactcctgacctcaagtgatccacccgcctcggcatcccaaagtttggggattacaagtgtgaatcacygagcccggcctggattttaagcaaaatttaagagagaaaaaaacatgtgatccacttagcacagttcctgacctcgaggaaaggttgctctggttattttggaggttagtgctgctgctgctgttatcaatgaagacattctggggatggaaaggtttgtctaagccccaggaaaaagttcacagaagaaggtccaggaagtatttggactgagtaacaggaaaggaaaaggctgttcaagccagcagaactctgaatgaacatagggaatcagccaggagttaagcatgctgtttagaaatagcagaagccctcaagacacagacttgccagcaacatcacagagctttgttttgttttggcagcagtgggaaggaaacaggtttcagtggataatttatggtaaagatttgttggatcttaaagtcatagtctgatttttaacatccgttttgtttctaagcttctaataactctcattatgtaaagaaatagtctaaaactgagcttggttgatgaccttctcagagtcacacgccatgctggagatggaactaggacctagaagatmgctccaacaggaagacggaacacctgccacacctgctgattggccctgtgtgttgggtgcagagatgacttccacattctccttgtagccctacttatttggcagtgctgtctgctgcctatgcagaagatctgtatttgtattaattattatataaggagaatattttttcatggtgtttttaaaaacgtacttaaaaaatctttaacccaaacaaaaattgaatataaaaagaaagaagtggccgggtgtggtggctcactcctgtaatcacagcactttgggaggctgaggcagacgaatcacgaggtcaggagttcgagaccagcctgaccracatggtgaaaccctgtctctactaaaaatacaaaaattagccaggcgtggtggcatgcgcctgtggtcccagctactcgggaggctggggcaggagarttgtttgaactcgggaggttgcagtgacctgagatcgctgccactgtactccagcctgggtgacagagtgagactctgtcctcaaaaaaaagaaaaagaaagaagctgcctcaggtagaaatatccttagcactttacaggtggttagcttgagacacagtgagcagtattsktgattacagagagaggacttaaataccaactacagctatcattatgtgagtacagtctaatctggcgctagactcaacacatttcaagactaaggtcatcaaatgtcataacttctggctagatggatattgtttgttcccattttctagatcagcgtttggagacgtggagtgatttactaagctagcaggccttgagcctgcatttaaacctctgatcctctgttcaaagcctacctttttaaaagcagcttcccttctctagaacagcacaggttttgggtggatggggattgcattattctaagcagcagctgttgcagagagtgaagatgcttgaaaagaacagcacagtgtcctaattacctatggcaaggaaaacatctgtgtaggaaaagtaatgaaattaattctaatgtctagcagttgcatgcattaattgacattaattaatgccaaattacaagatacttcctatggaatcacatcatacactcaccagaattgaatatggaaagagttcatcatacttaatactattacagcaagccccaagggggatgagtgcttggtcccttattatgaagtgcagccagtttctttctgttttccattaggaggagaaagggaacaaaccaggaacactttaccacgggcagactgttcaagatggttcatttccccttcagcttgcaaatttcactttgagccactcagagcaagaagtggtttgaagacctcttccggggcttttcttgtgtccctattttaaacttggtaattctcagaccaaagataggcttattgcacagctcaacagcaatatgaggcatgggaagtagagaaagaacaagcagagagattagagacagttgatctcacaagtccatcttgactccccgctcccctacttgcccggctgtagaagggctggactagggatttgttgtaaagattgccaactctttcacattagtggctctccgctgttgttgacatctcatatatatcttttatttatttttcctgtgcaaacatacatttatagatatatatacgacttgcaaaaaaactcaggtccataatgcacgtattttggtaacctactttttaaaaacttttattttggaataattttagatacacagaaaagtcacccaagatagtacagaatacatgtactttatacccagcttcctctaatgttaacattttatgtaaccatggtatatttttcaaaactaggaaattaacattggaataatattactaattggtaacctacttctataatataaaatatattaagcatttcctcataaaagcaagattttaatagcaaactctaaatgttccatagtttattaagttctttttctattgttggccattatgttttctccaaaattttttattataaataacactgataaatatctttgttgttgaatctttgcattgatccttgatttttttccttagatagaattctcagaaataaaccctaggtcaaagggtatcttttttttttttttttttttttttttttgaggcagagtttcactgttgttgccaggctggagtgcagtgccgtgatcccagcttactgcaatctccacctcctgagttaaagtgattctgctgtctcagactcccagccaagtagctgggattacaggcacgtgccaccatgcctggctaattattgtgtttttagtagagatggagtttcactatgttggtcaggctggtcctgcatttttaagtatcttgattcatattgccaaattaccacacaaaaatattaaggtgttcttattttgtatcttggggtatctgtttgaaccttagatagaagccaaaatatacttaacaaaaattggccccaaacttactgggatttttcatgcaacacagtatactagaaataaaccaaagttggagtcagtctaaccacgttgcaaccacatactgccgtttctacacatcactattttttagcttcattctctttatctgcaaagtcagttggtatactctgcagtgtygtgaagactaaacgtgctatagctatgtgaacatgcttcagactgcctggctcacagatgaacaacaaatgttaaattccatctttgttttctccctaaattccttagattaataatttctatataggtgaattagaaacatgaaaagggtatgttattattttccatcttatgtttgtacagggtcttaaggaaaagaaaagagccatcagacactaatacaaataaaacaagaattgtgtatgcatcaagtcctcattaggtgtcagtcttaaaaattctagttggaaattgtatttgtaatttgaaggtcaagasctcctaatcaaactctcattgtgtttagccattgtttttgttcattatctcacataacaagaagcacagaggttggggcagcttgaggctcagtaccatcaacagctcaatgatgtcattaggaaatgggtactttccatctagttgtcatactcgttatataagcttgactgtaagactggctcctttgggcaaccagaaacctagagccattcacattgagacacagtgtttacagaggcagaagatcttctgctgtatctcctgatatctctcagattccccttaaaagctctctcctcacttctcatgtaccagtactaggtttaaataccctcttctaaaacaaccaatggcaagtggagaaggaaggcttgagtaggtttagagtgacaacattcctccttgcatatgggaacttctgagtcacatggagaaaagatgagctgacagatccgatattggatttttcagcaaaaagccagagaacaatgggtgttcagtagctcgccaaagaacctgattcagaaatataactggaatatttaaatttggcttaactagtctttttaagtgtgttcccaaaatttctcatcattatgaaaggtggcaaaacagaaaacagaaatattatcattcttaatcataacaactaacatttgtatgaatttgagtttcaaaacatttagcatatatgttattttaattcttacagctaaagtacaagatagttgatattggcatcctcctttaatagatgaaggaggcagtgaaattggcccagttgtcccatagaacatgatgtttatgctttcttttgaataaacacagaaattgatccttccagtcttcaaacttgagaaagttacatttgttttatccgagttcttatccaagttcctttctcaggaaaccaaccatcaggcctcccaggtatcatcaaggaacttaagcttaccagatcactgcatctagacaatgagataccagacccctcactcatcctgattgcctaactgacaacttgctttctgttgaccagctcttcttccttacaccccctaattcctattttcccacacattgttacatttcttccctgctatataaactcctaattttagtttgccagggagatagatttgagactgatcttccatttcctcagctgtggcatctgattcaagtcttcttccttagcaatactcattgtctcagtgattcgctttcagtaccatgaacagaaaaaccaagatggaacattggttagcattgcagtaacagcaagactcaggaagatgaaaggatttcttatgaactacacagctaataaataaaccacaccagaattcaagcccagttcttatcgtcataaatctccattgtttctatgacccccaagctacattttggaaaacagaagtcacttaaaagctgtaaaacagtctggtggagtgtaaaattgtgaggtaaagattttgtgtgctagacggaggatcgttctgggaagggatagtcccagaaactgtctttaaggaaaaagatcctgtgttctgctctaacgtgaaattacaggaatgcctgaaaaaggagatgaggaaggaagaatagaggactctaatttaattttggaggtggcttcaccaggactagacaggttaaagcacttgagagctatccccatcttcggaaatggcagtggggtgaaggaagatggtgtgtaaggctctccaccattgtctactgagaggttatcagaaaccccatcagtcattggtcagagggagcaagagtgcatgccgccccctagtggcactctgcagaatacaggtaggtacacataagttccttaagtaaaggtggtcctggacaattccgccttcctagttttcttaagagaaatctttagtgaatccttatatctagcttatctatctctacatactattccccacctctatttcctgtaaataatcatcttctgatattttcatttggaaaaatrgaattctgcataagtctctgatatcttaaaatcaaacccacctactcattaagcatcaaaaacaagtaaaataactcmttttttatactcaaaaggatatatttcaataagtggcatgttccaacaaatattcatttattgcctactgtgtgccaggaacagtattaggatctggtggacacaacagtgaataacagcaacaacaacaaaaacaaaaaaggcatttgtctttatagagattacattctaatgggagcacgrctcagtaagaaagaaataacaaggtaattttatattgtgataaattccatagaaagaattaataggatggtgtgtgataaagaataactatggaagatcctcagatgtaacagtgagctagctgaaatctagaacgtgctttgagaacagcctggggagaagcattttaggcagagggaatgcaaatgaagagtctttaaagtggtagaaagtttggccaacttcctgaacataaagtagggtggattagaagaatcacagagagagtagaagagattagcatggtgagaagtgggggaggttggagggttggcatggtgggtggtggagagtttgaatttattctcaatacaatgaggcaaaaggagttttaagtaagggagtaacataatctgattagatagaggccaggatagtgtgctcaaaaaacaggaatagcctccctgataaaatgtatttccagcaatagcgaccaaactgacgtaagagttgtcattactgatgttgtatttatcaccaggtgagatccagggtctcaactgattcaattgtaaagtaaaagcaaagtcttaactcaaggaactcctcccaattcggttttgcttttttttttttttttttcctgtcacccaggttggagtgcagtggcgtgatcttggcccactgcaacctccgccccgctgggttcaagtgattctgttgcctcagcctcctgagtagctgtgattttacgtgcctgccactgcgcccagctcatttttgtatttttagtagagacggggtttcaccatcttggccaggctggttgtgaactccagacctcgtgatccacctgctttggcctcccaaagtgctgggattacaggcatgagccacagctcccggctctgttttacttctaatgaattatgaaagaaaaacccttatcttacttaacctagaatcttataaccacatcatttttatcattagatgatgaatgattagatgtatgtgtgttttcctctttgtcaaagatcaaagtgtgaaggtgaaacctactaatgagaaaaaattgaccatgaaatcccaagtattattgccagtttttgaaaatattttcatttgggtttgggagggaaaaaaataattagcaagaatttagtattctaggatatcaagacttggtggaagcaccaggagatgatgtaggtggtattgagagcaagtgagtaaaataataatgataataatttaaataataataacaatgacaataacgtatttaacaaagactgtgaggcttgtttaaagaactggaaatggtggctgggcgcggtggctcacgcctgtaatcccagcactttgggaggccagggcaggcagatcatgaggtcaggagatcgagaccatcctggctaacacggtgaaaccccgtctctactaaaaatacaaaaaattagccgggcattgtggtggatgcctgtagtcccggctactcaggaggctgaggcaggagaatggcgtgaacccgggaggcggagcttgcagtgagccgagatcgcaccactgcactccagcctgggcgacagagcaagactccatctcaaaaaaaaaaaaaaaaaaaaaattggaaatggtaagggaaatatcaaacgtccaccctgactstaaatctctgtctgtatatccccctcaacccyatgtttttgtttttgtttttgtttttcagattcacattatctaacttgccgaatgcagaactgtacagaggccaacaggaatcagccttttccaggctacattgacccagactctttgattgttcaggatcattatgtgtttgttcaggtaggaaaaatccacttctgttgattgtctcagaaacctttcttttccttgtttctgtcccttttgcctgctttacactccattaagagtcaaaaagagaggatgggagggagggaaggaggtagggagagaggggaaaatcactatcttttcaataaaaggataattagtgagtgtggaatcttctatactaacagactagtcatgaatttctttgggctgtgtccagaggatcttatcaacatggggtcatgaaggcatcgcacagagtagtgagattgtctctaggatgatgcacagtacgatctgtcccccacacctgcattccaaagaagctcccagttatcaaagggactgaacaaatatgtcagtctctttctatctgggaaagggtcagccaatcagccccctccccaatacccaccttaaaagtggagaagcaggaatgggaagggaagctgtggggtggctggagatagtgggaggcagaggccaggrggagagtaatcagcttttattgtcatgcaccaactgtgattagaataaagacacttcagagcagatgtattcagccaggtttttcacccccaagagagtggagaacagtttaagaagctgacgtttcctgagttgttagtagagacaagaagcaaatacgctgcactgcttttcagcattcaaggaaaaatttaagcttgtttggacaatgcattttaaaactcagttaccaccttccatgttaaaaatgacaaaggtacaattactaaatagcttatacgtatatataaaagtatacatatatatatataaagacccattctagacagtattacatttatttcgacaagaaattgtgatttggaatatttaattacatgctttgaggatgcaatttgtttaaatgcctaccaccctgtgtacttataaaatgtttcacatatgatcacacacatacacacacacacacacacacacaccatttctttattcttcagggaaattagtaattaatactctgacaatttcagcatcaagttgtcaatggacattcgaatagttacatgtattggttctgtctataataattcatttctgtatcagtgctgctcccaggaaccttttctggtttctaataacactttgtgatccacatctatgacttacaaatgagaatcaattctgcatttggaatttcacacagtctttacccatgccaccatgaacatcctgtaacccctcactagacctaagaggtcatctggccacatgacggtgaagatgataactttccaagtcacattcctaatgtgatgaacatgcgcatttgttgacattctgagtatgcagactccagctgtcattgaaactccaggcatttagaggggttaagagtggctgtgtaggagagagagagagagacgtggtggtgcccttgacactgtgcctgcaggttgctcatgtgctggctggagaccacacctgccctctctacctgccctctgtaccttcctgccctctctcacacccaccaggattctttgggctgcatgctttggacaagattggaggggaactggctgtggtggcacctgcttgtagtctcagctcctggggaggatcacttgagcccaggagttgaagggtgcatgagctatgattgtgccactgcactctagccctgggcaatagagtgagatttagctttaaaaattttttcaaaaaggctgggcacagtgggtcatgcctgtaatcccagcattttgggaggccgaggcgggcagatcacctgaggtcaggagttcgagaccagcttgggcaacatggtgaaaccctcccccccaccatctctactaaaagaatacaaaacatagccaggtgtggtggcaagggcttgtaatcctagatactctggaggctaaggcaggagaatcacttgaacctgggaggcggaggttgcagtgagccgagatagtgccattgtactccagcctgggtaacagcagtgaaacttcatctcaaaaaaaaaaaaaaaattaaattaaatagaagagacctagattgaatttggacaccaatcctagcctggttttccrtctaatatgccagcactcctgtctgtgccatgtgcccataatcatcagtgtaacaccatcaaactggaattcagtgcccagagatgtgagcctccagctctgccactgtttgrgttgggccatttcattctgatatggcacagggacctacttgtagggtcatagacttgggtctagagacctgggctggtgatggcaatcagccaatgtaccccatttgaaaaaaataactcaaaatgttttctggcatctgagtcacagtgcaaacttaagaattgtatttttgtccagtaggttcagtttgggccgctgaccagctcatatgtctttataagttgtgtttgaactgaaggccaattctttacacttgtccgcaatagacattaatgccatttgttgtgttggaagcttcctccttccattcaggtgactgttctgtgacctgtgcctgttacagtagctcgagcttcttacartcttgtttttatgatccagctgacatcaggagggcggccacattactacgtgtcctaccgaaggaatgcatttgcccaaatgaagcttccgaaatatgctttgcccaaggtatggcctaaatcactttcttcatttcactcttgactctcattcacagaagccagcctccatccctttcccaaggactctttcagcctctcatagtcatgttttctttacatctctcatctctgtttcccaagtttgctctgccttactgtctctttggtcagtcctattaccctcctcttgtttcctccctccctcccttcctttctctctctctcttcctttctttctttccttctttctttctttctctttctccttcatcttactttctttttttctctttctctttttctttctttcatcttactttctctttttctctttctttcttctttytttctttctttctttcttctctgtctctgagattgttgctataggaacattcatatgaattttaataattgatttgcttttcaatagtaaagattttcaagccatatgtattggttttctaacaagacagaaaatattttttggatgtgttatgtatcagtgcaacagctgccgtccatttctgtcccatttgattatcagttgtttactgagcagtgatgccgtgacgtggcaccagcctttgctttctcagccagtcagctccctgtaaacttatgagactggttgtctttagagttctgagtcgcagctaattttttagacttccccaaaggcatatcctttggaaaacagaggcaaacaaaagttaaagaccctcaactgttgacatccccaggctgtctttccagaagtgctgaagaactgcgttaatatggagcgccacctagtggaggtcaaactgactcgggagctcagagctgtgtatttgcgatcttgctgccatcgtgatgtatttgaagtgactaggaactgtaaatgtactgtgccttaatcttagagcaagggagatgcatgtggctataagaaagggactatgcaggtttaaagagagttatagctcaactttgaagcctttgggttgcacaaagaacatacctaactttttttaattgagttgccatgcctctttctcttatattttcatccatcactttgtcgtatgttgtcttgaaccaacaccagatagctgcccaggaagtcatataatagacataacacaaggacacagcacgcctcctctcccgggagagccagtggtaacagattgttctggtttctccaggatgaattctctttcttggctaccacccttccctcaccctaacrtagtgaaaggtgggatgtaagcctcagcccattagaggtaataacacacactgagttgcactattaacttgaaagaactatagctatgttcgtggttgttattttcagctgctgagagattaatgactgtggtaattatccagaactgtatgtatgtctgtgtatggatacatttaagttcttgttgttcttgatttggcttaagtgtttgttttttttttctccagtaagacaagaatttacaacacttaagttgtgccttagatgagaattggataacatcactatgtaaaaggaaaactgagtgttgttcaaattacctctgataatctcttaggaaggtctgtcagagaaatgaacatgttaactcaataaatacaacagagccaggttttgttttgtttttttcctcttgagcattgaaataaattgttgtttctttgattractaataaatgaagtagttgacttgcaggatttgcaccttaaaaaaagaattatcctcaatgtaatgacatgctgctgttgttcaagggggatgtggaaatggagaccatatcctcatcttatgcgcactcttgggaataaactgttttttgtttttgtttttgcttttgttttgttttgtttttgagacacaatctcgctctgtcacccaggctggagtgcagtggcgcagtcttggctcactgcaacctccacctcccgggttcaagcgattctcctgcctcagcctcccgagtagctgggactacaggagcgtgccaccaagcctggctaatttttgtatttttagcggagacagactttcaccatattggtcaggctggtcttgaactcctgacctcgtgatccgcctgccttggcctcccaaagtggtgggattacaggtgtgagccactgagcctggccggtaataaactcgttaagtgacataagttttggtggaaatcaaatgctatttgtagcataattgaggctagaactcaagtctcctgactctcaaggtagtacttttttatattatactttcttagtaaattaatagcttctgttattaaaacatagcatcatcaccccatcaaaattccatatactgtcaggggcattaagaagaaaatcccattgacttaaggagccccagaaatcatagtttaaaatcaaagaaatgtttgtagactcaytgctggaggtttgggaaacagatactttgcattgcttgttcatagccatcacacagatcactgctgacagttgcccgcagtggcatctagccaatatggaaggaaaaagttttactttgaacccaaatttgcatctgtcttcttcctcctgttctcccagaagagcatgttccattactcagtcttatctgggttctgagggtagaatgcagtgattaatttagcttgttcccagaaaaaataggggctagtacagcagatgaatgtattatttagtccgggtggatgtttattatttaaggcaatgagattctttattacaatcccattataccttcaaaaagaaaccccagcttgggtggaatgatctgcaacaaaggtgcatatatttcatggcctgtcagggctggtgcaactggaaatgaacaaagcttcatgccgaccaaaggaattgagacaaaccagcacttttatgctcaattttctttaatcacccactaccattgtatcaactcctgaaagatcatagtcaccctgagctgtgctcaaaaaaatatttactaatagtaaagaatgacagtgggtagggagattttaatattgccattgccattaagagcatgtggccctccagacaggggaaagtaatgagttttccttcttttaacttgctgggaacccattctgagctactcaagtgagataaatgaggcaatacatacgaaagtgctttgagcattttggaggacagatactctataaaagcaaggtaatattattattagtatggatctagttgtctccgtggtggaagatcgatgtggaccaggatgcaggtgatgtgaaggctgcttgatttgcagcaggagacctggattagggacccagatctgtcactaacttgctttgaaaccttgggctggtttgtcaatgtctcttttctttattttttttttttttaaataaggagcttagattcacaacaatattttctcatatgtgttacttagaataaaatgtccttagtaatccttcctgagaatttggttgtgtggtcaaatatgtctgaaaaaaggaataaacttcattctgtgtttcttgcctagagagtaacagtagctcactggtgtgttgaaggtttagaacatccaataagcaagaaagctctttaattcaccattaattaatatgttttaccaaaggatcccttcctccttttcaagtctactaaaatcctaacaacattgtcgtcctatggagcagactttagaaaatgcttcaatacaaaatctgtaagatcacaccttgctctcaaattctgtgattcggttaaagcattcaacataaagtgccacattgggagaaaaagcgcatttctcccaatagaaacaggatttagggaaggagaaaaaagaaggataatatataaatattttaaacttttcaattaaactatttaagaccaatatcatttgaaaatggctgtacaacataattacatgaaacaaaggaaggattggaactcagctcatatctagagatggccattttaatctgttatcattgtgtgattagttctctaagtgacctagaccacaatatttgatacatctgtgttttcctatccaaatctacaaaataaagtcttgggagaagtggccggtataggtgatgcactttactcttccagcctaggattatttaatcaaatgtctattgtgagaaactcagaggttcaccagtgcagagattcattgtaaatcacagaagtgggaattagctatgcgggggtcaggttattgttgagatattttaacttggcttcagggatgatgctgcatcttactgacaaagaagggaagatgaattgggaatagttgtttgatgtttctcaaggccaaggtaaggatttaggtctttaccctataggatggggagccatgggaggtttggttgtcaaggcaggaacagctctggagctaatttccacagacaagtctctccattagaaagaaaccaaacacttgggtatagcttctcctggttcaaagaattttaaattttattttaaacaataacaacaaaaacacttgggtgaaccactttcttatcgtgtatatagttaggacttgagtatttgcgataaacagaaaggtcacatgaacctagattaatcaacaaaagggatgtaagggctcacttaactgagagtagctaacatacctagagcatatgctaagtgccaggcactattaggagtgcttaacactgattaactgatttcatcctcaccactccatgggggacctattatccttgtctctattttgtagattgaaattatgagacacagagtttcattcacatggctaagttatagagccaagatttgaactcaactagttttactccaaagtccattcttcagccactttactagactgtcttctttaactgaaaagtctggcggtgggatgagcttcttaaatgtccacatttagggaccaaaaaaatgtcacaggattgggccatctctctccatccgctgagcctgttttcatcaggattggtttcatcctttacctccaagatatatctccagcagatctggagttttcttttttattcttactgcttaaaaaccaatagtgagatactaattttgtctctccctaataactccgcagtcattccagaaacatgtcatattgaccttatgtgggccacctgcccatcacctattcagttgctgttgccagagaaatggaatattctgaaagccggttctaaaagctcatttcttgtgctgctggtagaagaaagtaggaaaaagtttagatttaatatagaaatatatctgagagggatgaggctgtttttcaaaaaacatcaatccatacacttggacctgtgtctcctcaggttctgcatcagattgaaaatattaaaaaaaatacaaagtaatacaaattaaataaatgatacaactatttacatagcctttacattgtattaggtattgtaagtaatccagagatgatctgaagtgtacaggaggatgtgcataggttacatgcaaatattacaccactttatataaggaacttgagcttctgtggattttggtatctgagggcaattgtggaaccaatccccctgcagatacctagagagagcaataattaccaggagaaatgtaaatagacattcaacagatagaagcacacattaaattaatgggcaggattcattttttgacctatccacttggggttctttctacaaaaatgttaccaaacttgagtatgtcatatggaacctgagtagaggtgaggaatataaagccctttggatatggacttctccctctgggatcacgagtttactgtgataaacggtaaagaggatagggagtcttgttcctacacgtctagaggagagtcagagctgaaatgctgcttgattgagaacatgggcatatatgacaatragaaatttaggttagtagttaggtggaatttccccgcactggaattgttaacaggaagattgtcagatttcctaaagcttttcaaaaatagagtatggtgcatctggaaagattagagcactaagtgatgccgaaaacaagaattgttctacgttgttcttctacctttgtggttatatttggttacttagctttaatttttttggtttttggaagttgttttatgtctactatcttgggcaaagggtaaaatgcaggctagagcatatgaacagacatcccataaagaagaaagcaggccttggtctgagtcagcaagctttggactgtggtagcttccattgtacttctctagagttatgaatgggggaaaaagaatttgaaattcccaccccaggggcacttgttactgcctccgcgctacctttgctttaattctatcttccaggacaaacaggctctgaaaacatcatcagttatgcaggctatcttttaccctttttcactggaggattcctgcagaacctctcagtttagattttgataagcagctaagtctttgaacacactaacatgagggttagtactttgggtttctctggtgaatgttttcttagggctgagggtagaggagactggctaggggttgctgaacctttgggcagtgcttttcaaactttaatatgcatggtaattatttagcaatcttattaaatgcacattttgattcaccaggtgaggcccaaggttctatatgtttaataagcttccaggtgatgtccttgctgctggtccatgagccatgctgagasatgcagggtttgtctattttctctctgttcctccagcttttcctcatatctaccccatatatgccttctgagcaagtatcatatttgtgcttggcaaaaatatcaggatgcttgattctccgaatcatacatatttaagaaagcatttttcgaattatgtaatgaggcaattaaaactggtctatcaaacatcccttcatcctattttctcatgaccttattgcctaaccccacaagtgacaaaggaaatatatgattaatgcttaactattatttcttatatatgcaaaaggaagctatcttccattaaagtgctcattctggtattcctcatttgattccacactctttggatgcctgccaggttaatgtataaaactctttttccctcttcacgaccttgtgtcttttcacaggacatgcatgttatcagcaccgatgagaatcaggtgttcgcagcggtccaagaatggaaccagaatgacacgtacaacctctacatctcagacacacgtggtgtctacttcaccctggccttggagaatgtccagagcagcagaggccctgagggcaacatcatgatcgacctctatgaggtatgtcacgaggcatatgtggtcctaagccacagcagtgcccagctggctgatggaagccccgcatggactcttttcctggtcattttaatacagttccttatgtggcctcatttctcttgggagatggaaagatttgcagaacatttttattagttaatttgcaatccacagaagatctctgggggattctgggagggattcttttttgacaaactccataggacatgaaggctttgtggacttgcggaatgtctggggaggcagtcaattacagggtttgatgagagtggtctgcttgtgatgtttggacatagttctgaaaggcagacagggctgtgagtaaagggatggtggatgcactcccttgtctctcagaagaaagaatgaaggggataaggtctcctgcatccagcagaagacactccatttggacttgaagacctttctggttaaataagctcccttggctaatggcctttttctcacagggccagagaatgagataagattaacaggtgcttgtctcctaaatccagaaaaataaaataaacaactacaacatcaagaacagagcttagcagagtctttatttctcaaaatggccaagattcaaaagaaaatcatgtatgttggattggttggctttcatgataaataccaatgctttaattgccattgaaggcacagttagctagaaagaaaactgctgctttggcatggattttagccattcgttactcttatcatgcgctatgaaagatttataataggttataataagccatttgaaaacagtcagaatttgggaagtgtaacaatatacctatattctagctgaaaaaaatctaaaatggattcagatatgtacagtcataatgacactgtcatttagttgagaacaagagcagtgagtcaagagattgtttgtctaagaagtaagggtatatccagtatgaaagaaactaatttcacttaagaaattttaacctatcattgtaattcctttcaatgatgtgttctatcttccttctcgttcagaggttcttagtgattttcttctagtatctaaacttctgtgtatgtataaaagcatgttagtaaactgtatgccaaatttagagcccaggtatttgtaatagaaattatggcagactagcatagggtctagtttatgtgtatatgtttagaaaaatgcattgcaaactttttcatactttcataagtttttccacttcttctcctgcccatgtttcagataaatacaatatcatgtatgacagcctcaractgtattctagaagaaatttacatattgtgatgatttagtttcatcttcatgttgaataaaatttaatttagagtacagattttggatttaggttgcttgtgcttaaatcctagcgatgccacttgtatgtattcttgagacaaatccagtaatttctgagccacagtttcgttgcttaaaatatggagataaacatgaaacctactagatgtgatttttctgaggattaaatgagttaatcctttcaaagcacggagcacagggctttaatattattttccaatgtgttcaagcaccactacagtgttctactctcatagccttaacatctccctgcattgtgtaaatgcccaaaacatttatattattttggattcctacatcttcccatactgaaattagtgcagccacgtgacattctttataccaagtagttgtcttttatttatttatttttttttttttgagatggagtctcactctgtcacccaggctggagtgcagtggcgtgatcttggttcactgcaatctccgcctcctgggttgaagctattctccttcctcagcctcccgagtagctgggactcccactaccatgcccggctaatttctgtatttttagtagagacggagtttcaccatattggccaggctgatctcgaactcctgaccttgtgatctgcccgcctcggcctcccaaagtgctgggattatggcctataccaagtagctgtcttcttataaataagtgtaaattgcaacatttctcttttcatttgtaaatagattataaacattttaacttgaagtatgttttgttgaaatgccatgcattttcttgccttgactgaacacttgaaatggaaggattcttgctctgagcatccactggcatgaagtcaaagcaactgcccaagcttaatccccagttttctttcctagccctcgttctatccttagtctcccaaaaacatattctgactttcaggttccattttccccttcctgattatcctcttccctctttttgtgtcaacatggaattgattctctggataaattttgtttactgccagaaataaaaaccattttaattggtcccttgatgatgaaaaaatgacaaatttagacaggaatgactttgcaatgtcttgttrtttgcagctattttcatgactagttttctgaattcaaacatcggtaacaggtatgaaatgaaaagaggaaacaaggcgacctctggacatgccaaacattgctttgttaatcttgtgtttcccctttgtgcctctcttgcagttgactatctgtagggaaacygctggctcttattatcatcattttgagcagtgrtgtgactgtattatgtaaaggtgctctgcatcctggggctgggagagaggagtctttgttttattagcctgacagttcacagcaacttgaattgaaattgatgtgatcagaacggcagtgccgtatctgctgattacctagatagaaagaatattggctgacacagagcctggcacaaatgttcccttaaatctgattgttctggctagcaggaagctgaaagccatccagcatgaatttcccagtagaattgcaatgaatgatgagagtttagagataaatgagaagtaagaaaatccataaatgaattactaaggagcaaagatgagcaacacatgaggtgggggttacagagatagcatacatggagtgcatgtctgctcacatttggggtgactgaagaggatggcctttgttctttgtttgtttgcttcttcatgccaattatgtgctattcctgcctttgtgagctcttcaggctattttagcagaggtgaactgtataatgtataaacatgtagatggatctgtgtatcaaggatgtgcattgctgacgggtctttctaaaaaatgcagaaggaagcactgtgctcattaaaattaagcattttgtttgcaaatacattggaacctggctacagattctgtgttctctaccctagaactatgtgtgtgtgtggaatgagagagagaaatgctggagacaaagtgttgagggtacagcttgtatggtttagttattgaaatatcagaattttccatcagtgtcaattggactccattcaagagagccaagaaatgagagccaggaaagttggccacagagcaaaaatactagaaatgaattttgttgatatcattaatatcattaattgatatcattaataatggctaatattttgggccactttatgccaggcatggtgtaaagaaccttccataactctcccattcagtacatacattatgaggtagggactgttgtcactttcacttcaaatataagtaaatggaggcagagggaatacagcaacttttgcaagaccgcaaagatggtaagtggcagagttaggacctaaaccctagagtgtgcaaactctcaactatagactgtcacatttttcctgaaggatcagcatctgggcttgtatttggttgtggaagagtgacagcattaagactgaagaacntagaagggcagggtaaatagggttagactttgcataccagtgaaaacagaagactggaagaagaaaatgatctggggaaaagtcaatgtaaagagaatcagaagtttgattgcccgagacctatctatgcagcacctttagtaccaagtccttagttacagctaagttcaggctatatttacacatggctcacagtcttgtcgggtggatgtatttgtgtaagaaaagcctggaaacaagtgtcctaaaactccatcacacctgaatagaatgaatggtccggtgcatcgtgtgcatcatgcagtgcatcaggctgcatgtctgatggtggccagagcaaaaaaaaaatgtgctgagtgtctgtgagaagagtgatgcctgatggttttgtgtagtgtggatgatgagagggagcctgacaggtttggatggtaccttctctcctttgggaagtgaatattaattaatgatgatgaagagcactttggcttaatagacaatgacagttcaccccagctgagtgcaaagggttgtgttgggagtgaagccacctggctgacaaattcagaatacacaagaatgtgtgcatacatgagtgagccctggtgggtgtcatgaaggacagccagtgaccagggcatgttctgttacacacagtgtcttctgtacgttatgagtaccctctctttaaaagagaaaactcaacggttatgataatatagcatacatcttgattttttggagcaagactgcctcttacaatctmgtttaggaggtagggaagaaaaatgctgtcctattgaagatacatttattacaggatattgaatgtactattggccaggtgcagtggctcatgcttgtaatcccagcactttaggaggcagaggcagaagaatcaccagagggtaagtgtttatgaccagcctggccaacatggcgaaaccatctctactaaaaatacagaaattagctgggtgtggtgaagtcccagctacttgggaggctgaggcaggagaatcacttgcacccatgaggtggaggttgcagtgagccgagatggtgccagcctgggcgacagagcaagactcctcctcaaaaaagraaaaataataataataaaagaatgtactattatttcaggctactgtctctagaggaggagagtgctgtttgaggaggagagtgctctttggttgaggcaacagagaaggaaagaacatttaggtttttcttggccagtgggttccctgattgtgaaggcacccyggcctcatgtttatccttcctgttgtcctctcgagaaaaatatcccatccacaaagcccaaagaaattgtggccatgaatatgttctctttcttgccacagtcgttgtttcatctttttaatttttttttgaaattttggnacttaggatttgtaatttaagtctgagactgagagggtggtaggtagtattcatcttttagtcagcattaaaggcagaaataagcaaaaactcttgcacaggagtcttcccaacttagcctctgcatggaacttacaaaaggttttcttacacaaatatgtaagttcctttgaattgatttataataaagagcataagaagtactagagatatttatgggaagactgattcccataagaacaggacagaaccatccagaaagtaaacctaaaaagcaagggagatacctgtgtttttttctttaagtcaccaaagaaataggaattctcagcacctagcacattctaactctcaaaaaagatagttgttgagatcttctacatattatatctgccaagtgcctagaagatcatatgatacgtagtagatgctcagaaaatatttattgaatggctagagtaaatgtactaacgactgaataaaatacaatttctttgagtaraacattctgatacgatatttctctcaggccactctaggatgagagagaagttcgaagagacagtacagccacaggcctaagggtgtagactctgtagttagacagactgacttggagtccagatctaagattctccaatgggatgaccttaggcaagtgattagccacatctgaatttcagttttctcttctgtaaaataaggataatatgaattctaaagcatgcaragattcacaagttcatgtttgcaaagcctttcatgtacaggttgagtataccttatctgaaatgcttgggaccagtagggtttcagattttagacatttttggattttgcaatatttgcatatatataatgagatatattggaactgggacccaagtgtacacacagggttaatttatgtttcatatataccttatcacatagcctgaaggtaattttaaacaatatgtttaataattttgtgcattaaacagtttttttgtattctagaaatttattttttattttttattggtacataataggcacacattttcagggtatatataataatttaatacatttatataattagtaaataacatattagtatacttgagattattcatcaccttaaatatttttcttttctttagagttttgattgtgttttgactgtgacccatcacatatgattaggtgtagaatgttacacttatagcatcatgtcagtgcttaaaacattccaagttttggagcattttggatttctggattagggatgttcaacctctggtacctgaaatttaataatcaataaatttggattgttatatctttcctttaaaacagctttattaagatgtaagtcacatatcatacagtttgcccacttaaaatgtaaaatccagtggtttctagtgtgttcacagagctgcacagccaccaccacaattttaggtcattttcattgtccagtacagaagctccacaaccattagtagtcattccccatttctcctcctcgcatcttctccccagtcgtggttaccagaggcttgggtgttgtaccttctaatgcagaactcttactacctatttcagtaggaaaaaaaacaggggctggcgctgtggctcacacctggaatcccagcactttgggaggccaaggcaggtggcttgcttgagcccaggagtttgagaccagcctgggcaatgtgacaaaaccctgtctctaccaaaaacaaaacaaaacaaacaaacaaaagaacccaaaattagctgggcatagtggtgtgcaactgtagtctcagctacttggaaggctgaggtgggaggatcgcttgagcccaggaggtcgtggctgcagtgagctgtggtcacaccactgctctccagcttaggtgccagagagagagagaccctgtttcaaacaaacaaacaaacagggttctttgtataaagttactttactgttattaattttaaagagcaggttggtggagtgaatgacaatccgaaggttgtattagagtaggagaccataatgtgagaggtcacacaggggatgaccaaattggaattaatttatgataaagagcataaggagtactagagatgtttacaggaatattgagtcccctaggaagatcccacagttcttgacagtcaagatacagataccatctgtatgagagacaaattaaagaacagagaagtgttgggataatcaggatgaaaagagatcctggtttttggaaaaggtttatgagctgaatctttaaggatgaataggtagaggcacatcaggaggctttctcagggagttggggktggcctttgtgaacaaagagagtcagataagagaagggaaggaagtgttctgagaccatcacgttggcaacaggaaatgcaccgatgtactttgtgttaggcttaaggtttgagctataacacttcatatttagtctaattaaaatgatatcttgacttatatgatattaaataataagaaataactattaattacttttgagatgtctggtagcaaatttctctgtaggagaagcaaagggactaaagtagcattccagcacacttagaattcttaaagatctttatgcagaattcagaagggcattaaaggcaacaattcttttcccaaaggaggacagacttccaacagtgggatgtaccattcccatgggaggtttgtcatcagaaattctgtgtctatgggaagacatggcttccgtaggaaatattactttaccccaccctaccccatcccttagctccactctattccataaatatgcatgcagtatggatacagagaggttatctagaaacataaacatgctccctcatcctcagtggaacctcagaccttacactcacacaaagagagacatatactacatgsatagacaggtacacccatgtacacccacacacattccacatttggggcactaatgcttggtattagtccccttgatagccaaagtcctacagtgagagggtagaggttccaagaaacgtaggatgagaccttagaatagagtactggaagaaggtggcttgtgcgtgcctaggggtttccgtgagacacacagaaagacggatttctcaagctcagagtgaaaggaacagtgaatagcacaaaaacctaagactagggctgactacatttgcagaccaggccaaagcaacaaaagaaaacaacaaaataaaaaaccctaccttaaatggacaaagtgccttggctgcaagaggaaaataagcaataagcagaccctctccagctctatcccctgtcgatacacattccctttactttgccaagtttttattcctcaagataaacctgaaggccaagctgccagagatgaattacaaagcacagctctttgctcaagtggcatttgataatgccaagcagtcgggggccaataaagtcgccacttctgcgaatcaaatgaaccagctcccaaacatgtataaccctgcgctggcacccttgccagaagagggagagggcaggaaggaaaatgggcaatgaaactactggaataggtaacatttttattccttctgcagttattgtcaccctttagagtgttgaatggctaagacatggtcatttgtcatttctgggaatggtatagaggaaggaccagtatgactttgtgaaattctgatttacgtaatttaattttttaaagaactggcagtttattcatatttgagtatgtaacagcttcttgaacatatacaaaaccaatatggaattccctggtgggaagcccttgcggagctggtgtagtaaattactaaatattatttgtaattaacacactgctgttgtgaggtagagtgctcctggagtttatgccttccacatttgttgagtttagacaatgcacaagaagttggtctggctgctactgattgcacagaatgcaccttgtttcctgagtatgatagttcaaagtattcctctctgcagctcatttataccatttagttgtttaacatgcttgttgtttcaaaagagtacaaatttggcccaactataaattatcccagatgccagatcagcaggtacacactaatgaggtctgactgtcaaaagcaaaggcaaaatgtgtgtcttctatcgattgaaacccaacctcttagaattgacaaattcaagctgtatttgttgaaacaatcttggaagtcaggcagatttgggtgtgaatctcaactttctgtgatctcagtttctttatctgtagaattggggtaaaagctgcaggtgcaggtttgtagtgagtattggaggttttgtaaataaaatgctggacatagtgcttggcgtttggcgaggtctggagaggtgacagctaattgcttcactattctgcttaaaaatttttcgtgttataaagggcccaagttaagtaggttcaaataggcttgctagcctgctcacttactccctaggtgtgttccagaaagccaccaagtcaaagtatctatttcctcatcctcaaaatgtggctaatgataattattccatggttattctgagtattaaatgaggtaatgtacatgcagcattggaatgcattactcaacatgtttcagtccttttcctcactgccctccagttttcctgagctgttacagttgcaagcagggtaaaatatgcatgaatgtgtttgataaactccaaaacacaagaaaaatrtaatgcacaattatttgcttttgtaatagtttgacaaattactaattactacttcttacctaacatatagaagggaggagacaatcatattttcagagccaaataattaatagcatctgtttaggctgagaacaaccatgttataaaaacaaagtagggagtatttgatgatttagggaaatcaccatttatttaaatttaaaagctgtcctcttatgttccgtgtattctggtggcttaacagagagatcttacatagaaataaagcaacagtaattggttcaggagctttaactgcctctttcaactgcccaagcctgcagatagcttgataattgaggtaggcattaagagcatgagctgtgaagccgcagagttgtgggttaataatcctgagtctgatacttactgtgtgcccttgggcagtgtgaccttaggcaagtcactttgtttggatgagcctgagctttcttcatctgtgaaatagaataaacgataccaaagaggagtgttttaaggattaagtgagatctgggtgctacactagcatacaatagaagtagcccctatttatttattattacttaccaagcaacagagctgaaaccatgagaatttatctcttggcaactgcgggctcctgtcagcctatgttaggggtaataagaaacccctatcaaactcctgttgtgacccccatatgataaggatcaccaatctgttgttgtttgtccagtagcctaggaagtcattataccttgagccacctccttcccccatcgtcaacctttctttcctccaagrcaagtgctctcagctgactttgacagccttctttttttaaaaagtaaacaaatatatcccttctcaaattgatgtatttttcagccatgtcaatttttcccaggtagcagggataaagggaatgttcttggctaacaagaagattgacaaccaagtgaagactttcatcacatataacaaaggcagagactggcgtttgctgcaggcgccggacacggatctaaggggggaccccgtgcactgcttgctggtgagtcttcctattgaagcagaatgcctcacacagtagagggatggaaatggatatttaacagagggtgaggatagttctgggacttttgctcagttgatgaacaaaagggantggggaagggcgtgaaggcaaagggtgtagaaaactcacagcactgcctagtgtgatgtgccaaagagatgggagaacatgggcatatttcttgtgcccttccaggatccttgtttcccgcccaagttctgatgagggcctcaaatggtagtttgagggagaatatgacagtttctatccctggtgaggatacacactgaacaacctattttctcatgagtaacctgttgcagaactaatgatacataaattcagctgtagagttgatgaactgaatgcagagtcgtgtaggtgtattttcttgtggagatgtttaatcatattttcagaggagtttatgactcaaaaaaggtaagaaccactgatttatacccttattggtattctttacaatatattctgttcatttatgtcttactccgtaaaactgaagttggcaaactatagcctgtgggaaaaatatggcccaccacttgtttttctaaatagggttttattggaacacagtcatgcttattcattcatgtattgttgacggctgctttcactctacaaaggcagaattgagtagtcacgagagagactttgtttggtgaacaaaggccaaggtatttattatctgtatcacaaaaaaagcctgatatttattatctggccctttacaaaggtttgctgacccctactttaaagtatggctttcttttagttgccttacatttgggcagtatatagattagtatgaatttatttatatatttgatatatgatggyatccaaaaggaggatcaaagatgaatcttgctttcaaggagtttgcagtctacttgtctacttgaatgtgtctagattaataaatggaagattgcagggtcacgtcttattcctcttagtagctctgatgcctgccccaattttgacacacagataagtaatgagtgaatgcagaaggaggngaggaagaggcaaattgcaaattgcaaacattattaatactatcaatgtctgtaaaacacttcagaagttgtgtctacatttagaaaaaggacagctgattgtgtaagcctagagggaggaccacttcatttgagtaagaagggcttgtaggggagggggttgtgtgtgtatgaactacacatatatagttgttcacactcttcatgcggttctgactttgatgttatccgcactcagcttgcttccttccatcccataaagtctggacagtcactttgcaggttcatctcttacagctgtaggcgggtcacccttctagttgagaagatgccagcagccatagcttgaccttattagttgcagaggatatcacagttgtcactgtgcatcagggaagcagtctaaaattcagcctcccactcagcttctatccttattactggcaacttaagaggaggaaaaagccagttgttatagtaagtgcacaatgccagtgacagagtaagtaaatgtagcagctatttattgaatacctactctacgcaaggcacagtttggtggcattttaaaaaacagggccaccttcctagttcagctatagcaagttggagcgtagtgctgcttaaccaaagatgcatgggatatgccagttccttaagctggtctctactctgcactttggagattaaatgcctatgagagataattaaccatgtcacctaaatgggcttgcctggggactctggcatcataaatgaaccattaaaaatggcttttaagcacttagcaaggtattccctgcttcacccccaacgcagtgtcagaaactcttattgttgtacttccaaaatataaatgtaatatcagcttacttccccatcaccactgggactgccctaatccaagccagcattgttgctcacctgatccacagtggcaggcttctaactggtcctcccacttttacttggcaatcacttctctagacagcagccaatgggaccatttttttwaaaaaatcaactttattttgaggtaaaatatacttacataccgattttaagagtatagttcaatgaattttgacagatgtatataccgatataaccattgctacaatcaagacaacatttccattgccctgaaaaatacctttgtgcctctttgcagttagaacccacactctcagcccagcacaaccaatgatccactttattttactatatatcagattgctgttttttaaaattgtgtgtaaatgttatcaacttgaacttttgaaaaatcagatcgtatcccttctttccttaaaccttctaatggcttctaatacatgtagaataaataaaaatactttatcatgaccgatgaggccccatgtgatctggcccctgtgtagttctcctccctggtctccagcctctccctcctccccttcttccttatatgtaagccagagtggaggagggggtgtttctttgcatactgtgaactcaccatgttcatgtatctcttagggtctttgcatttgttataatttctcttaaaatgcccttctctttgtctggcttgttcttggccttcagatcattgcttcattatcttaattttagagaactttcttgagcatcccctaaagttgtatttgtcttaactctttttttcttcatggtccttattgttatctgaaatgagcaggtgtactacttaattttcttgtccatcttgcctgctgaagtgtgggcttcatgaacctagggacggtgcctgtgtttttgaccactccaaagaatcaactccaggaatcatacctgccatgtggtaggggctcaacccatgtggtaggggctcaacattaggggtgccacgttgggartgtgcactccatcgaaaggtgttgtgacagtttcgcrtttggattttaatggaagctgttcattccctctgagagtccactggaggatttgtcacattttctaccttctgaagctcgtgggctcaagtggaacccaaagttaacaaaagcaggaagctcattaagatggaagaaagagggattattgggacacagatgtatggaactcgggagttttccagccttccttcttagttaaccctgttgtttaatgtagtttcaacctgagcttcagaaagcaggctgcaggtgagaaggggaaaatgacaaagggaagcagggaggagagaccaaaatcactttacaaaaatctgccaaaggcactaaataggaaagaaaatctttgagctacaggagacgaagactgttaaaaaccttctttaggcttgggagctggtggcagagatgagataaaaagtgatttcgattgtgagtacttggaaagtgacagtgtcactgaaagcacagcctagtgattagaaaagagattttttcagcagggctgttacagatgtggaataagttcagaattgcagcccgaatgcagtgttcctggtaaaaatctatgctatagaaataaaacatctagggtaatttgggctatatttttaggacttttagactgattgcctggagggcccagctgggatttctttcctctgaagactgcattgtacaattagatagaatattacaggtcatggtccacctgcgtccaatgcctcaggattgggctcccaaggggcaagatgtgagctgaactgagcctgtgacaaatccttgggcccttagggaaagcacagtgtttaatggaaagaggcgctgactttgtggattcatctggcagttttcttttcttttctgtttttttgagactgagtctcactttgtcacccaggctggagtgcagtggtgcgatctcggctcactgcaacctctgcctcctggattcaagtgattctcctgccttggcctcccgagtagatgggattacaggtgtgtgccactatgcccagctaatttttgtatttttagtagagacagggtttcaccatgttggttggccaggatggtcttgatctcttgacctcatgatccacctaccttggcttcccaaagtgctgggattacaggcatgagccaccgtgcccggcctatctggcagtttgctactggagctgagcagacagctgccccaggagaatctgtttttcacctttcttccattggagaatctgtttttcacctttcttccattgtctgtgactctatatattttgctgatttgggctggagctgaattccccatacccagccagttgwtccaggggcctccttcctctttgccgttgactctttattgaagatgtaataaatttgagttccaactcaaagaaagaaattatacaaatgagtatgtatttcgggagggagagtgttggggatactatttgggagcttgttctttacaaaagctctgatctgtcctttcagtacaatattcagattagataccatggagataaaggtaccatgaagatagcatctaaaggcagttgatacagaggctgaggagaaagaattgggatttgaagctggttgacccttaagtaatataacagcttttaaagttgatttattacatggtggggaaatgtcttccattttatggtaattccccagtgggatccacaatgctagaaacacagtagataattaatggatcagctggagaacattatgctaagtgaaataagccaggtacaaaaagaccaagtctgcatttctgtcttctatgtggaacctaaaacaatcaaactcatggaagcagagacagaatggtagtcactggaggctagaagttgggggaaatagggagatattggtcaaagggtacaatgtttcagttagacaagaggaataaatgataaatatttgaagtaaacaataataatggatcagttaaattcagcagacatttattgaacacttggaatagccaaagtattttattggttaaaagaatcaggcaaagaaaggtaactagtaactagaggtccacttatgggtttcggggtttgcagactccctgaaattaagtgaaaaactctgtatggttgtstctgtgcactttttcttggtctttcatttgcatcagatccccaaactttgtacctgacccagaaaagattacagactaacagtctagttgctcctagaatttaccaattgatgatatgccatggcctgtgactatgtgtgaggatgcaaagggcagcttccaagcatgtgtgctggtcattctgtcctctgtaggtcagctgctggcattggtggtttgggtgtacatttctacattttcttaatgtggaaaggtcaggaaaatagagaactgcctttggaacaggctgtgctttgactctattgacttggagataastattgtgactattagcatatgtaggtactcagcacatatttgctaatgagagaaaagaaggcagaagacaagagaaatgaagagaggggcctatgatgtgcccccagcctgggcaaaatgtgcataaggactggagagctttgtcctgtgtccttcagaaacttggaggggtttgataagcattataataaaatatactaatataaactatattaattatttatgacttaacttggacaaatgtccaaaactggtcagtacaacagcttaagttaaaaaagtgaagatgaatcacttcacactgttttttccttaaatatttgtgtagactatgttacttccttgaagaaaatgaaagaaaaaagccacagaatattttccttataccagctgggggcaatccagtactacaaatgtgagagtggagaaaaaagtacaccaaaagatcatttctaatgttgctgttactgagtgaactggtgtcttttttcctcagattaatgtatcycagccctctgaaagccatagcaacagaggcatgctgaggtagccaatggaaaaatgacatcttttctttgttcttgttttttgttttgtttgtttgtttgttttttgtttgtttttgttttggttttgtattagagatggagtctcactctgtcacccagggtggagtgcagtggtgtgatcttggctaactgcaacctccacctcccgggtttgagtgattctcctgcctcagcctcccgagtagctgggactacaggtgcccaccaccatgcctggctaatttttgtatttttagtagagacagggtttcaccatgttggccaggttggtctcgaactcctgacctcaagtgatccacccaccttggcctcccgaagtgctgggattacaggcgtgagccaccatgcccggcctgacatctttcytttgtaatggcaactrccccttaccaaataatccttaggtcaggtggcaaataactcaaaatcttccagcagtggcaagcaactggcttaagattgaaagttgggtgctctcctggctagggatgtcctcctctgtttggtggtgcagaaagtcctctgttaagctcatatgtctagggataatccgcaagcagtagtctacttcttggaatgccatacagatgctcacaacattattcagattatgtggttgataatccagcccacatactcctggcattgctctgagtaaaatagtaaagtgatatctttcatgtcccaacaaaaaagcattacttgatattgcaagcttctatttattatcttgtttagattctatgctaggtttcacaaaagatgcgaaacagtacttaatcagttatctttatttatagagtgtattcttagagagatataattgtatgtacctgaaatagataatacaagattgtgcatagtgaaacaaattgttgtggattagaggagaggagagcctgataggctgcagttatcgggaagactttcatggaaaactggttttgcactcctggtttaccctgtcttacatcatctgagtgttgtactatgctgttctggaacatccacagcatttaattatatctgttctagtcttcctcttggacaaataaaagccaagagtctaggcctgatatttcttctaataggggctgtcttctttagtcctatagaacattataaagtcaaaactcctttttttgaaagctttacatgaaatttttatgcaaaaccaatcatttgttactattagtgcaccttgagagttttactttgttggcagtaaagaaaatatcccattgtgatctgctgttttatttcaccagcgttctggctgtttttattcctgagtttcattttcactttgtcatttactccatcctatataaatttaatcattgtatctgtaggtgtctgaatgtctgctggctgaaacttacagagcagaataaaagtaataacagagatacactggtgattccagaaactcaagttgataagattagaaagtaatcttcctgagatatgaaaagaaatgtgggctcaaacacaaacttatattttttgacaaytcagtacaagaactattttaaacaaaattcatataagatttattatccttttttcttgaaaactgttgatatttcaatcagataatttgaatgaggtttctgcacaaacaagtcccttacattttcagttaaatttttactactagtgcattttgtctacaagtgtgacttttatattgaatatttctgattctgataatatcctggtagagatactgggtcagttgtctggcgggtatttggataatttcacatactttttctatacaactgagaccaaggtctcaaatggagaatgactaagagatgscaacctactttttcaaaatcctcccagcttgacttgaccttctctcctggcttcatatcccatttctcctcttcagtcttttctgaygacatactgtgctgctcagcttttctgcttctttttctttgttattgctgttactcaggmttgaaatattctttaacgtcttgaacatctacctactgttcatagcctatccatctttgcttcaggcactgttttctttttggagtcattcatgattcaaagttcagcatagtctctccaccttctagaatctcatactattttgtctcttcattttttatggctgttaaaagattctctttttatggtaattaatggaaggatctcatgccctctatataaattgtaagctctgtaatgacaaagaccaaattagattatacctaaaatgaaggtggtctttactaacttgaaggctgttttacacttagtggacactagatatttgggggatggaagatgttgggtaggtatagatacaatgggtggttggagtggtgcatggatgtatggtaaatgggatggttggttagatggatggatgatctgattctgagcttcaaatgaccattttgattatgtgattttgtggcacttattatttctcttttcagccctattgctcactacaccttcacctgaaggtctctgagaatccctacacatcagggatcattgccagcaaagacacagctccaagcatcatagtggcatcaggtaagaagcttacctggtttgctggctgtggtaaatagtgtttattttaagaagctagatatctgtacttggaagtttattttaagaagctagatatctgtacttggaacttaatgagcaagctaaaaataattttgaaaggcacctaaaccattggacctgaagcaagtctgcagaaaacccctgcacagacagaatgcttgcagtcaaaatctttctcaggcagtgcacctgccaatakagtccattgttgcttttgcagaaagttcttttcactaatggcaccnttctctttctaggtaatataggttctgaattgtcagacactgacatcagcatgtttgtctcttcagatgcagggaacacctggagacaggtaagaaaataccctgggtcaaatcgctgaagtttaagtaacataaaaattgcccagcttggttcaaatctgggaacttttttcagcggtgctacacataaatcctaatgactgtgaatatgtttatttttcctttttatataaaagtcttaaatgttggagtgtagcaaatatttatggaatttgattttttatcatttaataaagatgttccttactcagagcttgtatgtaagggtgtttataagtcacaatgaaaccaaattaagtctgactaaatttttcccacagatgaaaaccagaattcctaagggtttatcatatagggaatatgcagccttaagggtagattacatatctaatgctgagttggctccataaattccccttgccttgaagtcagaataggaaggaatgcagatatagaaatggccattacccaggtggtgttctgagatgtttaaatctcatgtgcaaaagacagagtaataaccatcaggatgcatatgttagagaaagtagaaatggaatactttaaaccagtgtgtttagcttaagtgcttcctgcctttcttctgaatgaaaattagatacccatagcttacaaaacaggcatttaatgaggtttagcaatcttaacaagatatgcacctaatgcwtggttgttatacttcaatcaatatgttttaataacctactgacgtttaattatcatacaataactagcactgtaaattgaaatctaatgcacaggtaatcacacttagtgatgagagcactctcctttaaattttagtcagaggtgtccacattatattccaaatgccatttnttagcttcagaccctctatagatcctcagtgggattctgatattttgagcggaggaggaagggaagaaatttgcataagaaactccatagcaattgatcttggaggtatgtagaaacctggactattctaagtaaacttcctctggagaatagagagccaggatcccattttcttctttccaacaccgcaagcaaggcaaagaagtctttacttctatagtcttgggttgcatcttgggtataagaaataaacaaattggaagaagattgtctgtaatgtaactccaggcaaggctacactaataatctgacgagaaaacagcatgcatcttatacagaaaggatctagagattgtttccattgtgtctccatttgacttcaaatttctttctctacatttggagaaagaccaaatgacacatgtacccaaagatgacaacagaactcaccatgattttggtggaacatctattaattaaacaagaacagttttctttgataacagttggaaacttcaaaataataagatctggaaagggcastgtaatgcagcaagtccaagctctatccattactgtatgcatgatctcaggcaagttaccacatctctctaaaccttagatttcttatttatgaaaatgagactattggagtaaatgatttctaaggttccctctgtctagagatgtataatatatgacagttaaccaatattctgacatcatcataactgggaatcaatagaaattatcatgaaaatgaaggaatctaagcatgaacccataaatattcattgttcaaatttattttatacacacctaaaattattttgtacaacaccaatggtataatagcccatgttgggaagaactgttctatagctttattttcgcaaagatttagggaaacctatttttatcatgggaaggatttttgttctcatgtgaagactgattctctgaagcctgggtatgtgtggatgtggatgtgtgtccatgtrtgtgttttcctcatccagatctttgaagaagagcacagtgttttgtacctggatcaaggtggagtcctggttgctatgaaacacacatctctcccaattcgacatctttggtaagggcacatgctrcctgtgaaatctgcacctgatggtcctgaactgctaagatcagtctaggagtcaggctatcaaaccgtgtctgtttctgtagtaaatctgttaccaaaatgccgaggtttggttcaggtcctgttactctccacacaaaaagccaatccactgagacaacaaatattgccagtgaagaaagctttaagtgggtgctgcagccaaggatatgggcaatcagtcccaagtccatctctctgatgactaaaagtaggggtttatatagagggaagaaatgtaaccaggtgtaaggaaacaggaattagggaagggtaaagaagaggaggtgaggaagaggaagtggtcaacaggaagcaagttgtcaattaggcaatcatgatgggtaagtagtctggcttctcattgtccagatgtctttatctggtaagtttcagctccttgatactacctgggaggcctgatggttggtttcctgagagaagaactcagataagacaaatgtaactttctcaagttttaagacaaggaggatcaatttctgtgtttattcaaagaaaccataaacatcagttctatgggacagttgggccagtttcagaatgtcaaggtctactagaacagtggaggtaggaaagagagagagacacagacagagagagagagagggagagttttactccatgagagagaaattgcattatactttgcaaatgtgataatactttcaccctcacaccctcaccagtatattattctctcagcacgattacaggtagaacaatgttcatgatcaggtatagtctctgaatagcttgacttcttgcagtcacctttcccaaataacatctcctggagtttaatatccatatccatttttgcattccacacagagatgatcagtgcatgacagttctgctccagtctcatttctcctgatcttgctttcttatttttcttttttgaggtgatattccacaattctgcctgtgcgtgtcccacagatggatgtataaagactaactcccagaggagttatcaataggctcttttaactgtgtttttgaaagtggttctctccgtatatgagtttgtccaaaatcaaaagcctggttttccttctactgttagtcagtttgatgactgaagggaaagctgcaaaagagagaaaaaagaaaggctaagcttgggcaagggcattcataaagaaatgcagagcaaagaaaaggtcctcggtggccatcttagttcatttggcctgctataacaaaataccataaactgggtggcttataaacaacggaaattaatttcttgtagttctggaggttgagatgtccagtatcaaaatgctggcagattcagtgtctgatgagggttccacttttgggtttatagatagcaccattttgctgtatcctcacgtggtggaagggcaaggcacttctctgaggcctcttttaaaagatcactaattcctttcatgggtggtccacccttaggatctaatcacctcccaaggtctccaccttctaaaatcatcanattggcgattagatattcaacatttgaattttagagaggacacaagcatttagagcattccagtgaccatcaggactgaagaattatcttctcttgctttcaagagcctatcttgtactcattcattcngtaaggtcaaccaggatttatggttgtaagaaggacacactgaggacttggtcacttagagatgggttggttgaaatctaagtaagtcttacaaggtcatcgctcttcaggatcacctgtaagacttgttagacagtagagaggttttggacagggtcaagagcttgaggcctaagatataataaaatatccaaactttcaacaattttataaaagacttatagttattctcatttaatgtagctctgcttttattgatgttttaatacatctgtgtcccggtggcttggctaactgtatttctactttctgatataattaagaatacttattcatatgaaaggctcattttgacaaaatctcagctacttttaaaatgtattatctstgggttgagagtatctttcctttgaaatgacatttttttttcctttggagatctgatgactgatattttttatatcattaggttgagttttgatgaagggagatcttggagcaaatacagtttcacatctattccactttttgtggatggggttctgggtgagcctggagaagagactctcatcatgacgtaagttgaaaagtatgatgtggtccagccttcatagaaaagagtaatccacaaaaatgttttatagctaagcctgtttgatttgcagctgttaggttcaaggttgttgcatcttactgcaagagtgtacagcaaatagggaagaaaaatgtgggcagctattttcttggttctctgatagtttttaggagacccagactgaggcgcttagagaaattagaagtgatgatttcaataggaaataaagctgtacatttaaaacttcagtaataaagaacctggatatgtagaaaatctcaggtatataggaatgagttcgctttaagtcagagcatagtttcatcaaaatgccacaaagcattgtatttttccctggctctttacctaacccaattgtgaggcatattaggaaaatcatgagaacagtctgttattgtgaaattgcatttacactcatttttgtctggaatgtgatgatcattaatttgtgaaagattaatgacgctgcctatgggtttcaatacatggactttgaatttcaagtatgaaactgtgagagttccttcctttggaaaactggacatggaaagtagaaagggaaggttataaagtagttgatctggtcatcaatgaaaactttcaagccaaagtcaatacttggtaagctaattctctcccctaccactactactttttttttttttttttttttttttttttgagacggagtcttactctgtcgcccaggctggagtgcagtggcatgatctcsgctcattgcaggctctgcctcctgggttcatgccattctcctgccttagcctcctgagtagctaggactacaggtgcctgccaccacgcccgggtaatttttttataatttttttttttttttttagtagagacagagtttcaccacgttagccaggatggtctcgatctcctgaccttgtgatccacctgcctcggcctcccaaagtactgggattacaggtgtgagccaccacgcctggcctaccacttctgctttttaatggtagaaaacaacaataaaaatctaatatgcctaatagctacacttttctcaatgagagacgtagctaaattagcaatgcattccataatttgtctttcttcaatttttatattttcaaaacagattttaaaaaactgacccaacaggccacttcatggcttttcttcaaacctatggttggtaattcaaacatctcagtaaatacttaagtctctctgagtaaagagagtagaatgtacagtgtaggaaaccattattagtacttggttctgctgatcactttcactaggggctggtgggaaagtaaaatagcatggaaaccatgggaactatgtacattagcaagataacctagaagtctaatcttggaccacatagaatacagcatttatgattgtttttctcaaccatattttctcaaccaatcctgtggcacaatatgtacaagtgggctcttgaattaaatactctgggtctggttctgcctgttattatgacttgattttgtttttgcaatgttaacaaaactcattgaatctcatattatctatctgcgaagtggatccagtaatagtaccctcctcggccaagtgcggtggctcacacctgtaatctagcactttgggaggccaaggcgggcggatcatgaggtcaggagatcaagaccatcctggccaacatggtggaaccccatctctactaaaaatagaaaaaattagcttggtgtggtggctcgtgcctgtaatcccagctagtcgggaggctgaggcaggagaattgcttgaaccagggagtcaggggttgtagtgagccgagatcgcaccactgcgctccagcctggtgacagagcgagactctgtctcaaaaaaaaaaaaaaagtaccctcttcatgaatgcgttttgaggattaaatgatatgattcatgtaatgtgcttagctcagggtgaacgccccacaaatgctctctgttgttattactcattacattgttatcattgtaattatttttatcaccatgaactctgtagagtgtttggacacttcagccaccgctctgaatggcagctggtcaaagtagattacaagtccatttttgatagacggtgtgccgaagaggactacagaccttggcagctgcacagccaggtaggaggaaaagaactgagactaaggcctgggcaggaagcatgagtggtgttgggggaaagctagttgctaaggtataggaactaggatgctctaggccaaaatgtccatctactgttttcttacacatttgtgttccacagcagtgaayaaactcaccattaatagcttgttgtgaagtcatttctgtttttattgtgctaggatataatgagataaaattcaaatgtgcttggcttaggcttacaamtcaaaatgaaataccagttcagcactcagatccaaacatatttcatctgagaatgtcatatggttgcatggtgggggcagggatgaggaagatatcttcaattttatctagcaatgcaagcagagacataaaataacaaaattatgctgggtgagtgttgccggagaaatccttcttcccctttgccttgattccttggaactatatggtactttttgcctccttgcaaggtacttctggtatgagaatgcagaattattaataggaaactttcatttgtcctggcctctcacatatccagcttatatcaaaatgcttggatggaagtgtctctcccttgatttcccaaggtacaagtcgttccgcagatctctcaaaggatttggtagaagtacctgctgcaaagccatcaccatattcaggcagaaaaacgtcatatacctcaaacctagactaagtaatatatgtaaatgtagatgtataatgaagccagttaaagtgagtttgctcaagaaagacggtgtacagtagataaagcaaaattctactctgatctttcagaaacacaaaaggaggagtgtgtctgatagtgggccctgcgttagctggaaacacccaccctattcagaggcttaacaatagaatcgttcatttacattgctgatattttctcctttgggatgcacaagcattgtgatattcaaagcttttatttattttgtgggaaaacactgaatttagctctctcgcttgtctggtagaggaacattaaaatctgtgctgtaaagttgtgtgggcagaggcataataaatcgaggcaaaatkgatctttatatttcttagcaatgctcctctttcatgccctcataaatgaccaactgtatacatcttttattataggggaattgaacttaattactgcagatttactggcaatacactaggtacaggctgagtctgtgtgtccttcatagcactgcacccaacactttgccaaataaaggcttgataagtgcacacaaaattaaggaygttgtttaataatcttcaatgattgttaggattgcctttatagtcaggttgtataatagggctctagaccgcaaaaggaaaatgttgttagcacaaagagggctaccaaagtttacattacactaagatgtgcaaatgtctccctaaatgtcactcatgtggagcagagaaagtccaagctatgtgcccaagtatctgtgatccttctctgcttacagggggaagcatgtatcatgggagcaaaaaggatatataagaagcgaaaatcagagcggaagtgtatgcaaggaaaatatgcaggagctatggaatctgaaccctgtgtctgcactgaggctgattttgattggtgagcttgtgcaattatctcctggagccatttggtgtatcaaatccacatgggcctgaatgaaagcttagaattgaaataatagtaacatacatagggctaagtggccagcttcatattcttataaaattacctcatagtttactagctatgtgtatgtgtatgtgggataatcaagagtttctttagactgaaagaggactcggaagatggctggtaattatcttcattaccggcagatttggccgggcatggtggctcatgcctgtaatgccagcactttgggaggctgagtggggcagatcacttgaggtcaggagtttgggaccagcctgggaaacatggtaaaaccccgtccctactaaaaatagaaaaattagctgggcatagtggcggacacctgtaatcccagctgctcgggaggctgaagcaggagaatcgcttgaacccaggaggtagagattgcaatgagccacgatcgcgccactgcactccagcatggcgtcagagtgagactatctcaaaaaaaaaaaaaaaaaatgggcagattctttctgtgctgcttcaaacagcaacactggaaacactaagtggactttttagggagcaaacaaacatctatgctcaagatgaaagctttctagaatctaggatttcctgtagtggaataatagccttttaaggcagwaaattttctgtccctgcaagttttcgattcgtagttagctgaccatagcttatgagattcatggaagatgttgctgaactcagagcaaggatggattcaatggcattgcaaatctgtaactcggtgaacgtagtgataaaggagactttttgctttascaggattaagctaatttaaactggagaagtactgagacatttagaggttaaactaaactcagagtgccataaagtccttcttgagacatttgctcagcagaaagctagcttgtgggcactgtgaagcccttggcttgttgtcaatgttaattgttcaggtaaggcttacaaagtattgaggacaagtaggtggtaactcccttgatattttccatctcattttccattgttttcttccctcttctttttggttttcatgtattcgtttatttgtttttaatttagaaaacacaatcgctaaatatgtacatatgtgttaaaaaattaatacttgacmcgyataagaactaaagtcatttttcaacaatttatttctagctgtatagcaacctcaggttacatattgaatcattaaaatatcagtgactgaactgagatactgtgtacatacacatcacatatcttagaaaagttaagccttctcttatggtagacatctggagatattctctgaataaatagtactaagaaggtctgacaagagtggcagccagccgtcagaccagtaacccacagctgtatccccttgttggtgaggacgccaagccaagagcgaatgaagtatctctttgggctcagccagagggcaacagagcttcagttacattggagctcaaatcttcagggagctcaaatcatcgaaatcttcaggggcctccccagtgtgacttctgttttagtcagtgcaatattattacaatgacaaaaatattttatctctgtactaccctttgggactaacatcctgaaatgcattcacagggaaaactaccatgagattttaagtcattcattgcatccctctttctgaagccactgctgcttcttcgtttactgtattcaaggaagatttgcaaaggaagttagcatcttacattagtggtttagcttttgccttaagaaacagccattctttagcaggaggcaaatttattctctggtagaaaaccaaagagaaaaaaaaaaatgagatgagatgagatgtcccaatgtcctgatttctccttgaaacatttgcttctctgggaatcttttctacaggcttcaaagtaagccagtcttttgttgttgttgttgttgttgttgtttttctttttcaattgtaagctagtccagaatgaaaggaataccagataaggaaggcaattagatttctcctctcccgtgtctctcgtgccccttagtcttggcccaatccctgcattcatttgtgattggaatcggctactcatcccaccagctgaaatgcattctgagaagtgggaaatgaatcatgaaggagttcattgtaaggttttctggtccagtgggatttctgtcactgcatgatttctgaaaatatttgggaaggctcatcacaaccttgttggggttctaccggtagctggagtttcggtgattacacctggctgtagtgtaatgaaaggtgattgtcactgagtgtttctccttggtttggccctctcctggacagtcccccaaatgaccttgcctgtccctctccagcattcgtaaagtaacttcctgaagcaaacactggttgtcctataggcagcaattctgaagtcttcctacccatgctgcattgaaccagcaccaaatcctgctggtatgtgcaaaattctaagtaccagctgcctggtgacaggcccctgagctgagcctatttctcccttactgacccttgtgtgccagcatctcacctccattacacagatgggccagttcatactaatgcttgccgattgctgcctgcaatttgtctgtgcatgtggaggtgcaatttgttgtcattctctgtgcccaggttcatctgccagttgccaagaatatcaggcaactcagaggctcctggaagcatgaatgagaggaggctgagagggaagtctttggctatttccgaagtagagagaggatttaaaacagttagtcccaagtggcagcgctaactgcctagtgtgaaacatttccttaggggaatgctcgagacactcctgaaggacatttcctttttggctgtaactttgaagcatatggagtgtacacagagagacctggctcagttctcttggtagatccagatgtcttggaagagcatcccaaagacatcaccagtaatgaggactgtgccacatgtggccgtgttaaactctgcgatgaatttctcaccaagggttgagttccaccacacccgttttctcattacagctttctctgggcccagccacctgtattgtgtatcgttctaatgagagcacaatctactctctcagcttgagagtgtttaaatggaatgaccagttgtgtaggatattttcctgaataattaattgatagatattctatgaaaaaagttctatttttgagaagtcattgattcagggaatgcttgtgtttttttttttgtttttatttttgtttgttatgactaattgattagtgtrgaacttggctgtggactgaygtagaattgttttcagtaattttgccaccwagtgaaaggtttttctcggctctttcctaacagcgactatggttatgagcgacacagcaatggccagtgcctgccggcattttggttcaatccatcctctctgtcaaaggattgcagcttgggacagagttacctcaatagtactgggtaagtgtctggagtagtgaccttgagaggccaacctttgctgcctttcagcacgtgttatactgacagaattacttctgatcaaggaccaagcatatttccttacagcacaatgtaattgcttttgttcattttaacaatgaagcacaactttgcactaatagtgcaagtttcatgtgagaataagattccagttgcaaattgaaaaaagagaaatgtttcttgattgaagatcacaatgatgatattaaaagtgtcttcattttctcgacactttgttttcaagctatttaatcctgtgaagttaccttttaccgtcattgtrtccatgatgaggaaggccaaatagatatttaatatttgcattttctgttttatagatgtggaacctggaatcacaaaaggaactcactgacttttcaaaagtatactagtgttaatacgaatgtattttgctttctctttatgttcagtcttgacacatttaaacatgcattctgacctttgtaaatccagaatcacattctgaaatttggtatttaatattctgtgtcatggggcttatgcaatattatttaagaaataccataataaggaaaaaaaatcataaatttgtctcaaatgtagtaggtatctataaactttaaaatagtgtgtagaacctatttaaattctgattcaaacaaatgatctgtaaaaaggcacatttgagccattgaggaaaattgaacatatactaattcaggtaatgtattagttagggctttccagagaaacaaaaccaataggatgtatatttatttagaaagagatttattggccaggagcagtggctcacgcctgtagtcccagcactgcactttgggaggctaaggtgggcggatcacttgaggtcaggagtgtgagagcagcctggccaacatggtgaaaccccatctctactaaaaatacaaaaaaaaaaaaaattaactgcacatggtggtgtgcgcctgtagtctcagacactcaggaggctgaggcaggaaaatcacttgaacccaggaggcagaggttgcagtgagccgggattgcaccactgcactccagcctgggtgaccgagtaagactctgtctcaagaaaaaaaaaaaaaaaaagagagagatttattgtaaagaattggctcattcgattatggaggtaggtgggtcccaagatctgcagggtaagtcagcaagctggagacccaggagagctgacagtatagttgtagttcgaatctgaaggcctgaaaccatagaaccaatgttgtagttctagtccaaaggccagcagacctgagacccaggaagagcctatctttcggttcaagaccgaaggcaggaaaagaggccagtgttccaatatgaatgccatcaggcagaaggaattctctcttactttgggaactgtcaacctgctgaattcaggccttcagctgattggatgaggcccaccctcactagagaagtcaatctgctttactcagtctactgacttaaatgttaatctcatttaaaaatacatagaagtggccgggtgcagtggctcacgcctgtaatctcagcatttcgggagggtgaggtgggcggatcacaaggtcaggagatcgagaccatcctggctaacatggtgaaaacctgtctctactaaaaatacaaaaaattagccaggtgtggtggtgggtgcctgtagtcccagctacttgggaggctgaggcaggagaatggcgtgaacccaggggaggcagagcttacagtgagctgaaatcgtgccactgcactccagcctgggcggcagagtgagactctgtctcaaaacaaacaaacaaacaaaaaacccacagaagtgtaacatttgaccaaatatctgggcatactatggcgcagtcaagttcgcatattaagttacccatcataggtgatattaaagaattatatatttaggcatgataaagtcattttggttaggctaagaaaaaaataagtcttattttttagagatacatatttttgtgagttttgttttaatgtgttaaaaagcagataagtattgataatttttggagatgggtaatgagtacatgggaatttattacattacttttcttcatgcatatttgaaagttctgataataaaaagttaaaaagaagctattgtggtagcacatgcctatagtccctgctactcaggaggctgaagtggaaggatcgtttgggtccaggagttcaaggccaccctggacaacatagggaaacccccatctattaaaaaaaaaaaaaaagagagagagaaaaaaaaagggaaggaagaaggagaaaggagaagtaaggagataggaaccttaccaatcagccagttttacttgacaaagccccttctcctttcttgagccagctacagtacagagaatccacttgagggggtgagacttccatttatgtactctgtatttgaaattttaaatgtgtttaatttttataaaagattatcaaaataatagatactattcttttcaaggaaggaaaacacatagaaaaggattgtaatgattcctatttctgatgttagggattcctagaacctttgaataaaggaataagctatgatttttttgaatgataacacgacatccaaggaaatataaataacacttttatagcaatgggtcagtgaggtcttagcatagtaccatggaggaaaaaaatgaaaaggttaataaaataactaaacttaatggggaaggaatgcaaaagacaggagttttattacttgctggtactagcatgtttagatactgtaaagggcattggaaacccctcaagctaatttaagaattgatttttttttttaaccagctcaatcagtcaaggaagttatattagtctgtctttggtattgatgataggaggctgaaacacagagggatcaaattgttccagatgctactcaatcatagaccaaggctgaatgatacctgtgacccctcactcttcagttcattgagatcttttttttcctctttgtttttgagatggagtctcactctgttacccaggctggagtgcagtggcacgatctcggctcactgcaacctccgcctcccaggttcacgccattctcctgcctcagcttcccgagtagctgggactacaggcacccgccaccaagcccagctaatgttttgtatttttactagagatggggtttcaccatagtagccaggatggtcttgatctcctgacctcgtgatccacctgcctcagcctcmcaaagtgctgggattacaggcatgagccaccgcgcctggcccatctgagatcttataaattctgactaacatcaaataaaacatcagtgacgattaagtaattttatattcaaaaagaataccatctatgccatataaaattaaaatcataatgtcaattaaaatgtgacttagcaataagcatccaggtatataaatgttggtcaatgcagttgttatgtttagtagtcacgaaattacaacactaccttctaggactccaccttaactctcaggggcctgttcatttctgtgggtattacacgatagcatctgaccccaaatgatttttgttaagttgccacgtccactggtttcgtctgttccgtttaaagattttgcagaaaagcatcagcattggtgagcaagctagtgtaaagagaacatatgataaataccagccatcagcgggtatggtaaatgtcctgctctcataagtaagatgctcacaggtggaggagtgaatacccaaatagggtcttatacactaaagtcacgggagtggttgtcaataataaccccactgatcagcatgttgtctaagctacacattttgcattaggaacacgaagacccttagctgggacaaaggcctgaaatcatctacaaagaaggcctcacaccactgaattcacattagcagtgtctgtagccaactcaagagttggcaagaggtaaaatgttggtgaacttggaaaagatggaaaagaactttctgcctcccttaatgtcacttcagcccctcaccacagatgtcatttggctatgtgttgattcagtggtattttataagcagattcagtatataatcttgtagccactaataatgctgacactatacatttagatttttacttaaaaaatatttagttacaaaataaatgtgtatgttttatatgtttaaaagccaatttacatcatcatcccaatcctggccccctttccccacacaactgtgatctgtttgatatgcatacttctaaatacttgtctttgcatttgctagtaaatacttgtcccaagagaaaatacacaaattaatttgggaggttgtttttatatgtgatttcctactagatacattgttcttctattttcctttttcattcaaaaatatgtcttaaacatctttctaagccagagtatataagggcactttctcatttctttaatttcatagtattaagtattattataatattatcagttatccttcttccatggatgtttgggttattttgttttttctgccactataaataatgctgcagttaatattctcatcccataaaacttgttatacaaataatacaaagataattaagtctcttttggcaattggaggtgtttctgttagctcataatgcaaattccactcagccaactgggtacgtctcagacctgggtatcagacattgccacatctctcccttgtaagggttaaaacactggcttcctgctcatgggctgcctgtgagtcccaaaaattagagattcatttgtattaagtgccgtcctcctttaaaattcaaatgccagtggattctgtaaaggaaagctgaggggaaggagaagtaggatttagccaaattaataaggtgaggaaggtcatttcatgcaaaaagaacaagaaatgatcctggggaagggccacaatagtagttttctcaaggacaagcccagatgccaatgcctgcatgcttatagagttaagcagccactgggaaccctgtgtccagtgccattttaagccatccatggtcacctcatgctcagtcagtgcagaatctgtattagcctcagggctgggatgaagtgcaaaggaatcgcaagtgtagggctggccagagagtgagccccttcataaatgttgctccctgggcacctcatttgtctcacacttttcttacagcatagctcatgatacagacatgcagtgggaaaatgaattaagtggggtgaatgaccaaacctcccagcatcacctttctgagagtttatttggaagcatgcaggaaatcattcctttaaaaaaaaaaagttcttaaataactcactttataaatgtctatggttactttcactgtcagcttattaccctgtgtatatggcagtgttctcaggtttacctgcttctccatgatggggaaatcctggcatcggtyattattgtgcccaataaaatgctattttgatgagatgccaaaatatttatcatctttactatgtagaagtgaatggttgcacaatttttgttttagttgctggctaggacttagaaaggatggatggaataaaaagtgaacttggtgcagaatgtccctccaggtggctgtaaccaccagtcctgctccttggtccagtggcgtcagggtttctcatacccacacagtggaacagtagagcctgctgtgttctccacgattggctccctgcctctattcagcctctgtcctcacagcttctacatgtcatttgacatgaaggtggaaagcaaggaggctggtactggggccttagcctgttagggattgagagtgaaatacaattggggatgttttgttcggtgaaaaagtgagtaattggaatgaaacaattaaggatgttcaatctaacctctgccatttactgttatgtttagtaagtgactttgtttccttgaccttagttccttaacctataacattttgctatttgccttcagaatttgattaaatgtcacactgtatgtaaagcatgtagcacaatgcctagcacatagtcatcaccttacaaaatgtgtgtcatcaccaatagttattgtctgaagactcctctagagtaaagaaagaagggaaaaaacttacttttattatgaatccacagtccagacatgtatttgatgtttaattgtcactgcagtaataatatctgagacatatttaatgtaagtctctgttttctcatttgtaaaacaaaaatagtaacctatgcggctcataaagttacataattagaaagtgatgaaagcactgtacaccaaagcacgtctgtccctttatgccactcaggccagataatgtgtttagctgattactgaacgagttccttttgctcaaataaaatgaaagcagtattcatttgtattttatttcatgttagtgccgaaataaccccaaatttattcctctttgtttctctttcggtatctataaatatctcagtatgcacatccacaagcacaagctcattcagtgatacttatatatggttaaatcttgtttatactgttttggaaccggggagcatactgcaaaatttaagttgctaaattaactagcatgttacttgtttcatgccagtggtaaaagattctgtwaatataaaataaagtgggcagtgggttggtttattctaagaaaccaagataatcttctcaagggaaagatttcttcctgctattaagctggagatatttctagaggtgctttataaagtacgtttagaaatttctatctgtagagtttctttataggggccattaattcctcatggaagaaggtacaaagacagttcttactgctcttcagggttagtttctcaatatgcaatggggacttttttttttttttttgagacggagtctcactctattgcccaagatggagtgcagtggcgtgatctcagctcactgcaacctctgcctcctggattcaagagattccaatggggatatttatacaataaagacatttttaaaaagtttaagttaggtatctatttacaaatatacagtgggtccaagaaaaaatacacacataaattctagcaaaatagttatgtttatactatcaagatacatttggaatgttttaaaagatgctttttataaataacttttggtgtttcatttcacagtagagtgactatagttaataatagcatgttgtggatttcaaaatagccagaagagagaagtttgaatattctcaccacaaagaaaggataaatgtttgaggtgatggatatgatggatttaatcattacacaatgtatatatgtatcaaaacatcacactgtaccttataaatatgtataatatgtcaattaaaaataaaaacttgaaaacttcctctctacataagccataaaacacttagattctgctaacctgccacttcctggatttgctatttccagtgtctctggagctttggtcttttccaggtgattctgttttggttgccttgtgggggttttgatgtttggtctgatctcctctcaaggatacttttcagtgtgcgtcaaggagaataattggccctaaaaatggtgcatgtgtttaaagtccacaaaaaggcaatcacttgcattatttacagactcatcactgcaggggcctctgtagctgttttctagccaagaaccatacagcctcactgcacacactcaataattgttggttgctacagagtcaactttctgaagaaaactttcttaagaaaacctttcttaaatgaggttttccatcttttcatgcatgacactggggttgggaaatgaaggaaaaggtgaatatcactgtacatggagacttgctttctcacatggcgattcttgcccacatcaatggccttggcattaacaattcttatcctggtgctatggtacagtggcaagagaacaccagacttagtccagagtcccagacgtgccagtcatcccctgtgtgaggtgcaactctctaaactgtgtttccttttccttatgtgaaaagcaaaaggatagtgttggatgatcttagagaccccttcaagctttaacatttccatgaccaattgaaaggattcaatattagaattccttggactgtaggccctcaaaagatagaaaacaaattcatattaacttagtcgtacaactggtaggctcagatagtggattctgtgagccattctcaatcagtatgattctcgatattaagtgatttagtgaagtgtgtgtggccatatgtcccagttcaccatttcatcaagctcatgttcaaaatgaagtcacattcctattactattcaaattaaatgacgtctgcttccatcctgcttaatgcaagagaagctttcttctttttacctggtcttctgtcttatgcctatccgctaatttctaggtctgtttactccattgaggggaatagtccaaagagctgttgccttgaagagagaaacttggaaagcctgcttagccagccatggaagtctattcctgattgctgatgctatggctgctacataagattattgttgatatgtggacacattgtcactcctgagcatactttgtcacatgggatcccagttaaagaataaatgaccattttggggctgcctgtgtctattgatgaagagtcacaatggttaatatacagccaccaatgaggtctgtcagcctggaagtctggtataatccctattctggtatatataataggagatcaggaaatctaggctgccaccactactgctttttcagaagcagtttctctggatgcaggggtagaagaatctctctctaccctaattgttaagccatgccatcgtagccctgtatcttcatgtgagagatctatagttacatagctcttttaatttacacacatgaacataacacatatagctgttttgtcattgcacacctacattactaaggtggtggatttggaagattttaagtcttagccacatactctatcaagaattagcccccttctccatccccaaggcttccttcatttcctgcttcattaagcctagtgtcattgtaacaaggcagtattttcccttgaaagcaaatgcacatagcacaagccaagaaattaaactatttatgctttttttttattgtgagtgcaaatgaggaccaccgttgctcaatgacagtaacaccccctggggtacaagaagacctagagttccagtttcaccttggttgcatgtgataactaccgtgacaaaagggaagaggaggtttcacaaaaagcatgattttgaagctgatttttttttttttaaggatgagtagaagtttgccagtaggaaagagcatcccgggcagaatgaacagcacaggcaaaagaaggcatttagtatacagaatggcttggttcagggcgcatgtcaggccatggatgatgctagaaaaatgcattgaggtcaggtcgtggatctttactttaaacctgaactttactctttagaataagcccatgggaaattttgaatgattttaagaaaggaattgacataattggatttcatcttaagacgaccttggcaataagaacgtcacttttattttgggggaacttgaaatatcatagcaagttaatatttgatacttaaatacttttttctaactttttatattttaatatttattaacgttctaaatgtgctgaaatctatgctaagcccttttcaatgcattgtctcatttaatcttcccaagaactttaggaaaagattccataattatccctaatttgtaggcaaagaatcaaagatttgagagaggatgggtaaattgcccaaattcatagagtaagagaatgaatttaaactccgacaatttggttctacaacactagttttaaccttcaggtcagtagtgtttatttattttcttgaaaaaaatacacacacacacacacacacacacacatatagtgttatatatttttgagatatataatatatatttattatatatattatttcaataccttttggagtacaagtggtcttcggttacatggatggattgtgtagtgatgaagcctgagattttagtgcatccgtcatctgagtagcatacattgtatccaatatgtagttttttctctgtcaccctccttcctccctcaccctttctgactctccaaagttcattataccactctctatgcctttgtgtacccatagcttagctcccacttataggtaacaacatgtggtatttgattttccattcctgagttacttcatatagaataatggcctccagctccatccaagttgctgcaaaagacattatttcattctttttttatgactgagtagtattccatggtgtatgtacaccacatttcctttatccactcatcagctgataggcacttaagttggttccatatctttgcaattgtgaattgtgctgtgataagcatacatgtacaggtgtctttttgctataatgacttcttttccttttggtagatgcccagtagtgggattgcgggattgaatggtagatctaattttagttatttaagaaatctccattctgctttccatagacgtggtactaatttgtactaatctacattcctaccccatatataagcgttctcttttcagcacatccacaccaacatctattgtttttgacttcttaaatttgtagtctttaaccttggctgcaaactagcatcaccaggggaacctaaaaacaaaaacaaactgatccccataattctcaattaaatcagcatttctgtttgcagagcctgrgtatccatctattttaaaagtacccccagctaattccaaagggtagacggggttgagatctactaagctactaagctactgtcaccttagtatacactgaatactcaaaaacatctgtatcttgccatcaccacctcaaaatgtcaaaaaaaaaaaacctactaaatagaaaagtcacagattacaaagacttttaatgcttccttccagttttactttcacaaagaaaaatattgccttcatcttttttcttttcttttttctttttttgagaaagaatctcgctcgggagtgcagtggtgcaatctcagctcactgcaagctccgcctcccaggttcacaccattctcctgcctcagcctcccgagtagagtagctgggactacaggcgcccgccagcaagccyggctaatttttttgtatttttagtagagacaaggtttcactgtgttagccaggatggtctcgatctcctgacctcatgatctgctcacctcggcctcccaaagtcctgggattgcaggcatgagccatcatgcccagcctattgccttcatcttttttaagacttccaggtagcaaagaagcaaagtcaaagagggtaggggcaaaaaggaaaatgtgacagaagcatatcaaaatagggaggaagagaatagctaaaaattggggttgttggagtagtaagatcctatctactggtgagccatcggtaatatcaaaggcacatttgcagaatgtttccttttcagtaattgtacaaagactcccttgccattacaaagcacttttcttcttggcagattgaagaatgctttaccaactaaatgcatcccagtaatattcagagcgcaggtccaacataatcataagttgccttgttattacggaggtagcagccccatttaataacatattaaatgcattattcatttatgtaactcagacccagggacagctgctgggatgaaaatagaaccattctgtaatgcaaaaagcaggtgtgtgcttacttgagtaaatgaactctgtattacggcacaattttcttctaaatttcagggacaggtctggtagggctaatgtgatgccattttcatacaggaaataaaatggtttcagaatggtttttaatgagcatttaaaaaaattaccaacagccttttctgtggcatagtcccggggggatggattcgtgctttggatttaagcagaactcctgttattgcaggattcaggaaagcctaaggtaatgattgatcagaacagtgacaaacaaaagaatattctctagctgatgatgctagtggtgatggtgaaccagtgtttctatagctgyccaccaagagagaatcacaggtgtgcttggatgttgagtgattaaaaatcataacctgacttcagtttgcacagtgccttgcctctgaaacctgtagacagtctctgatgcatggtgaaactcactgagatgccacaattaacctgggtgacatcactggtcatttttttgctactattgctggtaccaggatgctatcatacaccagtgtctgcattttgtgttttatttccttctctctctcacctgcccttattttctcttttacatatacttaaaagcaactacaaaggatttttaaaaaaataaatatcagatgaggccaggcgtggtggctcatgtctttagtcagcactttgggaggctgaggtgggcagatccctggaagccaggagtttgagaccagcctggccaatatggtgaaatgccatctctactaaaaatacaaaaattagccattcgtggtggyacatgcctgtaatcccagctacttggatggctgaggcgagagaatcgcttgaacccaggaggtggaagctgcagtgagccataataaagccgcagtgagccaagtaaagcctgggcaacagagcgagactgtctcaaacaaaaaaaaaaaatcagatggaatgatgttcaaattgcttaggcataacaatgaccaaccagcatgggcagttatcttatgtctggagcggagttttggtgaccccctcataggctaggtgttaacccataagtttcctaattgtgagaagcaaggactctaaggacagggatcagcatagctgggttggtaagtgagatgcttggagggtttggggatgtggtaataaccaattattatgcagatatttccacatttaaactggtacagttactggtatggacctcctgattaccagctttgaatatctggaacacaaggaggccctcaaggagcttgaatttcacacagtcacaccaggaagaaaatcatacaaggtataaagaattcctatcaagtaaatcgtaaggattcttttaagggtttagaggagggataatcttactccatttaaagtagcagtgcagtagtaaagaggggatgtgtgctagagacaaattgtctaggtcctggctatttgatcttgagaaaactagttgacacctatgaatctcaattcttccatctgtttattgggaataattacatcttccttattatggatacttctgaagataaatgagttaatttatgtaaagaacttagcacaataactaggacatagtaagcactctctaaatatgaaattcctgccattttactcttatattcagggaaattgtcttagagaagacaagaagtaagctgtaccttaaagggtgggcaaattttaggcagctgctagggcatgcaggaggacactgaagcagaaagagagagaggaaaacagaagtactctcaagaagattaaaaagagaatggacatgggcttatgagggagaaagagtccaggaaagcagaataaaattagctagtgcagggcttcatgcccaggcctacagaatttacagctatcctaaggtcatatgaagtccatgaaggttttgaacagagaagaaaaatagtaataatattaaatagaaataattggtaatattttatgagcacttgcagagtattaggatacttttaagtactctgtgtacattaacccatttaattcttacatttaacatatgagataagcattaataattgacattgtagtgatctatagtgttcaaagtacttttccagacagtatctcctttgactttctcacagaggaaaggacattcactagacttaaacgcattggaaaactatgccagttttgtaaataaaggttttctggaatccagctgcatacattcttttatgtgttgtctgtgttcaccttcatacagtaagtgcagagwtaagtagttgtgacaaagtctacataacctgcaaaactgaaacattcactatctggctgtttatataaaaagtttgctgacctctggtctagaagagtggaaagtaagctttgattgcatcttatttgggctctaccactaactctaggcaaataaacttgggaaatcaaatatatacatacataaagtggttgctgcagacccaacagtataaaacgataatggctagataacgctgaacctcaaaaatcttaaaggtttgtcatcctaaaattgtacattttaattttctatgaatctgataaattatataggttaattytgtagaataattttccctgttaaagctaaaacaagaaataagcaaaagagcatcartctgcaaaaactgaagtctctttaatgtgaggtttgatcatttagccagtataacctctcatgaaagactgagtagaaatatccagtttagccagtgttttctgtgctacaccattactgtagcagtctctatgagatctgtgaatgttgagtcatatatctatcataatctattttttctctgaattgtaaattcctttgcgatatttattactcattctagtccttaattatatagcctttgaattatctcctagattagccatctatgtctctccaactagcttataaacttagtgagagtaggggctatatcttctatttctgtgcatttcccacaacttcaaaatgaagtgattcattaatttaatagatgaataaaactcagttacaatgctagtaatagatacaatgtgtgaccatgattatctctctgttgggtgctttatatgaattaaccctactcctcatagtagcatgaaagatggttaggtgcttactgatggtcctcagggctaggcactatgtctaattttaaaaagtgggaatgattcacattataatgagctggtttacgacttgagctttttyccatttaggtacaggaaggtggtttccaataattgcactgatggcgtaagggaacagtacactgccaaacmgcagaagtgcccagggaaagccccgcgggggctrcggatagtcacggctgatggaaagctgacagcggaacaaggacacaacgtcactctcatggtgcaattagaagaggtaggactgattcctatctcccccctactttctagggccagtgatttttcttaataaaccatggttttgtttccatatctttttcaactttctccattttagatgctatttaaaaatttttattttacttttagttccttgtttttcttttattatcacttcaccttccctgatctatttctttaattacttacatttcactgcaagttattcttcactcatacttaatctcttactcttggaggatctgttggatttaatcttgccttattggcacttttagcaaaatccattttctcagaatacataaataacattcctgaaataatttaatacgtacatatactaaactaacctaagagatgctaatactttcatcccctctcagcctgcagggttttcttttccaagggcaacacratggtcatgcatatagcactgaggccaatgtaaacataattgagtgtaatttctttggcagttaagagtttgtattgtgtagcacctcagggatatcattaaaagcatacattattatttgccagattatggttgtctgaaatgtctgaaatttatatggtggataagatgaaatttatcttatatattttagaacatacacaggaattctgtcatcttgtaaatggggaagatggtctccaaaggataagtacttacattaaatcatctcgattattaaaccaaacagtcctgtcctcagtcacgttttctgggtacctaattatggttatcattgtgtaaagctctgtaaatatgaaggaattttaaaggctaacaatgacacccaggattaaaatacataacattgacttccaacttcctctgctgatagtccagggaccctcagtttttaccatgtataagaaaatcacctggagagcatttggaaacacagttttcttggccacatccttaaagattctgattcagtaggttggagtagggcccaagaatatacatttctaacaagttcacaggttgtgcattgtgcattgtgcttcaagaaaaacaaaacagtggcaaggctggggtatagagaagtcggaggctctggagtgtgacaagaaggtggaaagatgaagcaattatgattgctttgtcaggtttgatgaaaatttttagtattttgattctcataggaaaaataactgtgaaataacgagtttgaaatctagctcaaacgatgtgcatatctctggtccaagggccatttacagactgtgtaaccccatactcctttcctgattatctccttgatgtgtgcctctcaattatatccaatcttctaaatactaagatgcccaaaaattcttcagttggaactagaaaaacacaggccaatttaggcaaattggagttgctcatatttcacataaataaactctggaggtttctgcttgagactatgacagattagcctgcagtaaaccaaatatatgcgtatatatttagagcaagagggacagagagagagagaagaagaagaaaaatgaagaggaggaaaaggaggactaggagttaagagaactatcaggaggattgagaagctaaaattcctttcttaagagatgggaaattgactgcagtgagtccaacattttatgctatattttcctttcgagaactttagcaatttatatgccacactatagaggaggttcagatttcagatttccagtaaaaggccgagtagaaagtgttggctaaacaggtgttaataaactcacaaggcttgggagataaaaattggactttgaggatattccaaagctaggactgatgaggtcatgtcccaggsagaaggaaagcacagggaagcagcacacatacagggcctttttcctccctgaggtatttcataatacccaagtaacacaggaaacatagaaagcactcaataagaggctgagaagttaaaggttttagaagtatcacccttcggggagataaagatttgaattcaagacctatcaaggaggagggccctggtgaactatctgagacttggttcttggaacttctggaaatctctatcctaggagtgaaggcaaacccaaattagaacaagccctctgtacccagaaatccaatctgaaatcacttcagtctctgaatcgattagagtgactctcttcaactctaaaatgattgttagaaaccaaagtaaaccttctttagtggaaaataacataaaccagagctttacctaatatttttcatataaaatgttgggcatttagaaatatccaagtatatcaagatataggaccaagaggggggaaaaacagaaaagaacaacagttggatgatatatagtgtttatttaagatatcctgtaaaacaacaatgattatwatgttcatgaatgtgagaaaaggtggaaaattgaaccccagagtggtaatcaataagaaataccaaatagaaattgtaaaaataaagatataataactgatattaagaacttaggtttacaggaaattgaacccatatgaatagaagttaaatggaagaaaggacagcaggaaataygccatctagagcataaaagaaagaaatagaatatagagaaaaaacagtaagagacaaatggaaaatgataaaaaggtctaacacagatgcaattgtagcctcagaaggagaggagagagataaggaacctgaatcatttttgaaaagatcagggctgagaattttccaagcctgatgaaagatatcaacatattaacctatagatttaacagaatcagcaaactcaagaagaatatgtgcaaagaaaaatcactgagctattacattcaaactgctgaaatctaaaatcaaacagaggtgtttaaaaagtccagaagaaaatggaatgacacctttgaagagctgcagaaaacacaaatagttttttagataaacaataatagagatattgaaacaagaaatgttcccttgtccccctaacaggcgtgtgatgggggtgttgctcgcttcttcagtgtcccactgctcaaacctctaggggagcatacaggggcaggctgcagggctctgaccccacagcagtgtctaggggtgaatgtttacagctcctgaagccccagtaggcgtttgctaccatgtgctctttctgttttgcggtctgtagacagcttgtcttaaccagctcaattagaccttctaccttgtcgcaaggacagacggctttctgtatcccgggttcttaccttggtgcactggaagaatcggatcacacctgggcttggagagtgagtgcaaggttttattgagcggaggtagctctcagcagatggaggaagccagaaggggatggagtgggaaggttttccactggagtccggccactcagtgccccagctaaactccgtataggatagttctcctggtcggtggcctgctggcatgctggtgcctgtcggtgcattcctctccatgtccatctgcctgtgtgtctgcttgctagggtgtcaggggtttttataggcacaggatgggggcagggcaggctagggtggtcttgggaaacacaacatttgggtgcaaaggcaggagggcctgttctcacctaggtcccagggcaggggcccaggggtggagccctagccagggaccaacgcccttcccccacttctgtatcatttaaagggaccattcccttccctttccagcacttccttccatagcaatatctgtcatgtaaaccaatgtctataaaaagaaatgctaaaaataattcttcacacataaagaaaatgacccagacagagacacacacacaaaataatagaaggaatgaagagcaagaaagggggtaaattgaaattaataataactgtgcagaccaagaatgataatcagctgtgggatttaaaatatatgtagcattaaaatacatcagaataatagcacagtatgtggagcgaattaagtggagttaaagtagtttaaggttcatgatatatctataaagagataaaaatactaatatatattagactccaacgtatccaaaatgtgtgcttcaatatctagagtaacaactgaagaagtagtaagagaatcttatcatcaagctactgacaggggaattacagtaactttaaaagggtttcattaatccaaagtaagacaagtaaaagagaaaaaaaagaatataatacagttgagacaaatagaaaacaaatactaaaatggtagatataggaatggtgcggtggatcccaacattttgggaggccaaggtgggaggatcatttgagtccaggagtttgagaccagcttggacaactaccaaaaaaataaaaataattaaaaaaaatagccaggcgtggtgtcgtgtgtctgtggtcccagctacttgggaggctaaggtgagagaatcacttgagcacaggagttcaaagctacagtcaaccataattgcgccacagcactccagcctggctgacagagcgagaccctgtctcaaacacattaaaattaaaattaaaaaacggtagatatatactcaaatatcagtaattatattttgaaaattagtgatttttgtcacttcagtgctttttgtcaggcttaagaagtctttatctaaaccaacattgtgaaaaaagtcataccacaagatttctctttaggtttcacattaatgtgtatgatttatcttgaataaagctctttcaggtttctatatttcatccacatgcatatccaattgtcccaataccattgaaaaactgttcatttcacgctgaattgctatgagcctttgtcataaatcaattgactatttgtggttccatttctaggcactctattctgttcccttgtgaatttaaaacctatcttaattactaatttcaaacacatgatattttcactagagttagggtgagtcttgatacctggacatataaatcctctacacaagtagaaaattgtgtgtgtgtgtgtgtgtgtgtgtgtgtgtgtgtgtgtaaaatttataatagcatcaaaatacaacaaacatttatactcaaatctaaaaacttattttcaatrgcactacccagaaaacaacacaaatttggaaataaattttgaaaaatacctgaatgaatggagggatgcatcctgatcatggattggaagactcagtattataaaaagacatcaattttcttcatattgacttgaattaaaagcaatctgaataaaaatctccagcatgttttgtgtattaaaattgacaagatcacaaaatttacacaaaatttcaagacctgaagaatagcaaagatacttttgaaggtgactcacaaatttggatgactgacattaccrtatatatatatatatatatatatatatycacatacaaacacacatatatatacatatatatgtatgtatatcataaacaagctgaacaaggagagtcaagaaacatatatacrtgcatatattatatatatatagacacacacccacccactttatgacaaatgagacactgcagtacagtggagaaattataatcttttcaatacatgggtgctacaattttgaatatccatatgggaatacatgaatctttatctcacataatatacaaacataattataactggattgtcaatcaaaatttgaaagctaatactaacatttatgtatttatttattttttttgagtctcactctgtcgcccaggctggagtgcagtggcaagatctcagctcaaccgcaacctctgcctcctggggtcaagcgattctcctgcctcagtctcccgagtagctggaactacaggggcatgccaccacacccagctaatttttgtatttttagtagagacggggtctcaccatgttggtcaggctcgtctcgaactcctaaactcaagtgatcctcccaccttggcctcccaaagtgctgggataacaagcgtgagccaccgtgcccaacaatactaacatttctaaaagaaagcacagaagagtatcttcatgaccttgtgttatgcaaagacttttttaaaacagcaaagaaaacccatttagtataaaggaattataccaacaaatctctttataattatactaattttatttttatttttatttttttgagatggagtctacctttgtcacccagactgaagtgcaagtggcatgatcttggccgcctcccaggtttaagcgattctcctgcctcaccctcctgagtagctgggattacaggtgccagctaccacacccagctaatttttgtatttttagtagagacaaggtttcaccatgttggtcaggctggtcttgaactcgtgacctcaagtgatctgcccacctaagcctctcaaagtgctgggatttacaagcgtgagctaccacgcccagcctaattatactaattttaaataggactacattaaaattaagaatttctgttatttaaggcattatttcaaaaataaaaaattaagtcctagaggggagaaaggtatctataataatacgttttcaataagctattattattaaattaagccctagagggaaaaaagtatttgtaataataccttattgaaaaggtattattacagtaataaaataataaaattattttgttatgttttttattatttttattatgcaaaataaacataattttaatgagggaatcataattagaagagtataaataaattctacaaactaataagggaaacactggtaactcaacagaaaatgcacaaatgactcagaataaccaaatagccaataagcatatgaaaaaattcggaacatccctatgtaatgcaacttaatttataataatatatcactgtgcaccatcagaaggtttacattttaaaagactaataataggctgggtgcagtggcttacacctgtaatcccagcactttgggaggccaaggtgggcagatcacttgaagtcaggagttcaagaccagcctggccaacatggcgaaaccccatctctactaaaaatacaaacaaacaaaaaacagctacaaacaaaatgagctgggcatggtggcacgtgcccgtagtcccagctacttgggaagctgaggcaggagaatcgcctgaacctaggaggtgaaggttgcagtgagctgagattgcactactacactccagcctggttgacaaagtgagactccctctcaaaaaaaaaaaaaataataagacaccctctcaaaaaaaaaaaaatgctaataatatcaggtgttattgagtatgtggagcatctggtcattcatataatgctatttggagtgtagatacatactgccatttgggacttgtttgacattaactgctctagctgaacatgtataccacctatgtcccagcgtttccacttttaagtatatactcatcagaaatgcatacacatatgcaccagaatgtatgtaagataatatgcattgcaaaagtattcgtaagagccctcactggaaacaatctaaacattcatgaatagtagaatacataaactacagtatatttacagaatggaatgtcatacagcaatgaaaaagagcaaactaaagctatatgcaaaaaacttggataaatgtcatatccattattgagctaaagaagtcagactaaaaagaatatatgttgcattattccatttaattaaaatgcaaaaatagtcaaagctgttaataattcatggtggccgggtgtggtggctcacacttgtaatcctggcactttgggaggccaaggcgggcagaacacaaggtcaggagtttgagaccagcctagccatcacagtgaaaccccgtctctactaaaaatacagaaattagctgggcgtggtggtgggcacctgtaatcccagctacttgggaggttgaggcaggagaattgcttgaacctgggaggcggaggttgcagtgagctgagatcacactactgcaccccagcctgggtgacaagagctagactccgtctcaataataataataattattattattattcatggtaatagaagggaaaaattattgttaactttggaggcggagtgattggagaactttgagtgtactggcagttttcagttggttcatctgggcagcagctaatggatgcattcactttgtaaaaatcaagttgtatatttagtgatttgtacatttttaatgtatattttactcaacaaaaagcttacttaaaaatcatttcagaaatccatataaaatatagtactttatatctaggtatttgggcaaaaaaaggaaaaataagaaaaacctttctggtatgcttagggccgaccttccaccctgtgtttacctgcaaggtgaatgtgaaagttctcttcccagagacatgagacacctgatcctgatacccagagaactgtcatcttttgaagcagcagatgtttatactatagcagagttcagaaagtttttccrtttctaagaacacaatatagcaagatctgaaacaagaactttcacttctgattagctccaacctttgtgcaaatgatagagaacacacttcagggacagaggcctggttctcatctgttcaactctgctttccatgtaataaagatcatcatcaggcatctcacactgggttgagtgatgtgggaacagattggggaatctggttcgaagatatgtgaattcatgccttctgggcacaagaaggaaaaaagataacaagtcagttcactccacttgagtgggcaaagcttcaacagcagggatgaaatctgctgcctccagctgtcagatctggtttcttgacactctgttctcctggtgcagagcaccaagccaagagcatcttctttatatcaggaggccctgaggacctcacatgtgattgtgagatgctgtgctaatgattcagactcctccttgcagaaaaagaccctcaatttctctatgaccctctggattatatacgtaggcacgggaggtgcacgtgattggcaatgcagaatgaagagacacagagtgtctctgaaaagctgaggagaattgacacttgacacaatgataataatgtgattatccaacatttattgagcaccactgttccagtttgtgagtgcttttcatgaattatctcacgtagatcttacagcaactctatgcaaataggtgttattgtcattttgttgtcattttatatgaggcacagaaaggcaagtaacttacctgagatcacacaaatgctaactattagagcctagggtctaatccaggatctatggtatcttgtctttctgttgcttctctctatggtgaaggaaccattttctaagaagaacttcatgtagctcctaagcctctgtagaaacccacggctgggattataagtagtcacaaagatcaaggagtagaaagaaaaggccaaatcatcaatgaccaaagccagtttggcctgtggctcttatattcttagacactaatcaataaatctaccaaaattttcctcctggcttctctgagaatactaatggcttgggatccatttgtggaaaaacatttcagcaaagagagatgcgaaatcctctctgggttccccctctttggaaaatgatgcctttgttgaatgcctagtgtgcctgacactgtttatctattctaaagaatattgcaaaaacataggatatgaatgcagcacccaaggaatttagaatacgtgtatttcttcagaggcttgggtataaattaagccataatattttttaattaaatccaaaacaaagacaaaaaatccctggcatgtgcccctactagcaatacatggtgtctttattctcctcaaaatccatatgagtgcatttcttatttgaatttgatccttctgaatttactttgaaaatagtgcctgagtcttgccccatttctgatatcaattcttwataaaaacagggatcttctgatgtcaaaagatcatgcttctgatgcctgtaaagagcaagtcctctaggtaccaaagaaacctagaggtccctgctaggttcttatatgacatcacagtgtgattaatgcagagagggcaaaagattcacctccccaagttgttaacaatatttttttcatgtgagtaccagagcttgtgcctctatccatgttaactcatggttcaactttctcctacagtcttgtcttccttcgatggagctaggttggcttacggactgatctaagcctcttttctttgtcccagttacttgcatacaaacctctccatgtaatttccatctcctctgcatttcatctaaaccattagagacctgaggaatcaactgtctcagcaaatagttagatgtttgtatttatttatttgttctttgacaaatattttaccaagagccaattttatatcatgtacttttcattcattaatggacttactttagtttgtgggaatatatgttttggtttgactaggacctctgttatattgagttttaagtaaaaatctaatgacatgaagtagaaagtgcctaacaccttatatccattggaaataaaaaagattaataataaattatctaaatataataaattataatgcaataatttattgcattattttgtaataatatttttggcatccgccagtaaactatacatatctttaaggtaagaatcatgtcactcctgattgcagttcccacatctctgtacaatgtgcctaacatattgatagaaactcaataaatgtatgtggatttggatagccttccccaagaagcatagagataaaactgaaacttaaaagactcttaacatttgaaaaacagtcaaaacatggtaaagtcttcatctgaaatctaaatctcttccttaatcctttcctagacatgcattagaatgcatgtcctaattctagcataagaatatcaatgaaaacatggctaaaaccatagcaaagaggagcacttcttattgacagaaaataataaaaggctaggtacactgatactagtttgcaattttacatacagtagtatgtactcaagccagaaaattacagatttaatatgtgcaagaaatgggattctttcctgcaaatagcatatggggtcaccctcaaaacctagatgacagaaatacctccataacacaattcctccaaaatcccacaacttagctcacctgatatgttactcagagagccacatagctattctgaggttgatgaaaaattccaatgtcatcaataccacctgcctcatttcctgctgcttttagggttctctccaagtgtactctcatgacagaaccttcattagcagcagaaggcaaaggagcagtcgtacttccatcccagactcactgtggcagatgcaagaagaacacacatgcacgcgcacacaagcacacacaatgcatttatgcatcattatggccttaaaaataaagaacaattaatccaagaaccaactggaagaggagtagagaagtccataaagttgagtctaagatgccggrcattttcaaaccatgcctgacttttagaaagctgattgaaggtgttttgcactgagacccaagcatgcagtgagaggtggcatctctgtgcttggagactcactcaagatggatgtcctctggaccactaatgagaacctaatgagcctatagactttcaacacaataactcagcttcccagagaaatccaatgcaagaacctraaggcacaggataaatggcaaaggccccaatcagtctgaagaactcaacaaaactgatttgggaggcattcgtttgagagaactggtaggcagaagtagtatctgcatattaaggaagataattaaatctgttttaarcagctgtaagaataaagagatgcaattctctgcataatttaagacttttaaattaaatctgaggctagggacgaaaattaaaactttgatctgtatctcattgtcttaatacttcaatttacatacaaagactgaaacttaataaggaaaattcatgattatcacttttgtgagatttaactccaaaacatgaggactgtgtcctcattagacaggtttcaatgatccgtaatttcacatacattgaaagacttatgggagcactaaagtacccacagtgtaataacacttcataagtattgcaggatgctgtcagccatcagatggtagagaagatggctgttgataaaaatttcttcaagatactcacttgtctgaattcatgacacaatttgacctgctttttcatctggagaaaaggctatttggagcctttagtggtggcacaaagggttaataaacagtgttatgttgaggcaggcatcmgtttctttttctttcttgttttttttttgagacacaccctgttgccaggctggagtgcattggcgtgatcttggctcactgcgacctccacctcctgggttcaagcaattctcctccctcagcctcccgagtagctggggtaacaggcacgtgccaccacacccaggtaatttttgtatatttagtagagacggagtttcaccatgttggccaggatggtctcgatctcctgacctcgtgaggcaggtatcagtttctaagccagcttagttctgacgtagatgcctcaactgttttctccctccatacaaaggagtggaagctgatttcgatgagccttagagatttgaggctttctcctatgttattccttactccattcagcattattctctttgactctagtaaggtaattgagccacttcatttcttcttgctttttgttgttgaaggaaatgaggcaggcaatataggttgtctttagccagaagcctaatgtctgaagttcaagttggattggttagcaactctttctaagtctccacttctcactcccctcaaaactaatccacatatattggaatattgctgttctttagggtctcaaagaaaagatgtttgctaagaactttagtctgacttagatacctggctcattactgacagttccagttcggcaaacatcccagaggctagattcatgaaatagtcttcagtttggattttcaatctcctagtctgcctacttgaggccctaacaatactaatgtcccacttcatccacatgggtggtcactacccctgaatcagggtttcaccacaccatgcaatcctcgcctgagtgagtaacttcctcargcttctggctttgcactttgccatttattattccatgaccctctgctcagccgctcagtcctcaagctggtctaccattaatgtgcagtggtaagtctctacctatgacagcagcacttgaatcagttctgcatctttacctgagatctgagcttatctcagcagctcaaattgacgttagaatatatatatgtatatgtggatgcacaataatgccaataacaagaataatagaattgtaaaaatcacagattatctgacttggaagtgacaattaggatcatcaggtcctaccatctttaatttacaggtagagaaattgaggtccaaataaacaatgttttttgaaggacacaaaactaggtcttctaattcccaggttgccacctgacttttgtagggcacctctttcacatacagcacctctttaaaataaattacacaacaacctaataatttagaagggggatgaagtgacttccagggcaagaaatcatatatccatttcatagaagaggtcttatgacttggtgaagaccaccaagtgatactaggtataaaagtttaagctatttaaacatattgactgcataatgctaaaaatagtatagtgattccagtgttataggggtggtatctgtgtccatgtgcattctcattgattaaaatgatattcaccaacaaggtaatctgtgggtgatataattatgggtgattttaattttctttgtcattattttatgtatttctgtattttcccaatgaatgtaccrtgcctttttttttctttattctaataaagctaacatatttctgttacatattttactactaggaaacctggttctatagagatttattcctaaaggaaacttcctaccatttttaaagtatatatagttttgttctaattacatagctgaatgtctttactttatgagtgaattccaaaagtcactcaaaaacattttaagatttatgtcatttggcagccccctagttttctagccagagcctgctgatgtaattcctacagccacatcatgcagtggtaacagtatagcaatgtcctttattatctaaaaagtgcttccaaagtgcaatgggtcaaggttctgaacctctctgtaccataatatctagagggagtacagaggccccagctcatagtcattatctgcttacacaagctaagtattcctcctgtcttatgtattctgttgcattttaaaccagacaccaagtacagaagacataaaagggaaatttgggattcagtcaaatacatggtactatcatccatttctaaaggaaggaccaaaccactttgtgatgttcctattggaatgccttgatctgggcattagatccagaagtatttgggtatttagttaggcaagtcccaaggatctgagtcctcttagaagggcctgaaaaaacagccatcttcatttcatctgagagaaagtgaaatgtcataaatctaggcagatgatttgatgtgttcaaagtgtgctgtctctgaaattcatggtcttgacagatctgagttctctagaaaaattgtaaaaccttctgcactatcctcttcactggcgactcttcatcccccaggtcagagcatctaagttcactgtaggttttgcttgcacagaagctcaggaggtctgcacatttggagaaagacgtgtgctttagaaamccatctttgaataggcaaggggagaagactgacaatactccgtaattatgcatggatttggacattttagagtcatcttccrgagctcagttttgaaagtgaagaaacacctatacagcatgattcaaaccagacatcctgggaacactctgtcctagctgctttggtgaggaaattttggctttcagcagtgccagcacctcttggaagagaagccagagaggacaaagaacttgcttgggaacagaagatagggcatgtgcagctgccttttatcctagactggtttttaactgttctagaaaagctcagtttactattataaaatgtcacacaagaaggtccaacacagtttcaacagttgtttcctgattagtcatctcagactttgtcaaacactcacactaccaggaatcctcacaaacccattttgtagcttctggggtattttacagagcctggcatattacactgggatcatcttacatcactttggcattcctctaaagggttgtagttagcgaagcttacaaagttctttggtttcacacatcagtgaattcattctttagcacccatctgggaatgagcaccacrgagtagtttgagtgttttctgtgaacgagttgtaagagtgctggactcggagttaagaacagcctgattcaaactagtcttgtgactctaggcaaatttgaacaggtctgagttcttttagggttgaagattgatatggtttggctctgtgtccccacccaaatctcatcttaaaatgtaatccctataatccccagtgtcgagggaaggacctggtgggaggtgattggatcataggggtggtttcccccatgctgttttcataatagtgagtgagttctcagagatctgatggtcttataagtatttgacagttcctcctacaagacgtgcctgctttcccttccactatgattgtaagtttcctgaggccttccctagccatgtggagctgtgagtcaattaaatctcttttctttataaattacccagtctcaggcagttctttatagcagtgtgaaaacagactgatacaaagtttaaataagataatatatagaaagtagttgctatttctgacacagtaaactttcaaaaaatgttctctgtcttctcccttagtgaccacccaggggatcttgtagagcaattgttttccttttctattttttttttctttagtgagagagtggttcactctgttatccaggctggagtgcagtggtgcaatcatggctcactacagccttgacttcccgggctcaagtggtcctctcacttcagcctcgtgaagtgctgagactatagtcatgagccactgcacccaactagatcaatcttacttgcactctcactttgtatacaaagtcgcatgccatgcatttactacactggctgatgaaatctcttctctgcacgccagggtacgttgaactgttatttccttttccactccttgtcgagaccttgctaacctgagtctacctccctagagtagggtatgcaggataatggtgagctacttttatttcataatccctactctgcctaaatatccttagtcatacaaagaaatggctgaaatatctgatttcctttctgtcactcagtgccgcttaatgatgtgtgaaaaatcttactttgtggtcaaaataacacaaaaataacaacaaattcagttggttgtattccatcatcagtcaaaacaaagtctttgttacattgattatttccaatgtacttaacccatatttaaatatttatagtaatagtagaggtatagtgttgtattttgtaatgtttcttgtgttattcagtactctacccccttttaaatttggagaaatatttatttcccctcattcactcctcctttctttgaatccagctgatcccttcctgcccctcacttcactccactcccagggtaatcaatattaacagtctgggttaccttttgcttcacctttctctgtactcgcacaaacacatacagatttatggtatatttactgtgttatttgttgcttatttttttattaaaaatgggttatactagtgatttttctgcaatgtggtttctgctttcttccaagaaaaatgttgatgaagcttgagtgagggccactgtcatgcttgcatggaccaggttctgatatacgagcctggtgtctatctgcaatgggtctctgatgccttaagggacatcttggagtctcacttctggactgaggctgtccgtgaggagtttccatagcatttattgtcccagtgttctctgaatctgtgttacaggaactgataggttcacacacctttcattgctcaggttaatattggcttcctggtggccatttgataaatttgtttttctattctagacgtcagcaatgcccttggagaatagaatcatcacgtggatttcatgtgggttttgtgcctttctcaggcacttcttttgaactagtcttctcaattctgtgtctgtattaggacatgtgactaaagagcattagatctgaagaattttrtaatagtctagatgtttgccagcctggatttagtttcagaaatgatttcttttgagttattagattgaagtatttttcaattaattatacacaagactttcctgactactgattatgaataccaattgtttctcatattctctatcttctttacggcttaaacatgatactgtcttactagtgggtagacagaagcagagtattgagtaaatgccaacctatcatcgttagagaggaaaagagagtcaaagccaggaatacagtcaagcaagaaaagaaaataatgctttatctttgttaccaccttcctcttggtctgaaagaaatattgcgagtaatttcaattaaagaaactcaaagagaactgaactgaataggtcaagtcaaagcacagatcatcttaaacccttttgcaggtgtctaactagctgcgtgactttatgcatcttaacccctctgtgctccagtttttctgttrtatcaaacataaataacatctgtcctttctatctcctagatgtcctaacatccacatgagataatatgtaagaaagcattttgacaaacacacaatagaaatgtgcaactttcaaattatatggaactaaaaaggatcattcgcaggtgttgcattaaggcactgaagatacattaacaagacacttcctagccccgccggagttgacacaktctaccctagtaccacccagcaactcattttcctagcgaagtttgctaatcttggctgcgtgtatcatgacacttttgtttgtgattatgcttcagtccacaatgaatttagtctttccattcccagccttattaatacacccttagtacttacartcytaaagcttcctggtaaagctttttcatcatattaaaatcagataagaatagcatctgcttgtgctatagtgttcatcttcagatgtatccgaccacaagaagacbtaatattcaacaatcagaatgagagggcctcagcctttgctacagcctagcatcggctgcagacctcagactgcagcaggactgggcatcctctcagaggcctcaaaacagtgctgggtcttgggtagtagttggacatccagattaagaaataaaactcctaaaaaagatgttgatatcaaaggcccagaatcactgatttcaaaaccaataaactatgagagttaattttgacagaaaggtgcatataattttctgctggagattttttgtttgtttgtttgtttgtttaatctactatcatctatcctagaatacctccaaattggctttccaacacacttccagttcatctccatatcatagccagagtgatcattttgaattaaaaatatcatcatgccatcttcccttaaacccctacttagaacacttgaatcattaagttgatcttacagaataggagagtagaatggtagctacaagaggctggacagggagagattggttaatgtgtccaaaatcacagttagacaggaggaataaattcgaatattctatagcacagtacagtgttaactttcgttaacaataatttattatatatttcaaaatagctagaggaaaggaatttgaatgtctccaacacaaagaaataaaaaagattcaaggttatagatatcacagttaccctgattttatcactacatattatatatatgtattgaaatatcacatatacccccataaatatgtgtgattattatcaattaaaattttaaaaacatttaaaaagtaaaacactttaatggcttctcattgctcttaggagaaagataaaaatcaggaatttgacccacaagtcccagaaggtatttttctctgctttaacctcatttggtaacatgttcttgttctctctctctttttcctccttcttttttaatttcttcaacmgtactatctccctctaccacagggcctttgcacatctgttccctctgttcccctggcctgcactctctcacttgtgcctcactcattcatctcctccatttggttaatttaccttcttctttcaggtcttctgagctcagatatcacttccttttggaagccttctttgaagttcccaatcagatcggctctccagtcctgcatattacaaaagcttacaactccatgtacctttccttcatgtcaccctgcaataattttttttgcatgattagttaattaaagtgcatgtgtttcactagtggtctgtaagctcatgaaagcccaggccatatttattttgtttgtttggctattgcttgcttaataacattttcccatttggtgactgacatgagatagacagtcaataaatatctgactgttgggtgaatgagtgaatgaccagagcgccggtagggtgagtatgtctactcaatagttattaggacttgggctgccttccctttgctcggtttcttattctctgaaagtggctgacatccttgcttccagtggtcatttgagcccaggaacaccggaatctgatgacagatgagccccagcgtgaagctgttacagtggccgtagccttaccacttacctgagagctcctgaaggaaaaggcatggaatccagtttgttcacctttagtggaaagcgacagcaggaatataatcagctgccttctgctgtcatacatggccccttgacattcttatctcctagtgcagagtccaagccaagaggcctatcccaatatcaggaggtcctggggacttcacatttgattggagtattccatgtctttgtcttcaggggctgtcaggtgcatgttaaacctaatacctgattctatcatgtaaagtatgatctgttatataattatatataaaatacctgacctaacaccctaataacctgactctgaaatggaaaccttactaatgccctagtccaaacattgagtagctccatcctttcacccattatatacacagagagcattccatgaatggacaatgaagaatcctatcatgaaacaaaacccagcaagacagacagtagacatcaagagagatagaaattggagggtttttatgtaactggtcttgatccaggacaacaaaatggaagtgatgaagaccagacagaaagggcaaggcaaggtagactcaagcaatggcagccaaagttgtattcttcccagctgtgtgagtgtctgctgtctctcaatggaggctgaagtagagttgactgaaggtgtgaatctcccctctgtcctttagcaaatgatggcccctgcctgatgctcactctgtcaccacaaagtactttaaacttgtctgtctccctcttccgtcatgtcctcccccctctctagtggaaactgcattccttgttttattccatggataaccccagatacccttgctatttccctcagatacttgcttcaaaagtgggctctttccccttgcccacacctagggctggcttcccagcaactctgttgaaaactaggggtggaaactaactggaaacagaatgagaagttgatcagtccactttggttgtttaaatgaaggacacgtcagcaagaatagttgacatttatatttattagtgaagggaattcaagtaagtgcacaatgtctgggctttggatatttattttgtagttttgaatggaatttctctgtttaccctaggggagaatttgtgcctatgtacttattgagtctgctgctgtgagccccacacacaatgcttggctgggcatagagcagaggagtaggtcacacagattcataggatttgaactgcttttctttttccctgtgaattaatcttttaaatgtcaacattttaaacttggccttttcaaaaaatatgataccatatgaaccttacttaatcgaaaatacatttctagttcaaaggtttttgtttttttctttcctgaaagtgggaaaggctaacaacaacaacaaaatttgttaaaggatggactgtgtgtgaaggaagctggtttttgtcaatggggtctgagcaactttttttccttaagaatctaaactgttgttccaaaggccatttcttttttttttttacaggtctgggattttataatgcagaatgtatcttcttctgcctacccatgggaaatttggaatcctacaatttcaattaagctttaaagggacaattgtaggtcttttatagctacattgatttatagtcatttttatgtagcgttttacagatgactaattaatctgtaattaatttactgcatagtttttacaactctttaagacaggaaggtattattatacccagttcatagatttgtcactgagactgcaggagactgaatgacttgcatgaagtcttccagcttgttaatggcacatgagaattcatgccaggggarccttgattacctacagtgctatattctctctataatgaatgacctggaagtgcagaaaggtgagttagaataccaggaccgccacttactagctgtgttaaccttgaacaagtgatgacatcttttttgacttcatcttcttcctctgtaaagtgggagaagattgcctactcctctctccakactagactaagaatctgtgaagaataacatgagatcatttkgatagcttgaaatgctaaagcataaaagaattaaccattattatctcagataataatagggctgcgtacagtgtcctatcagatatcaggcaaagtgtcttccgtccttcctatgatacaattagggaacaagaaataacgaggggtattcaggttgaggggtggtcttgaagacacaggaagtggagtggtccattaccatgtcagtcaggtaggctaaaatttttgggtttttgtttgtttgtttctttgtttctgagacggagtctcactccatcatcaggctggagtgcagtggcatgatcttggcacactgcaacctctgcctgccagattcaagcaattctcccgcctcagcccccccgagtagctgggactataggcgtgcgccaccacgcccagctaatttttgtatttttagtagagacggggtttcaccatgttggccaggatggtcttgatctcttgaccttgtgatctgcctgcctcagcctcccaaagtgctgggattacaggcatgagccactgtgcctgacccaggtaagctaaatttttaaagttgtgtgtgtacaccttttatccttgtggatgctaagactattaccaaagcctttggaggaattgaatatcacattgcagctgataatcaagcactattaattttcaaacccctgaaacttacagtagttggtgtccttcagatttggagtgtatccatcgtagcaaactcttgcctgccagggaatgtcacagggattctgtcaaaggcaggcagatgctcctagctgtaggagtgagccagggctgccrtcatgcctgagccagggactaggacaagccgtagtccccagtcccctaggcaggagcagccgaatactaactcatttcctctgatgttgggttgtttttcagggtgatgttcagcggacactcatccaagtggacttyggcgatggtatcgcggtgtcttacgtcaatctcagctccatggaagatgggatcaaacaygtctatcagaacgtgggcattttccgtgtgaccgtgcaggtggacaacagtctgggttctgacagcgccgtcctgtacttacatgtaacttgtatgttattactgttgttggtttatgacctatcttraatattgtgtccttttcaaattgaattcacaattttatatctagaagaagtacactagttatcttttagcagaaggggaatggggaagaaatgattaagagaccaaaataaggaaagagtgagaagaaaatcaaagagtagaatttgattaatcctggactctctggattgcttcaaattctcattgcatttcctctgcttaccccgggtgccttgaagatatgacacttgaatctggaggctgagcctaagtaacttgcagagctatttggttgaaacaaagaaatttggttttgctggggtcagaaattgttgaaaacaatccacatgcaccactcaatctaatgcattgagaattagcccaagtaaagaaatttctccccatctgattatttctgtcttctcataatatgttgctattaataatccttttagggttttgctcctttttcctgggcttctatctgtggatgacttggtgttagagagaaggtggtgtagagagaaagagtataaaaacagtgttaaggaaactgtggtaggaaacagttccaagaaatgctaaagcttttccctcattggggattctaaagatgtgagtaagtatgatgagacaataataacttctaagttatgtgtgcttaaaacatgtgtcattaacatgttaggtgtaaggggtttcccagtcataggacttgtgttggttactaaagaaattgtttcctttaaatgaaagcagctcctttatatgaatggtcttgttcaaatatcaagttttagtccaagagcctcaaggccagccattattactccatgcctctcctctgcaccttgcccatggaacaaaattgaatacagaaagtatcaattagaacattttcttttttagctgctgtggtccagtgagagggcaagactattaggggatgacaaaaaggtgttttggttgttgagtcttcctaacatgtcagtaattctgatctctgtctcctgtactctcatggcagaggtgcttcaaagaaacatgcactcctttatttgggtctgacaaagttacacatgattctcagtatgccaactcaatctgcctatttttggctatagtttacagtgtgttccagactttgtgctaaacaggctcttaatatatgttatctcacttctcaaaacagtcccttgaagtaggcactattagtaaccctatttacaaaaagtgttgaggttcagagagcttaagttacttgtttgaagtggcccacctactacctagcagaaccatgcttcagactcaggtccacctgccgcaaggatcctagctcttgataactaaggtcagtgtcagtgccaagagcggcttgggattggaggagctgtctccattagcttttactatctactccctactctttacagatcatcttgaagaaacataaacattttggttagaagcagtgtgcttgttacacaactacatagttcagtactcatcacgggggctcctgtccatctaactgccatccctaactcgtcctatatagactttcaggactttccacttactaagacataacacctccctatatgttagtatgtagggaaatgatagcaatggtatcatagaaatgatcatactaaaatctttaacaatacgtcacaaacattaatgattagtagcaaaaataacttgcaataaaaatgacagcacatttgccaagaatggctcctacctagaccatattattatctcatagcttattctataaggggtgattttgctagagagctagcttccttacaaattataattgtgttccatataccacaaatttgttatacatctaccgtagtccaatcacatgtaaatactgatttaaaagccagtatcagcttctgatctaaatttttcagggtctcccattaaatcttccatagcttcacctccttgtcactctgtaggtttttttctcattcctgtgtgtgtgatcataccccttgaggtgtctactgctcccctgcaaaactcctccctagttaacgaaatcctggagaggaaaacaacacacacagagattgtctctgcttaagattaagggctgcggaaacccttctaaaagaaaccagtttcttcattcatttgcaattctttcatttcattagcctagttgattggaccaaatatttgaccttaaccttagaggaagataatttgtaatggaatgtttcgtgttctgattttaattttgtagactcatcttgggttaaktggttggataagcatgcctcatataatggaacttctttctaagcctggctttttggtactaactgtgttaaaagcaagttcatgtttgaagctgtttgctaactcacatacatataaactcatataactgtttcagcagattctgacatgtttggttagtgcctccctcctaaagatccagggtgctttgctatgcccacaaactctttttgctcatcttcacatctataccataacagacttctggccttttctttcagatggagaaatcaaggattggagaagcactgtgactctggcatcactttatgctcaaagcaagtcagaacaagaacataaccgagtcacactctcaggcatcttaaagatggagggtgtcatgagtgactgtggatgccaaagtgccatgatatggcagtgagaggtggctttataggggaaagaaaagcactggactgagtcgggcattctgactaggtccagattttggttcaaactcctggggaagtcactccatctctctgagccttgattttctcctctgtcaagtagatgcacatctcgttcccaaaagtcccatcaagcaaaatatatggtaccctggcacctagtaaaacttgatttttctatcatgaggaagaggagaattagcagcaactcttagctcaccaagcctgtcctctgcccctccccagttcctaccctcaggggcaatcttgaaagcccattgcctgtctcacatacacattccgaccactctccagtgcagaaaagtgatttgattccaaaccagagggtttgaaaaaaaaagatgggtttgcaaaggtcatctgaaacaaatggagccgatgttcctgcatagtgtttctgggagtgggccggtcttgctgggcgcctggtaatctcctgtagcctgacagttggtaattccttggggatagtattcactgtgctstgctagtttgcaaactaatgagacacgtgctgcagccagtgttgccttcagtcggatggggcagaggttttagagagcatgcagatttctgctcagaaagctgccttgtcgcagccagtcttgcagaaaaaaaaaaatcactgaagactgcaaacttgcagaacagaaattggggacaaaaaaaagataaggtggatcttgtagtccttcctaaactgcttcccttatctgttcccttatataggagccatgtgcagatgactttctggccccatcttagagtaaaatgatctgtgtagcttgaaaacccacgtagtttttcgaccattcacaccatcattttattgaccagcaaacgtcagactagaattttgtaaagtgtggcttaatgagccacctgcccccaaattaaatgataaaaatgtggtgttctgggtcttatcccagacccactgaattaggattcctggaagtatggcatcataatctgctttgaagagattagtatgattttaacgtacagtgaaatttgagaaactctgttttaggatctcagcttaatagtttgaatcattcttatttcttctagtagcttttttaaacattgcagacaaatagcaatatgatatgtgcacaatatttaggtggccaaaggtctccacatcataaatgctgcaggcaggccagagcagccagtgtacacacacacacacacacacacacacacacacacacacacacacasagaatcacacaatgtgcagcctcacrggcgtcagttgtttcctgcagcacaggagggctataaacaagaaaagagargggaaacccagttcacacwattccccatttctctcaaccacctttccaggaagattcatatggaatgatgcagcgccacctactgtcccttttgtgcattgcaggcacctgtctgatggagccgcatctgccagttcagcatcctacttaacgcagccagccagctgggggcctccagggtctggagtttcacctctgtggctccatagggcatactgcaccctctgtgattaacagagatggtcaaagaataggcttttggatagcaggaaccaggtattttaaacccgtgaaaagtaaatgaataaaagaggctgtggaaatctgaaagataaatttaatatgtgtatgcatatataatgtatatgcatgtatgcgtgaacttatacaaacacatatgtatttcagggcctacaaggccaacgtactatgtgtcttgaatttctcttagaaaattcatcattggcccggcatggtggctcatgcctgtaatcccagcactttgggaggctgagtcaggcagatcacctgagattggaaattcgagaccagcctggccaacatggtgaaaccctgtctctactaaaaatacagaaattagctgggcatgatagcaggcgcctgtaatcccagctactcatgaggatgaagcaggggtatcacttgaacccaggaggcagaggttgcaacaagccaagatcgtgccactgcactccagtctgggtgacagagcgaaactccgtctcaaaaaaaaaaaaaaaaaaaaaaaaatcgtcattgaccaaaacgtgattatgtgaaaataaatgaaaaaataataagacaatttctcaaacatggcaggcatccctcttcctcgtggtcttttcacttactctaccctcaccctggagctttcaaaattgatacttggtgctgtctttcactttattcaggttgctgctcaaatgccatttcttctgagaggtcttccatcatcacactttcaaaaatagcactctgtcaccgacttctgctttatgcattcagcaccctccttcctcagaaatacctaagctccaccaaatgccaggtatccccagcacctagaataatacccaacagatcacaggactcaaaaactattgagtgagggttgggcgcagtgactcacgcctgtagtcccagcactttgggggggccgaggtgggtggatcacttgaggtcaggagttcgagaccagcctggccaacatggtgaaagtccgtacctactaaaaatacaaaaattagccggatgtcgaaaattagccagatttggtggcacgcccctgtaatcccaactacttgggatgctggggcaggagaactgcttgaacccgagaggtggaggttgcagtgagctgagatcatgccactgcactccagcctgggcagcagagggagactctgtctcaaaaaataaaaaaataaataaaaataaaaaaactgagtgaatgaattaccatgttttactaacaagattcgaatttttcattgagacaatgacatataggcattgttcttacgctggtttatgacttttaaaaaatgctcagccgggcgtggtggctcacgcctgtaatcccaacactttgggaggccgaggcgggcggatcacaaggtcaggagttcgagaccagcctggccaacatggtgaaaccctgtctctactaaaaatcaaaaattagccaggcatggtggtgtgtgtctgtagtcccagctagctactcgggagactgaggcaggaggattgcttgaacctgggaggcagaggttgcaatgctccgagatcgtgccgctgcactccagcctgagcgacagagtgagactctgtctcaaaaaaaaaaaaaaaaagctcacatatgagagacaaaatgaacctctttagaatggaactagcatttctagcatagtttatctagtcattgtattctaatgtattcatttaacgcagattgagggactcaggaagaatgtcacagaggaggggatgctggaactgagatttgaagactgacaggtgccataagaaaggtgtgtagaagcaaaggccctggggtggaccaggacatggcttgctggaacaaaccatttgatagggaaatggcaagacttgtgcaataaatgaaaccaggtggaaagtgcattttccaatgcctgggacatatttacctgatgaggaggcagcaactcttaatagctattttgtttgactggaaaggttctttcaaacacttccatctgctcagaacaagggctctgaaaccaaactgctttcctagctgtatgacctggggaaagtcacgttactttgttcatctctaaacggggaggatattagtgcctacttcataagattgttttgtgaggataaaataagaaaaacagagtcgttagcagaacatttagttgtagtcatcgctcagtaaatgttacccttttattatttcattgaactgctctggcttataatcaactgcttctcaacatatgctttataggccagaagatcagtttgattctgtatgctgatcaccagacttttcattctctaaagagggagtagcatgcacaaagacggacatgggaagttatatcatttgttttacccagtgaatacttgagcatctataatgtcttagaaactctgctagtctttgtgtatgaagataaatatgaagaattcttaccctcaagaagttttcagcctctgtcttctgtctcacaaattttaaatcaatgtgtgttagctatcattattatcataattggatcatgggaatcttttttttttttttttttttttttcgagatggaatcttgctctgtcaccaggctggagtgcagtggtgtgatcttggctcaccgtaacctctgcttcccggattcaagcaattctcctgcctcagcctcctgagtagctgggactacaggtgcatgccaccatgcccagctaatttttgcatttatagtaragatggggtttcaccatgttggccaggatggtttcgatctcttgacctcatgatccacccaactcggcctccaaaagtgtcgggattacaggcatgagccaccacaccacatcacattcccaatcacgggaatcttaattttgaacaagtatgagtaacatgatcagcttcgctttctagaaaaattactgttgcagccatttggaggatggattcgggtggtgaaaggttacaggcaggaaaatctggaagataagtgagaacgtgcttagagtatgaaccagggcgccagattagggagggtgagctaaatatcttagagagatttatgaaaccaaatcgtcagtttcctaaatggatgtgaataacaaaaaagaaattgaaattgactttctgtttctggagtgggctcctggatgaatatgagtgttaatcaccaaactgtagagaatacaggagagggaaataacagrgtccttgagaacatttgattgctggaggcaaagaagtctagacccccccagaaggagtctagagcccagaaaggggtgttagagcccttcacatgcatttgatatttgaaggttaaggtgtggatggtgttgcctagtagaaaagtctgtrgagagtgaaaaagtctcaacacaggactctgggaaacacatttacagggcaagcagaagaggaggtaataaaccaggtgaatagacccaaggtattgctctctcctctacctcatgggacaaagatggggatggcaaatgcataggaagctgcattttgcctggaaacagtgactcaaagagaagattgagggttgaaggaaaggtcctagtggttctttatgaagagggcmttcatatctttgtgaggttggtacatctaattaaggtttccagtttttataggcctctgtagataaaatcattctatattttaggtgagcatcttctgagaaccacagagctctctatctacttacacacacacctctgtcctgaattaacttaattcaaccccaaacacagtgtgtgtgccatgcttacctaactagacagctttgcagacacatgcacgaacacattcacacatacacagacctttaaaacccaataaataataaagggtaatgacatagagagtggtttgaagatttgtccattcacccttcatcaatatggattctatgaggtcttcatgastctggttcaccaccagggatacaacctcttggaaagactgcattgccttgtgaaatcccaaatgatgcctgttcttaaggacttcataagttacctgtaatttttttttaacttttacacacacctaactcaggtgttagaactggtagaaasattggtaagtgcaaaatgtcaagatgcaattgtgctcaatgtattctttctccaaagtggggaaagcatctgaacacttcttttgrggaatatggcagccaggttttgggggcttcaagagtaaatgtgtgatctcttcagagcagggaggacagagcagaggaagctcttccccatccatggcctctctttctcttgtgcctcaggtcccttggagcacgtgcacctgtctcttccctttgtcaccacaaagaacaaagaggtcaatgcgacggcagtgctgtggcccagccaagtgggcaccctcacttaygtgtggtggtacggaaacaacacggaggtgggttcaccttccacatgcgatctagggacagaagctcaattcacgctgcctgaagcaaaggagggaatgaaatggcttatgaaccctagagtgtagaagcagttgtagcttcaaggacaacaagctcccttggtgctcaagtatctcatcattatgttctctctctctctctctctggcccctctccaccttctgcatttcatctctgccttcctctatgtttacgtttttctccagctgwacttgtctttgtagtgactcttagcagccctagcttagcagagaaattaaactctatttcctgaaagttctaacaacagtcctgaaattgagtcttactggccaggccttgatcacagtgctgggggtagagagggaggtgaagaagtcagtctcctcggaaccacgtgaactacagaaggggagaagtgattaccaaaagaaaacgaagcaactggatgcaactggacaggcgcaagcaatagatttccattacaacccacccccaatggccttcttaccctaaatcaaaactcttatttatttaggtcagctttaacttttatatgtttttccaaatattccctatgctcaaaagtcagtggcaattttaaatctagtagagacctaacaccttgtttactctaagtctttcattttgcacatgagaaaagtgagggtggtgcagctggagtggtttgctttgatctcttccagctgcttcataagaggccaaatttaaggccttctgatgcctccactaatktttctttcctctacaccaggctgcatggtctatttcagttttgaactcattccattctcagaaattaaagtgcttccaaatgtaagttaggcaatagagctgaggccccaaaggacactgggatgaactgctctggactgaaacmctccatcttcttccatcagagctgctttcacttggtgactttgctcttcaaatacgatgtctcttattttaataaaaacatttttctgctctggagctgaaacttggctttagctggagatataattttgcacaggcccaggacaaacctaaacagtggaaagaacctctcacctctactgcaaccataactaaactgaaaagagaccctttttaatttcacctgaaactatgtgtgtgaactcagcccatagtgggccctctatccatagcggaagagcaggaatytatgtcatttccctgaaaactagtactaaaaggtgaatgtactgaacaacttccttttgtaccccctattgttttttattttttttatttttccttttaaaagaaaaccagattctcaagagaccccattgaaaaggcttctcatgctgggcgttagtcttctttctgccatacagggaattaaatgaattttgatttttaaattaattaagaaaagatgggaaataaatgtttgtgaggagtgtgtcaagggaggtcagtaggctaatattttttcctctaggaccctagcagtcgattgtattgcaggcaccacgccaaatttttttttcttttttttctgttttgaatcctcaaaccactatccaattagtgcttgtttccacagcagctacttccaggaaactgctgatgaggcttctcaaagsgggccagcacacaaggccactgctgtttaactagtgtatggttttggtgtaccggattcatgttccattgtaattctacagaaatcgtacaccctggagatgaacacatggcagcttatagattttcagtgactgctgcttccatctggattaatatgagcccccgttctcatttgctttgatcatttccttgtattagggatctgcttgatatgagtaggtcatgcataaagagagacatacattccaccagcaagcaagacctatccatctccccagccctgaatcaggatgatatcaggaattcacaatgaataggcagacttgcttggagtcattgctccaatagcctcttttctgctttgggcttgagatgatagggaggcatagagggactcagtgccattgtggtacatcaggaagagcctctgctgggttagacagcctattgttggctcacagttagtggctgtgtcacctgtaactaaagagctttcccttcactctgggcccttgtttattttagcctttgatcaccttggagggaagcatatccttcagatttacttcagaaggaatgaataccatcacagtgcaggtctcagctgggaatgccatcctacaagacacaaagaccatcgcagtatatggtgagtgcccatctcagtggatctactgctgtcttcatgctcagaggaggttctcttgtgccatgatgccagagaccatcccccagctgtgacttttacctggagaacggagggcagtagttgagaaagagctgaggcgagtctcatcttctcctgtagggaaatttgaatcactggtaaaacagcgtcacgggatccagaaagggttttcttagaggtagagtgactattcactcactcatagtgtaaagtggattttaggatgtgtaaggctaactcatttcacttagattgttagtaatatttgaataccagttacaaaataaaatagctaatgttgaatctcttttttttaagttcaactttaaaattcttgactaataagggaaatctgccattgtctaaatactttaaaaacctcttccacaaatctgtatcataaaaaaaattatctgctagattgagagtgatggaagggtcataacaattagatgtcgtacatagccatagacgggatatttgaacaaatggctaattttgtgatcagttggggaaattgaatatggtcacaggattagatggaatgaatgtgtactgaaatgaaaagatggagtcattgattgaaaactggaaataaaaaaaatacttgatggattgatttcattttggtaaatctttttctgcatagaaagatagtcatatggatatgcactaagtgttactagtacatggaaaaaatgtttattattaatatggaaatggtacatatgaatcctgaaaaattagcttttgaaatataagaagtggaaattagataggagaaggaaatgctgtgcagagagaggaggaggcagaaggagggaggaaggaaggaggatgagaaagagagcaagagaggctgggtgcggcggctcacttctgtaatcgcagcactgggaggccgaggcgggtgggtcacctgaagtcaggagttcgagaccagcctgaccaacatggtgaaaccccatctctactaaaaatataaaatttagccaggcatggtggaacatgcctgtaatcccagctactcaggaggctgaggcaggagaatygcttgaacccaggaggcagaggctgcactgaaccaagatcgcgccattgcactcttgcctgggcaacaagagagaaactccatctcgaaagaaaaaaaaaaaaagagcaagagagagacagacagcctagctcgtggtccaaataatgtcaattgcccagttcccttatcagttgattttgatgagataatttggggctggattttcctgtgaggagtcaggttctgttaatgctcatcttgccaacttgaccttcaaaatcagaaaataatttgtaagcaactttgaacacatctaaggatcaaaaggccttaaggacactattcctttcatggctgggtgttagattttataatttcttctctctcccttcctcctgaaaggcttgatcagcccagataataagaaataaaccagggctgtgattttcctaccaatgtcccattagcaaggtacgaggtggccaaacagtggctgtgtatagagtgcggcaaagtctgcctctcttcccttctccatctcctttctgkgtgctgggaatgcatttattcttcataacaaccctagtgtaaagcaggtgatattatgatccccatttttttcagagtgatgaataacttgccccagctagcaagtggtgcagctgggtttgcaacccaacccatctagactcagggcccatgcactgaaactatcctacttaactgattctcatttattttcactggatttttttttcctttctctccctcttggatgtcacaggttgcactaatgggcactgacctattagcccaacagatgtcctcttggttatgcatgttggtgatgtcattagaatcatgaagaaaaccttaaatcttggccttatctggtccagcccatcattttatagatagraaattatggcccagacatagggaattactggcttaaagtcattctgctgwttggtgacaaatatgatcataacgatggtggtggtgatagtaattgacattgatgaagactttgctagccactggcatctgttctaagcatttggtttgatctgctttattaaatctsctcagatttatgagaaatattctataattatgcattttacggatgagaaaacatgagacaagtataataaacgagctaagaattctgaatccagagggtatgtttgtaagcacctcccatgccttgctatgcttgcttcttcctctttctacaatttctttacaggtatcacccaagggtgaatcactctttataaaaataggttatcatatgtctcttcgttaagagatttggcaaggttctcctcctcttctaaccaaattcctgcaccatcggccacccttaatttgtcttyggtcagttgagttatccagagattcatatacataatcrgaaagttatggggtctccctatgttgcccaggctggtctcaaactcctggcctcaagcgatcctccctcctcagcctcccaaagtactgagattacaggcatgagtaaccacacctggttccatgatcagacagttttaatgacaggtgtgactccttaaacaaaagttggagcaggcaaagttaaacaggaaagattgaacccagctgaaagaaaaggcaggaagatttgtaaacgctgrggttagctagtgggaaaatactggagaactttaggaagcacgtgggtttccagtgtgattagaccatctgtgtgagttaatcactgcttagggaagtcagtctcctactctcccgcagagactgggagatagggaggggtgctatctttcttgatgattacatttcaaaggaatggctcccaggtccttgagaaagacattcatgagttgtagaagttttacatctcaagggacagagaaggaatttacaattgtaagttttccagaatactctaagaaaagcaagtccaggagcttacagtcaggaagaaacagaaayttgtttgaaatttagtgagattgatgggaacatgaagacttgtcatgatgggactgaaaaaagcatcacatttgggaaattgacaggggaaggtttgtctactcaaagccacacaatcaattaaaagraagaaaatctagtttgcattgtttcttctaatttgctccagggcacaagtttgcttgtaaataaaaatacgcaagtgtatagactttatctctctcaacagctgcaaaaaatattatattattggtgtttacccttttcagtccgcccacacgcatcccctatttcttgaatcaacttaagtacgtttccctgccattctgcctccctgccatgctggttagtatgctaagtaattacggagggagctgcatcattttctcatttgtgtccttttactaagataaacattctcccttgtggatgaagtctctgcagtttggtaagaggtacggagaaatgagaatgacataaacttaaatcttcatagcaagaagtgaggacttaatgggtgattctttggcactgctgtttaccacactatttagttaacrtgcatttcattgttccccatcaggtaatattcacataggtgaccagtgactcataaaatagtcaagctttgaacaatacctctttggaatatattaactgccacgaaaacataccttataawgtcagagtcttcgaaacatgtgtttgataactccttagcattgttaggaaatgtacaagtgaacttttgtgcttcctgaatgtaaattggcatccccaatgtcgcttggaccctaatgaaacaaaagggcatgcttaacataaaaaatgtttattaaataaataaatgcataaatttcgagaaggctacaccataagttaagcatacatttattcaacaaatgtttattaattataaatgactcatagatagtaactgaaaacctactgtgtgctagacaagggccaggaacacagagccatcatcctgattgaggttatattccagtttgaaggacatawcaatgaaaacaaaataatttaaatagcgctgagtgtgaaaaagagacaaagggtccagtgatgaagggtgcatgggatggtggaagggaggctacctgaggttgggtggttggaaaggcctctcggggtgagactgaatgatgagaggggagtttgctacagtccagtgaagtggagagagctggtatggacagagccagcaggattgaggagcacagggaagtacaggtcctggagcacagagagggcaggaaagccaggtaggacaggacaaaggaagtccccaccaggttatgtagggccaggaaggctgtggtaagaatctaaattttatactaaatgcaatgtggaggcactggcaggttttaggggagccatatgatctgagtctattatgtgccaaacactatgctgggtaaggagtgttgaagccacaagaatgggcttcacagacctccaactccagagagtgtaactgaccaaggccaccagtgctgtgctctgaagcttatcaccaagctagggctagggctccaccttccagggacttaccctgccaatgacagagtatagcagggatactaaggctgaaccattcctggaacgcaggggactcctctgccagcgactttggctycaagactcctgaacaggcttactgaaccttcctcagactgcagagtagtcacccactctttcttcctctctttgactgtcctatatgcatgcacggtggtcgatagttctccatgactcctgtggcttcctgcccactttctcgcacagagaattcccctcatataatccttgcctgtgtaatcaccatcttgcttcctggagaaccaaactaactcaggtgctacagagacaatgaagaaaatccctgaataacataaaattccattaaatgaaacttccatgcaaacaaacgatagcaatagaatgattacagtgataattataaatatctaatcataataattattccataatcctataataataataaaaagtatgtacaaaacagagtagtgccataaaaaagaaaattaaaatgtgatgggggagggtagtgagccgggggagggtagtgagccagggagtgcttcaactagagcttgaatattttgtgcatggacagtggggagaatggggcgttctaggcagaagaacrgtgtgtgcaaagaggcccagggtcataaacctaccatgcattcaggttgctccagatcatttactatccaggagcgcagaacctagaactaggaataataggcaaaggctgcaaagataggcatggaacaaagttaggggtttggtttagaaaataaggggctacgggctcttagagcctgctggcaacctttggtatgcaaatgctggccattagaaactgggtccaaccaaacatggcaattccctgccctgttcttgcccttgccctcacatgtgactggcaacatggctgcccccacgtatccctctgtgtgtagaacaacatggcaccctgcatttgcatactaaaaggctagggtgagagggccagttttttccctgtctatatcatgaatgacatgcctggtcaaaccaatccctaagccctatgcaaatcagacactgcctcctcatataactggatggtatcggtcacgctgcgggggtgggggcgggagggggagaaaagggggaaagggggagacaggggaaaggagaaggggggaaggggggccaggggtagtctgggggggtggtctcctctctcagctttgtagccccctccctctgtctctatacaggggagcttcttccttctttcttctaccttctttcttgcctattaaactctccgctccttaaaacaaacaaaaaaagaaaagaaggggctggtgagatattcacagggtagtggcttgccttctaaaaaggtccctatggtaagtgaaggggaaggaccctccattttgtataaaatataaagtctaacaaacctcttgacaggactatttgacttatagtactccatctactgttatatccccagaggaattccggtctcttcgcttgtccttttctccaaacctggatgactacaacccggacatccctgagtggaggagggacatcggtcgagtcatcaaaaaatccctggtggaagtgagtgcacacagtttcttctcttgcccgggtaccttttctctctgtccttgaagaatttcacagaaaggggagctttgtacaaaaacaaacaaacwaactaacycagcrggaagaagctagagcccatgggaagttctggcctgatgtctgcaaagctgagccccacacatgcagagacctcaaaggccctaaaggggatgcaactatggaaccacggacaaacatggggtccttgcctcttgtgactcttgttctgcttagagaaggaggacaagtacatcctaaactcctttgtccacatttctgtagcagagttcacaattaggccattaggaattataaaaccagctactgtacctgccagtgaaggaactcagcatgtaagtgtcctcggctgactacaattagtaagagtggtcccaggttccaacttccgcaactgtgagcataacagtgcagtgagcattcagtatatgatggttagtcatatttctatttcctcatttttttaaagaaatttctgtactgtagcagccccaaaaaggaattattatccacactttgtagatgaggcaactgaagtttagagaggttaagtaacttgcctaaactctcatatctaatagaggatggagctgcaaaattgaaattaagggcctgagtccaatgtctgggcttttgtgtatttgacaaagcttcctaaggtttctcagagaataacaaggtggttgtgttttatccttccctgagcaaatgtcactggcaattagagaagacaccttcttttaggcacatcttcccctccttgttctactttttttttttcttttatgagatatagtctcactctgtcacccaggctggagtgcagtgactcaatctcatctcactgctacctctgccttccgggttcaagcgattctcccaccttagcctcccaagtagctgggattacaggtgcttgccaccacgcccagctatttttttcgtattttaagtagagacgggtktcaccatgttggccaggctggtctcgaactcctgacctcaagtgatycaactgccccggcctcccaaagtgttgggattacaggcgtgagccactgcgtcggccccttattctactttcatgagtgagcagaggagtgggatagccgctcatggggcagcttgagcttattgtgcaaacgcggaaaatcagaagtgagttatccactcccagggcatattcttagctcagaatgaaaatcagtttaggtttgctgaacattctttcctgcttccaacacatggtgccacaggacacaaaaagatgatgaaataaaggcattcagataactcctgatcagaaaacagatcttacatccagcctcttgcaaggagctggtcttccctgtcttcattacctttgttaatatttggttagcacttaaaatattctagatactcttttgagtgctttgcattattttaacacatttaatcccccaaataagcttacgatgttgaaaccgtgatttcagaactacccattctgtaggtgaagaaatgaaactcagagatattaggttactcatccaaggtcatgcacttaaagatcagattctggagtcaaaccatcaaggtttgaatcttgatttttgtggtttcctaaccactccactctagggccatcctcttccttattccaaggagaaacagggatagatggaatactggggtaaagaaggggtatcttcatgtgcctctgagcaatgccacccacctctgtctctatggctttcagcatctgtgacatgattggtggttacacattatcaccaccaggaggcacgactaccagactacaaccctaaaaggaataggcctttctactctgagccatccgtctctagggtaacaactggtttttgtcctctgctgtccaagaaggatgacttatgctctttaacgaacccactgtccatctcttctcatctgcagcattctagggacctgtgtccccataggtcctctatctgtccaactcccccaggtgatgtatcaaccaagcactagctcagcaatgtccagccttccaggctgatttctcttcacacttattacttagagatcagatgccctgtacctccacctttctaccagctgtccattaggttagaaattactgctcatcaggatttctagcctgctgtgtagcataatcaggaatatgcagaataaacagattgactcattatccctcagggcagggttatagcagtggtggtggtggtattaataccttctagttttcaaggctccctagtcacccaatcccaagaagcagttgatgcagagcttggttccyagcaatttgcactgactttgagatcagtaattgcacttggccacttttttaagtcccaagggaccacattggcaagtgtacrctaataaaccctatgagaggtacaactgagagtcagcttatttgcagttttcttgctattcattatgaaacaaaatttagtattaaattgtttgccttttcttcctcaaaatggcttttgctattgacatttcacaatgaaatctttaattgaatgtcattataaacatttttgtgtacaatgaagattattcaggcacaatctctgagtttacagtctagtaagggcataaaacagtgtggggtttgctgtaataggagctgttgtttgtcagtgtctggagaagggaggtacagagcactggktcccaacacagacttcacagtcagaccaggcttcaaaagcatcagcagtcacttcctagatggccttgagccactgtctaatcttcctacagccaccatctttcctggagtggaaattgagatgcaccacccagatctctgttcagggagacacttattgtcttttctgggagggctatgggcagagtcttcaccagctgggttccaagtcrtgtcacttcttagggtggctcatgtctgatgacaggctggtgcagttatgtaaagtcctggccatctcagcccaatttaagacaactctgaagggccattctgtctcccctcggggtctcttgaagttgtcatgggcctacatggyagctcaagttttcccttgtccatgtttgtttccttccctttgctcccataggtgttgttcccaagagcacttcttagtaaacatcctgcatgctaaactcagagtcagcttcctgaggaccccagcatatgatatgttctcactgcagagtgaggtgtaatcatatttgcttcaaagggttgttgttggaggttgcctaaaataatattataagttacttataatagtaacgttgttggaggtcacatcaaataatataagttacttagcacaatacacccaggaagtacctgggattgtgctaagtaacttataacattaggtgaggacctaatacctggaatttcttgctacttcaaaaaaaaatgcagcacagtggagttcaaaaacaaataatcacctaattgggaaataatgaaataaataagctttaagatgactcatgaaggataaatagcaaaggcagagaaaagacattctggtggagataacatgcacaggaacatttgcaggaaaaagctgaaatattgagaaattgtacatcatcccatttggcaaaagcgtaagagttgtgggtaattagtttggaaaggaagcatgggaccatattgcagaaggccttgaatatgtccttaatcctgttagcattgggaattcttgcaagcattttggacaaggaacatgatcagaattggactgctggagagagaagctgggattatagctattgattctagaagcatctagagagaggattcaggggaaaccctggggtataagctcaagagagagaacagtgagctaggataaacaagaagtccttgagtgatatctgtaattttaacataagagtcagtgtggccaagtggagggctcagggtgcttcagggaacagggctggtcatcaggtctgatgctgcagaaaagtcaacaggggcctcctgagggttgtgatatggggatgtcctcttaggttaggtggttaggatgtggtgggtctatttgaagagtaactccagtgggctgacgaaggaggaagctaggttagaaagggctaaggcatgaggggcagatgataaagtgaaggtcttctcactggcatggtcaccaccttggagatgctctctagcaaaaagagctaacatttgaatccccaggccctactgtaaatacttcatgtgtaactcatttaatcctcaaaatcagccatgaacaaggcaagtactgcaactgtcctgtcttctatttaaaggartgtaggcatagagaacacaagcaatgagcttaaggtctcacggtgttgaagctgggattaaatcacagacagcctgactccggagcctggacctaatagcccagtgctgtctctcacatactccctgcctgatatgcccaggcctctgctttcaggccccttgtggtgtcttctgcctacccctgatccccccaccaaatacttggtcccttctcagctttcttctctgcagcactaatgtgagcccctgtgtctgtccctcaggccacaggggttccaggccagcacatcctggtggcrgtgctccctggcttacccaccactgctgaactctttgtcctaccctatcaggatccagctggagaaaacaaaaggtcaactgatgacctggagcaggtgagtcccctggaaaaggagacgttttcrgcttcaaccgtttgtggagtcttcaactttctaagcctccatttctgacccataaactggtgatcctaactacagcttcaccaaaagcacatgcaagagcattcatggtaggtgtattagtctgttctcacactgctaataaagacatacccaagactgggtaatttataaagggggtttaattgacttacagttcagcatggctagggaggcctcaggaaacttacaatcatggcggaaggggaagcaaacctgtccttcttcacatggtggcagcaaggagaagtgtagagtgaagcagggaaagccccatataaaaccatcagatcttgtgagaactcactatcgtgggaacaacatggaggtaactgcccccatgattcagttacctcccactgggtccttcccatggcaagtggggattatgggaactgcagttcaaaatgagatttgggtgggagcacagccaaaccatatcagcagggaacggctaaattatttacagtgtggaatactctgtggagtttacaatgaattagattaatctatgtataccaacacaaaaaattgtccgtgatatcaagtggaaaaaaaagcaagttgctgaacaatatcatacttgtcacaagaatgccgtgagaagcaaatgacatgacatgcatatcttttttaacaggttcaacttttatacaaatgactaatcctttgatgatctaatttgtgtttgtaatgagtaacattagctcccgagcaactctactgccctgtggggttcacctcctcctcatctccactaccttctggagcatttgagtgtgtgtgtgtgtgtgtgtgtatatctgtgtgtgtatttgtgtgattctctttctcttttcccctttagtcttcttttttcttccctttcctccttttaactttaaaagactctcctgtctctgtagtggggataattatgttgttgttatccttctttgtccattcagttaaaatgatcagccttggcctagttgcacttttagaaacgaaatgattttgatttatcagttcttccaggtaaatagattaaaaataagattcctctcggccactaagtaaatattggctgtttcccttccagtacttggagattttctgtttactaaacccataatctagccccatgatctttagtcttccaggatgacttgagaaacttctataatagtcttattaaaaacaaccccaaattatggcatggcccacctcctagcacacaccttcttttcagctgccactttttcacttggcagaaggctcccctgtataattttctctgtgtgcaagtaatgaagagcagagctctcatggaaagccctgttgaaccccatttcctagtgaagtggaggtgaagggtgggcagcaggtaactcctcagatttgcatctaacctcactccccacctcagcttcccatcatactctacaaattattatctgcactgcattttggtgggagaaagaatagattatttcttatcacaacattgtcaagaacccagagggaaagcagatccctatccaaagcctttagataggaacatttgcagttgtacctcctctaaatcttactggtttttcatgaaatccagattttaatcttttcaagtatggaagagggtacagatttagagtcacctttttttcctagttaccacatcatctgtgcacttttatttctcacactttccatgtttttttctaaaagtgttgtattttctacatcattatttgaggggaaatttggaaagaagaggggtccattctgtgaaacttcttatacttatgtatggatgtgtcttgctttgactgtctgctttctctagacttcttgtttcccttcattctctgtctcttctgggtgtttcctgcaaaggcattctcagagagctgagtgtggccctcaaggcagactgtatcagtcattggtgaaccatgtcatcagagatctgaaactaactagcttgcttgaaggctgtgtgacttagaattggcacacatgtagaagagtctgtctattttgttagaayacaggtttacgtaaatatcaaccagtttctagtttcacctctgatatttattatgtccattttaccgatgaggaaagtgaggacaagaaaagttgaataattgagccaaagtcacacttatctcatggggtgtctgggaggattaaagaaatgatatagcaaagtacttggccttgagtaaaatgttcactggagatatagagataatggttacattcatgttcattatatggtaagaagagatgtggaaaatgaaaaaaatgagtttaggcctattaaatagactggtatagtcaagggcatgtattggaagagaggatgatgggaataagggaaaaaacattaatgaatgcagttactcaaaatggagaaaaacaaggacaataaggaaggaatgtatctgaatggcatgagctcatgcgagttatgcagatttatwgcatgaaaagaaagtaaggtaccaagctagagactgtaaatttgtttaaggaaawtgccagtgtatcagcctattccaggactcaaagcaaagtagacacagtgactttacaaatgccaaacagagcacatcagaaattagtgtcttagttgtggagaacattattaccctgatggaaaaatgcacctgaaatcaacttattaaaccaaggtgcatgtctagaccctgtgagacaggggagtctcctggagacccatagttttcaatccaggaggggtcctttcattctctgctctgacttaatcacttaactttatgggtaaaaataaagggagtttttgaattaatttaattgagaagtccagaggtacagttgaggcatagatgaattcagaaccactcaaaagtatcaccaaattacttccctctcttcctctctctccgtctgttttcctggctaccatatgggaagttggcctgagaatgaagccaacacataggaaagcaagaatggccacaggcatccccaacttctatttagccagtttatcaacccaatccaaagacggtacctctcacctgattgcaccagcgagagttgcaggttcacagttttcacttgtctgacctgtttaaagtggtcatctcttagctagtccctgcagtcttggggataatgtgctgtcagtgacaactgagacgttttataccctccctgaaccaaatggaccaagactagacaaggacatggattcctcaaagaacaatgtggggaagggagagggaatgctgggaggcaaacgcaactgacttctggtatcataaattatacagaaatttaagacaaatgcaaagcaaacccaaagaacagaaatgaaccccctcctttgaaggctgtactctaaatctcagcggaaacttgagaagggctgtccttatcccctcatttcacgccttggccccctttcttgtaaaggtgcagtacagatccccctgcagtgaaagaactgggatcctagacagaggtgccctaaagaatgggagggcagggccccagcaaaggactctcagtcctccttccttagcttcctctgagagccttcctggggagcagcgatgctggcttggatcgagctatcttgtctgtgaaataaattgaaaattcttcacagtgagaagtacttgaccctgttatcaggatgaggcgggctgggttaatcgagtgacctctgtctgggagggttccaccagcctttatttgggatctctggtgagtgagaaaaggctcttgtgccctgagctggcctcatcaaggggagcgcgtgctgctgtcctgaggccagctgcttagatgtggagcaagccctgcccctcaagcatcccacttccttgctcccctcggagtcctcaggggtgaataaatttgtttctgtctctcctgtagggaggaaagaccgccatgctctatcgtgattgtttgtgatgctgtgctggggagataaggagcctaggtgtgttgtctttcaggatccttaaaggacattagaacatctaaaaagaacaaaaaagatgtgaaaaaaatgtcaaccacaaaaatatatatatttcttccttggctgtttttattactctacacggttggcagatgcagagcctgaaacctaaggaagaaaggaaaggcagatctcgatagggagcagggtgacagttttaagaaaatagaaatttattatgaaatggaattaataatctctattttctgtatatccacacattttgcttatcagtccagatctttttaacttggggagtcaaattacaaaaatactctggagtttacaaggaaggtcactgaagtaggagaactataaccaaaagtggaggaggtaagaggtggaccagagcaaatgtgtcaggaggaggtagagagaagcttaaagtgggtgatgggaaatccaaaggaaacacatatttatgacggatttgtgtcttcatgaaccattatccaggagaccccttaggcactttaatcaggctaaatttgtgtgtgtgtttgtgtgtgtgtgtgtgtgtgtgtgtgtgtgtgtgtgtgtgttatgaaggaatgaaattgagctactgttaattagaatttagtatttggctccattgcttccctgtcattcaatgcaaaaaatgtatgaattgggaaagatcttcctctgtttaacacaaaaggaatattcctcaactgctacttgaagagactttaatagtgtggcagaatcaagactgaccaactgagccagctcccaggtcatcccaggcaacaccctctttaaacatggcactagaatgctattaagttcagtaagatttgcattcatcctaccaccttcagaataaatattcgtattttagcccagtgtagctttgccattaatacatttgtctaagcccatttgcatctgcatttttaccttgtaccacttatttgggttatgtgttctatgaatttataaactactctactgtccttaaaacttttattttttcatgtttcaagaattgccactttacttctgatcatctgatagtgtttccccctcttgatttcattagaaattgtttggatgttgaatgtgttctttgtgtggtaaccatcactgtgtgactaaatatttccagcccactgctttcagggtacatgataggactgtaccatgagtctattctgctggggcagagcctcaggactgtgggagcagaagtgatatgtgccacttccaagctaaagtattcaaatgcacattgtagaattttgctagctccttttccctcttgtgctgtatgtaatgaatggaaatgcttgtgatggccgctccaccagccagtgtccctgtgtgaccacagggagcccaacaccactgcatagctgccatggatatgacatgtgagcaaaaaattgacctttcttgattgaaggccctgcccacagccatatctagttgattctgagtgctgcattcaatcttcctcttgtgtgaagaagacaatgaggaacattggtgttttccctgtcacaggtccctcccaagacatccttttgatgatagctttcctaaaattcgaattgagcctccactgtccttttaagtgggactttaaatgaaatgtaggttgcacttgaataataggcatattccaccaaataggcagataccaagaataatgtgttgtttctatggcgtgattgtttagctgatgtggaatagaaaatggactgtgctggaaagcagcagaagagggatgactgtatacaggataaatgaaatttgttaagacaacacgcttttcaccagacagaaaaagaaaaagaaataaattcaatttgctttagcaggttcagtctccctcctagaaatcacacagtatttcacttgagtctctatcaggcaagtgtttttcttctcatttaggctgttgccatactttccagtagaatgcagtttattctactcctttctatagccgaagactctcccaaacattacccaattatgcaactggtgaacagaaagtggcccctctgaggatggtgttaggaaatccccactcctgtagcccatattggtcactgggcattggggctgatgttttaacttcgggtgcttcacagatgaatgagagaaggcagcataattaatataagtgctgtattttctcatcttataaacctatcctgccagacgtctctccaactctcttctgctgtctctctctttgtcagcttgttcaaggaaaatatttttaatggagataccctaggattaggagtcaaacaaagccaaagtctagtctcaactcttcaaatattaactgaataaactttggtatttcctttaagctccatgttcctttccatgaagatgccagcactgacacctaagatgtgttctgctagmaaagatagtaagaagcaagcaactttaccaaaatagtgttcacagcatatataatgtcctttagaatatatgtaacaacttgtaatcttttgaaaaaatacaggataaacacttctacaagtggtgtggaaaacatctaaaatattgtcaaaatctgtcaacagtttcatactcatttcagtagaaaagcacatggttctaattgagattattcttatatgcaatgtaaattttatttagttttgttttcttatgcaaattttttctcacaaagcatgtgttcattgttgaatgtcctttgatgcaagttaaatatatgaaacgtactttctgttaccagataatttttaaatttaaatttccttcttaaaattttgtaagtgacacagatagagccaatgaaacaatgttgtaaaccaaaacaaaaccaagtagttaattattttcacaagggtctctcctggagattataaattaaaaatatgttattttgataaactccattttctggtttagctattggtatatctcacttgaagagaaaacattctcagtgataagaaacaaatattgcggccaggcacagtggctcacacctgtaattccagcactttgggaggctgaggcgggtggatcacttgtggtcaggagttcgagaccagcctggccaacatggtgaaacactgtctctgctaaaaatacaaaacaaacaaacaaacaacaaaatagccggatgtggtggcaggcgcctgtaatcccagctactcaggaggttgaggcaggagaatcacttgaatcagggaggcggaggttgcagtgagccgagatcgcgccattgcactccagcctgggcgacaagagcaagactccaactctgtctcaaaaaaaaaaaaagaaagaaagaaagaaagaaatatggcttcacctggttgaaagtggggagtctttctcccacaaatacatgtagttccctttagtccatgtgataaatttggcaaaacaggctaattccctcattacttttgaccaagtctttcatatttgaataaaaaatattttttctgaaattctgtatctgtgtgtgtgcatgtatgtgtgtgtatttcatagctaaaacctttgtgatagacctctaaaaactccactgtctgattcctataaagactctgccaattaaaagataagaacacagaggaaaaccattgtatgcaatctgtgttagaaatccacttctccacttctccttctccttcccctccccttccttctcctcctcctcctcctctttttttttttgaattagagttttactctgtctctgaggctggagtgcagtggcatgatcttggctcactgcaacgtctgccttctgggttcaagtgatttttctggcctcagcctcccaagtaactgggagtacaggtgtgcaccaccatgcctggctaattttttgtagttttagtagagatgggatttcaccatgttggccatgctggtctcgaactcctgaactgaagtgatccacccacctcagcctcccaaagtgagccactgtgcccggccagaaatccacttctgtaaacctgaatcattctggttgattcccagcacccaagaaaagaagtagcctaatacacagaataaagttgtttttgttttcagcatagttttatgacaatcttgtttttctgcattgtttgctaaatgacagcatttgaaaggctgggcttgctctggatcccaggtgctcaacgactgggcagtgatggtcatcctctgttcctgttgttcaggagagaagtttatctgkggggcagttcagttctgtcaccaatcaggggcttctgcaggtgactgtctgtttccaaactaagccatcaggccctgcttaacaaataaagggattaaaggcgttattttggcmactcactgaaggaaataaaactcaacaaatagaaaaggaaaaaaaaattaagaatttaattagcagaatgatggtcagaaagcatctaattagacttaaataacatgttaagtaaaatattaagtgattattagaatattaaaaataaggctagcagaccagataaaagtaataggagtgggccgggcgcagtggctcatgcctgtaatcctagcacttcgggaggctgaggcgggctgatcacaaggtcaagagatcaagaccatcctggccaacatggtgaaatcccatctctactaaaaatacaaaaaatagctgggtgtgttggcttacgcctgtagtcccaactactcaggaggctgaggcaggagaatcgcttgaacccaggaggtggaggttgcggtgagctgagattgtgccactgcactccagcctggcaagagagcaagactccatctcaaawaataataataataataataataataataataataataatataataggagtgttgttatccccgtaacttttcagaaattcctcaacattataaaggacacagcaaatggagctaggttttctactctaaacagacgaaccattttacctcatccataaaaccttaccttacactatttctacccaaatgaagttatttgccccgtgcttggggttaaatatttcatagtccagaattccatgggtctgcccggtatccgtgtgtcagcctgaggaacagtttagataatatttataagcatgaaataaaggttagccaatttgttacttacgttgtggctgtactttgtttcaattgcatattttagcagaactatatttaccatacaataaatattcataaagtgttttgtgaaaatcacatggtttgggaaatagaatggaagtaaaatgaatatatattaatcttatcggaatgtgtaaattgtatatacttcttttaagtcctcatgcataacaaatgttctctcaaaagactgggggtaagttttctaagatcatacagaataatttttaaagagtataattattttcattcactaatagtttcttctattttgttgcaattagcacgtaaagacaggtcatgcttaaaaataattgtatctgcatattctggaattaaatcaaaatcatataaaccttatttatataactcacgggtataatattgtgataccttggtgaaaatagtaaatatttctaagcttattggtttataatcagtatgacacttttggtgtcactaactatgcttcttttttcagatatcagaattgctgatccacacgctcaaccaaaactcagtacacttcgagctgaagccaggagtccgagtccttgtccatgctgctcacttaacagcgggtcagtgtccatgtcccggggttctggctggtggctctggcaaagggaatcctagtccgtgcttccttcctcataaaaaggctagatggtaacaatgctaatcagaaatcaaatcagtcatcggatcttggaggttcccttgcttggtgtttctgccttaatggagaaccgttaaacaacagaaaaaggtgacactttcagctgggttcagtggctcatgcctgtgatcccaccactttgggagactggggtgggtggatcacttgaggtcaggtgtttgagatcagtctgaccaacgtggtgaaaccccatctgtactaaacatacaaaaatcagctgggcagggtggtgcatgcctgtagtcccagctacttgagaggctgaggcaggagaatcgcttgaacccgggaggcagaggttacagtgagccgagatcacgccaccgcactccaacctgggtgacccagtgagaaggtaatattttatacttagtctctggcaaaaactgtcagcaaaccgcttatatacgtctcacatggaagcatgctttatttatctcatcagaaatcctgaaaataacattaacaaatacatttgtgggggtctttctgcaaagtcttattttcaacatattcatattacaaagaattttctttctttacgtttcaggataatgtaacgcagtagagatagcaggaacttaggagtggtacagggccacacccaggaattgaacctggaattggtcatgatcttacaatttacttaatgtcattgagcttccatctcttcaactgagaaggtggtggtgaggatgggggatcctccttctaagcttatggagagttttcaataataatacaagtaacttagaatagatgataacacaagtagcttaggatagttttcaatgataatacaagcacttagaaacagacattgttgtgatgtattaataataaattaacaatatttattgagtacttatttttgcagagtaccatgctggtgctccatggagtacaaacaccagtgcaaagtggtcttcatcttcacaaaacttataacctggttgtggtgtggggaagttcggtgtagcaatggcagtggtactgtgggatgggaagaattggcagtggagagtagtcagtgagcaaactgcataaatgcttatagagagagagactacgtaacatatttaagcacttggatttttttttccagtcagaacattrgtttcaatcttggctttgttactcactatggaatcctgggaaagacatttaacttctgtatgtctcagagatggtaatagcatctctgccagtgggattgtgtgaagattaattcaggtaatgcacttaggatagtgtctgaaacatagctttaatatttatttttactgttattattattagcaactaaagctgtataggaaatttaaagcagrtatgagttatatcctgtcaaaatgatacaggattgtttcatggagtaggtggtttcgaggaagaaccttaaagtatggatagcattaaatgcaagaggtcattctaagcaccaaagcaccaaggaagtaaagcctaaagggctttggggatgctgagtaaatgaggacaaaaagtagctattgcaagcaccattctctggtttcctggagatttcacgaggctctgctaggtctagcggaaggccaagcaggctgaccactgacttcttaccttcttggattttatcttttttctttattggatttcatagaatattttattgctcttgttgttttttcaatcccactatttaaagtcactgttcctcagcatggagtatggaggtgtggagggtggaaacatgccagggtgtgccgtttgtacttactttagtgagtaagccatcaaaggtctgggaagccatcaagacctttgaacagaagtgtgactgattcagagcattccttgaaaaagatgagtgtaaggagcaaggaggattgagtagggcacatctcctattctgcatcttttcaccctaacacatccattgaacagatatttaccgagtgcctgcctacgctgggccaagcaatgttgtcaacataggggacagagtctctgccctcataaactgctattgctggtaaaagccactttctgaatcgtatgctggtgaaaattctctgaagaaaaggctgccactgccaacttatctcagggcatttgatggtcctgactggccttttcctacccaaaatgttgagctttggtgtttggtgaatgggggtagcacatggcagagtcacacatgactagttgtatgggagaatgatcaaattccagaaacaagagttgtagtcatcctaatagccaagccactgacaaatgtcaactgagtagaaartaaccactgaatatcgttttaaaaagattcactgatttatttcatctaatcagaccatggagcctgtttaggtagcagactgaacttcatcagccactacttgttccctttgagtttagaaattaaaaacaactaagccggatattccatactgaagtctgggtttgaagggatgtggccaacttgtctatccttcatratgcaaaatttgcttttatagcataagcagcctttgaatgaacactatctttaggtttggtgtatccgaacacagtgccttttttagtccggagaccttgctctgttgaacaggagagcactggaggtcaagctagacctggaactaaccctatttctcccattcttcaattctggaggccattcacatttcactctttttcttccttccatacttctcctccatctgtgtctggtttttatttaactgattattgcattatgctctaatgatggttcagatcattttggaagataatgaatgttcccaccacaaagaaacgataaatgattgaaatgatggatatgttaattacccagatctgatcactatgcttatgtatcacagcatcactatgtaccccatgaatatgtataattgttatgtgtgaatttaaaaaattttaaaagattgatrtgttaaccgtatttaactttagggagaagtggtatgtaaaaaaaaggaaaccttattttaaatgttacttaaggaaactttcttcaatgacaaatagtttagagctgggaccaagctgaaatattgagatcaaaaagtgggtaattagctgagactggtttggccagctggcttggccagagaaactgaatacagcaaaggcatccaaaggtccttggatttatagctccatgtgggaagggaagtcaattcctgataaccatgatatgttaatcccactggtaaaaactccagatgacaaaaaataatgcaaagttgggaagaactgaaaaatgtttccaattcatgtttgtagttttttctataactaggagtttcggaagcaggactaagactcctgggaagaagggctggcaaaagggaggtatattttggggacccagatatgcacactgagatttaaagaagaaccccttgcagtataggtatgtgtaacacaaagtcaccaaagaaaaaaatatccatttccaaataaaagcccaatcttagcctggaccaatttggagagagtgagaaaattctttgacttccaaccattgtagaaatctttcctgttagttttgatagtagggtctttcggctatataattccaagcctgatcaactggcattattaagttttctgtcatggctagttcagcaactggagtagatatagatttatatgtggataattagctccagtttgataagtaaacaaagataatgtcatgggctgatggaataactgagttttggaaacttttgctatattgagtttggctatgctggtcataacgcattagagctggcggtgtccacaggagcacagtcactcagggctcgattttcttatgcaaaagacaaacgtgtcaacgggaacagcaattgtgataaggaagtaaaatatgggagggatctgtttcctgttggtgattgctcctacgttacctttagctacctgattaaaagaaaaaaagaaaaaaaatatttgratagggtggtagaccctacatatacaaaaaacagtggagggaattcccccttcactcatggaaaacttggcactttggtagggtatcggtgggccgagacacacttgccacagttttgtttctttttttttttttttttgagatggggtctcacccagtcacccaagctggagtgaagtggcatgatctcggatcactgcaacctctgccccctgggctcaagccctcagcctcccaagtagctgggaccagattcatgccaccatgcccggctaagtttctttgtgtttttggtagagacagggtttcaccatgttgcccaggctggtctcaaactcctgagctcaagtgatctgtctgcctcagcctcccaaagtgctgggattacaggcatgagccaccacaattgcttttattaggttgaaattaacacattaatatttgggtggctaggaagagaaggagaaggaagcctgaaaaaaaaaaaaaagagaaacagtggggaggagtattagatgtagaacttccacatcaactctatttctctttctctcatcccccctgtaggcaggggaaaataaaaattaaaagaaaaaaaaaagaaccattgttagcaacatttcatgtctcataagcaggattgctaataccttcccagggaccattacaacatgctgttgcatcccattaattgctcagcagatgttcagcagccttcttttaaaaatgtttgagccagagtatgttgttggtgagagaagcaaatgcataatttggtttgtctccaaggaaaaagaactgtctcttttcaagaatttactagccttattttggttttcagattcacttccctgtttgcttttatgggaacacaaggaaagcatttgcagatacctgaatgtcattagagactggatggtgtctgccccccacccaccaacacgttccatttgggaattcattaactgtggtatctaagctgagctaaattttgaatgtagtccttgttttgttcctagccattcctgtggttcttggttttcatgcagtttttcttaagggwctaaccactcctgacaggtatgtttctgaaattctctttgcggaaaggagagacttgaacctgtatgagaataagggagaatgagaaacatgttatccagaaggttgagggagggtcatggcctgagtggctccctttgacttttagtacctgatggcagctggcatccatgtttagcaaacaaaggctatgatgttgcaaaaacaatacaaagagttggaaaagggaatagaatgcagtcaagctagtgttagactggaagcactgctgtcttgaccaaagtgtacgtctactcatgatattccagattggaatatttctccccacttcttcacctatttctccttgtccacctgtactttaaggctcagttcaatgccaacatttgcatgacatctttccagagacatttgcctggacaacatcttccccttgtctgaaatcacatggatttctagatctttatctgtctgatgttgatgatcatgaccatcaccttttgaatcactcctatttaatttcttttggatatagttcatcatgtctttatatcagcttcttcatatatctttatatcatcttcatcattttacctagcagataacttgcacatatcaggtgcttaacaaatattgtttttatgaataattatatgcataatttatagcctgcagagatatattcaaaatcccattcccgcagttaaccttcagatccagtttattcagtttattcatttgtgaacctgtccccatgacatgcttcttcttatcaaataactcatcagtggagacttgcattcatttacacaataagcatctagggaatctttgtatttttttttcttatggcaggtgttctttaaatatgcattgtaattgtttatatacacattgtggggaatgggcagttgaaagaaaactgggcctatccttcctggagttctacgtcccagaaagagagatctgagagagaatgggagaacgactggcaggcgactgttaccaaaagagactgaatcactggtccctattttattgctctggccactggaagacatggtttcagtgtcagagcagcttcacttcatggcatagctcatggtcacgtaccttggactgcacactcctcaccttaacaaaccagccaaaccttcttcacatcttctgtgatgcctcccttgtcctccccatctctcgtgtatgcatttgccctagccttctgtatcgtgtatcttaagagctataatgggctgggtgcactggctcatgcctgtaataccagcactttgggagcatgaggtgggtggatcacctgaggtcaggagttcaagaccagcctgaccaacacggtgaaatcccatctctatcaaaagtacaataattagccaggcatggtggcgtgcacctgtagccccagctactcgggaggctgaggcacaagattcactttaacccagaaggcagaggttgcagtgagctgagatcatgccactgcactccagcctgggcaacagagcaagactccatctcaaaacaaaaacaaaaacataaaacagctatgatgtcattttagggagagtttttctagcaagaatctggaaggccctgaatctaatgcacaccatttgatccatatagttacttgtggaagaacaaacctgagccgttaagaaaatatccctaaagtgccaatagttttctcattgaccctagtaacttgaaatgtactcaagggcaggatccatttttagatttatcatcttattcttcacatgactctatgccttactttgaaattattcctttaaacctatagtttatcagggcatatgagatgagtgagggccctcactcacactgagctggctagacctgaggcacaaatactagttgcatgaaactttactaaattctaaatgaggagaatgaaaaaatgttctatgcagaagattcagtaaagctgagtctttaaggttgaataggaattcaccaaaaaaagagcaaataagcattgcaggttgagaggccaggttgcacaaaggcacagaaaggtggaattatatggtttatgtataaaattatgtgttgtctgacatggattggggcttctagatatataccctcaaatattcataattagtatatttactgagggtaaaataatgagcaaagggagagggataaaattcaggaaaaataatatgctagtatattataaactttgttgtccatcatccattgtgcgctagtgaagaaattttattaatgcaaatttgagatgataaggtataatgaatttggaaaatgaaaaaaaggctgctagaaggattttggggttttttcctttaataataggtttgggcaaaactccattatcatttctatttttaacaaagtatttacacacaagtttacaactcaagtggcaagtggcaagatatggtaatttgtttagtcgagatggagacctgggaggtggagcttgttttttttttttttttttttcgtcgtcaaagacgataaatttggtggttcatgttgggttggatgtcatcaaacatataagtgaaaaaccccatcaggaagctggaaatatggaatggaaactcaggtgagaagaccaggaccagaatatacattcaactatgagctttaatttaccatctcatagcagatcatcaggtgaggggaatctgctgacaggtgataagttaaagccttaattgccgatttaaatctttcaagctctatcaaaccctgtatctttgttctcatgagaacccttggtcatgagtaaatttagtccttatatttggtggggagaaggagggagtgggaaatgacttgaaaacctgttgactcttctaagacagaataggtaaggtttccatgagaatagaaagtaaaaagagggcaagcaaggggcaacactgacttttatttgagaaggcaaaagcctaactagatggatacctcctaaatagcaaataacaaccctttagggattatgtgcccttcgtaagttatgtactgggcaaatgaactgcaatttggatggtgggacttctgctcaaagaactaaaagagctggagctgactagttccctcaaagcatttgagatacatgaaaccctgccccatagttagaaaactctttccaactcagggtgggagatatctgctataaatagcagctgttctcaaacgtgactttacattgcaattaacttaggaagctttataaagatagagattttctaagcctcaccacacacagtgaagaatcccaaggagccaggaataggaatcttcttttttttttttttttttttttttttttttgagatggagtcttgccctgtcacccaggctggagtgcagtggcgtgatctcggctcactgcaagctctgcctcctgggttcacgccattctcctgcytcagcctccggagtagctggaaccgcaggcacctgccaccacgcccggctaattttttgtatttttagtagagatggggtttcaccgtgttggccaggatggtctcgatctcctgacctcgtgatctgcccaccttggcctcccaaagtgctgggattacagccatgagccaccgcgcccggccccaggaatcttcatttttagcaagtttctgctaatgatgcttacgacggtggcctcttcactggtcttaacaaccactgttcaacagcctttcacagacagaaatccatctgcataacaaggaaaggtgaacgactatctccagtaataaatctgatttacaactcaagccatccactaaaacagaagcatgaattaaataaggagagcctgtgatattaagtacaggaggaaattagtaataaatattaaaatctaatttcttggaatatttggagctaacctaattggcagaatgggcaaatgacaatgaggaagggggagaaaatgaaacatgcccctgaatctggggcatattaaatccataatctagatgaatggcaaaggccagccaagagctgtggccatgaagcagttgaaacatgattaaagtgtgaactggaatcttaatggcagatgtaattgaacagccttgagttttatgagagttaaacaaataatattatctagatgctgttcatgtgccagtgtgagcataaaatgatacagctacatttcactatatgtctgtacatatttcagaattcagaggttgccctacgctgggctttccagtttggtcgctgttcgtctggagttctggataaacgcacattataaaaatggtaaagggttaatatttatcaaaggaagagcctcaaacctcaggttaaataaaaaaacatgaccccccccmaaaaaaatacacaggaactttgcttctacctcctcctgtctgtctatcagttgccttatttaaactgctcggttcaggaaaactgtcctttgtcaagggtatgtgtgggttttttaataaaactgttatcttgtgttatcttggcctctatggctgctgctgactggtttaatttcttttgcaggtgtaataaaaagatgttatcacagagatattagagaattaatatttccaggcttcagttgctaccactggatgtgttatgagtaaatttgggagggaataagaaacttcaaatttygacctaggtcgtgatacatcatgaattctgcactacaatttcacattgagaaaaagactttccacttgaagggagaattaccgttcgtcaagaagttttagaaactacaatataatctcagccacaacattatggatgcagatgccaaataggagttgtggaactctgaactgtaaagtgaagtaaattgttgcmataacattttccatttagggatgaaattagtactggtgaaattcttccacagccagtaagtttatctgtctctttagttttcggtcaccgtattatctacatagtaatcatttacaagtcttttttaagtaaagccttggtaccgatatgttttcttccttttatttttccccaaaataaatatattttttatcttcaagtaattaggtagttgcacagatacatagacccagcggcttttcatagttatttaatcattatggtgttataaacaatagtgggtttatcatgtagatatatatctaaatatatccctccccgcaatatgattaaatgtgatattttcatctacctaccagcgtgcagcaatgaggttgctcgttggcttcgtttagacacagaatctagttctgttttccagtctggagggcaggggcacatcatagctcactacagccttgaacacctgggctcaagcgatctgtctgcctcagcctctcgagtagctaggactacaggcacgcaccaccacatccaattaatatttttattttctgtagagacagggtgttgctatgttgcccaggctgatctcaaactcttggcctcaggagattcacccacttcagcctctcaaagcattgagattgcaggcatgagccaccatgcctggcctagcttctaataaattctttcttcaccatttctttttttctgagattacgggggaccgtaaaaggggctgaaatgattacagggtaactagactgagttagccaggctagaggatatgtctggaaactcttggtcagagaatggtcagcaaggaacagtcagatgaacagaaacaggggcacaaacatgcgtcagaaatgcagtatcccaggggaaggcaaggcagatagtcaagagaaattagcaaaaagaaaaaaaaaaagtaaagcaaaggggaaggataacacatataaaatacagacaagatgccagaacataggacaagctaccctttagacaccaagtttctgatacctagagtgatcaggactgtcctgggttatctatgctatatcagcgtaagctttaatagcgccccctttcattcttaaagtgtcttatctttgaaaataatatgtatggtcttcttacttttaccctgccaccctgagagtggggatagaagactataccaaaaattggctaatgtggagctcaaaggtaataattggtaattgaatgtttaaccagttgaaagagacttttgaggaaagtaaataagctattgctatgtaacaaaccacctagaagttcagtggcttaatagtaagcatttatttttgcttatgcgtctagtcttatctacattcacttgtctgtctgcaatcagctatgggttgttggttggggagctctgctgatcttggctggtctgtctcacatgttacgggtcagctgcctgcaggctgctctagcatgctttggttggaataattaacctggcctctacatggcctttcatcctttgactgttctggtcttgctcacacatggcagtggtaggattccaagagaaaaagcagaggtatgcaaggccgtgaaattcacaattagcacaccattgcttccattgcattccattgccagatgcagattataataatagctcagattcaagacatgaagaaacagattttacctcttgccttttaggtgagacaagcttcaaactcattgcacaaagtttagacacagagaagggtagaggattgagccagcaatgtaatccatatctacatgaggctgactgctcacttaggggagacttgagatgcttttaggtagtttaacaaactttcttctggagccatcaccagattgagctactatcaacagcaaaggggaacatttgtgtgtgtaggggggtatttttgctttgttttagtgatccagaaaatataaaagtcaggcatgccctaaagacaggactggaagttttatgagtgagaatatctggggcctgctatgcggtattctcaaactgttatacataataattacctgggtaccttgtcacatatatggattttggagacctactctcaaagactatacatttttttttttttttgagacagagtctcactctgttgcctaggctggagtacagtggcacgatcttggctcactgcaagctccacctcccgggttcatgccattctcctgcctcaacctcccgagtagctgggactacaggtgcctgccaccatgcctggctaattttttttggactatacatgtttttttttcaagtgaagcctagctaacaatattttcacaagtgctccaagtaattctgattcaggtagtccataagctacactttgaggaatatttcacatagtagccaggaatcatcaccttccaaccttagaaaaccataagtcattcttctcctcttgtctgtttattatgatgatggttggtcttggagttactgatgtttgtcattacttggctaagtgacctcaactccctgtcactggatattacygaagattcaccctcagtttaaattcagaaacaatgcttcacttgtcattagagctactaaaggacaaactgagacacattaaaatgttaaagagtttatttgggcaaacaatgattcattaatcagttagcactagaccacagttgatttagggctccctaaaaggcatgaggcttttatggggtgaaggtgaaagctaggcaaagaaaatatttgatcggttaaaatggaggaatagccttctttggataattctagtagaaagtctctcattagatattagctagtggtttctaattgattaagcttaagttttgttttcctagaatatgactgtttactctttacttgggttttggtttggttacataggaacccaggacgccagagctgcctcagtctaatggcctcccaattggctactttaacaagagacttccctggaaattcccacctagtctagtctgcagtcttgtggctttttcccaataacataggaaactttaagactctgatgattggatttgtttctaaatggagggaaggcccattggacaactgaaagtgctctgtaaatggaagcctttctgcctattctgcattctggataaactttctctgtgctattcccatatcactgtaatttctgaaaaaatatttcagaccacatggattttgtgatattcaaagcatataactcaagcctgaattgagtctactttggggtcaggagaggaaaaaagaatatcaaggtatggtaaattacttctacaacatcctgaaaacactaactcttggattagaattagagttgaaagtttcggggtcatagtgcaagtagcagttctccaggaatgtccttttgatagaatgaaagtgaacactggacaacaataagattgttctgcatggcttcactgggtgatgctaccatgttattgaccttaaaacttggaaagaaaccgagcaaagggcaaaactgcagcaagggggaccgggtgcaatggctcacacctgtaatcccagcactttgggaggtcaaggcgggtggatcactcaaggttagcgttcgagaccagcctggccaacatggtgaaaccccatctctactaaaagtacaaaaaaaaaaattagccatgcgtggtggcaggtgcctgtaatctcagctactcgagaggctgaggcaagagaattgattgaacacaggagaagattgcagtgaatcgagattgtgtcactgtactccagtctgggtgacaaagcaagacttcatctaaaaacaaaacaaaacaaaacgaaaaaactgcagcaacagggaaagcagtgcctggggagaggcatttcctagagtgttatgtggaacctagttctgcaaagggtctgtggtcaaatgagtttatgaaagactatggtaaagttaaatgtgttcttttctgcaagggctgctgtgatcatttaatatactgatgtgcattgtgaatctccatatggggaatgttgtatgtatcattgccccaaattatctcaccagggaactgtcatcatttttcaggattttttttctgtagaagaatacactttcagaaatatgatagcaataatatgacaatgttagaaatattgggcatgtagtctgtcccaaatactatgacagtactttataaattccatctcattttaatctcacaaatttctagactaaacactagtttcgtctccattttgcagatgaggaaactgagatttaatttaagtcacttagtctataagtgacagagccaggtttgattctgaaaagggctcatatcattacttaaccccaaatgtggaattttgaatttgttctcatacatacaactataaccatttatttagcacttactacgtggcaatcacttttcacaagaagattgttgttattattgtaagtgttcccattattatcgttccaggtcctcatgaataaaatataaaaattcaatgcatttccaaattcctcagaggattttagaaatgatatgtgcaagtacgcaggcttaaaaatgttgagtcacttggagtactgctggtatccatgttttactttgtgcatgaataatggcaaaaaactgctcagcactttcccctacacgtctaccttgtttaagctgcaactggaaagggattaaagtatgctaattccacacaacaagctaaagcccatttatcacaagtttccatccctcagcaaaacacacacaaatgcacctaagtgctgggcaaactaagaaatgcagctgctgttgtatggagcaataataggtccctttatactcaggcaccaatcagcaagcagacaccacccacggaacagagggcagtggtagtcagtctctggccactgctgctggctgcttcctgcttcctgcttcctgcctctgagaaatgactgactgatgcagagatggggagggtgaatggataacacacattttagaactgggatacagaagttcattttcccagaataatatgctaattacttaacagtgttaatgctgcttgttgaagaatgatgatttaagtgtaaatgatttagaatcgaaagacaacctggggatggggagagataggaggaaggaaagagaagggaaaaggttcatgtgtgtgtgtgtgtgtgtgtatgtgtttgtgtgtgtgcatgcatgcatatgcgagtttgctgtgttgctgacagcttggacaaagtaattttctctcagttttccatttatttcaaatgccaaccttttcaagcaagctcagtattcttagttgcttcatatcactggtattctggttatgctgaaagagcatttagttaggagtgaaaagtttagctttatttcaacctctaaccatcccaatcatctgtggccccttccgagcctccattgttccctgacaaattaagggtttgcattagaatattgcctttaaaacatcttcctaatataatttccttgatgtgatgatggtattgtggtaatgatgagagagagagagatcttatcttttagagttataggtggttaaattataagttttccaagatttatttcaaaataatccagtggttggaggttgtggggactggataaaataagactggctgttggttgatggttgttgaagctgagtggtaggtacatgaggcttcatttctgtattctgtgtgtgtgtgtttgcatgcacacatacatatccatacatatatatacacatatgcatatatgtatacacatacctgtcttccaaacgtaagcgtacatgatttattattcctactgctccttttaaaacttagtattttaacttgtgctccttgttaatttgctttttgtgctatagtcttagtcctaatccccatcctcagaaatatgtcttttactgaaattagcccaggattgagtatatagaaagtgtgtgtgtgtgtgtgtgtgtgtgtgtgtgtgtgtgtatgtatgacgattcaggttcaagtcttggttcttccatttactagtaagtactaagtccttttaaaacaacactaaccaatgagaacttcattgttatctgtttaatggggatcatagtcactgccttccatttgtgaaaatcaattgtgataatgtctatgacaaatggaaggtgttctcttcccctgatgacatcctaccagttgcagggtgagttctgaagaatttctgaacctctctgccgatggcattgagagctttgttttctaattttgaaccaaaagaaaatttgccttgggcgttccayggcagtgggaccccacccatcttttacacacaaacctacatattcccatttcaaaactgaggtgaagtttgacttacaggggagagaaaatagcgggggggttccttatattcagtgcctcctgaaagccaactctcctgaaatgactattttctgagaaggaaggggtggctttcatttttcaccaaaactatgtggttagatggaatatgcttcccagtatcaatacagagtggccgagatgtaatcctgaaaagagtagacagagcagaagcaactgagagtcttgtctgagaccatcagtattatagtcacttattcttgaacttttttacctgggtgattagaatgttgccctctcggctcacaccagagaaaaccacagaaaatggtgattaaaggtcacctgtatttctgggtatcaggctttgcttaagttgatggaaggtaaaggtcagcaccaaggcttccctggagtacatgtggcttgtcttttatgcacgagctgcactacatttgcaaaatgtcaacttttaagagggtagaaattaattgcaaagtctacaggtacaacaggtttgactgtgagatgggggaaggtggagaggtggcgagaagtgttttccagactgcacctcaaggggaaactcagggagggagactctttcatggaggcagaggcttctgttttgtctgagagaaaaactcactgtgtttgagaggctggagcatcttggggagggctgtcagagcttttgggagattgtggagacagccaggtggcatatccctccttcagcatctccgcggctaccctcgtgaaatactcacttggccatcagtttcctgtgtacaaaaatacaagcatgctccatcactttgctgttctttctctcacgtatgacaactttccaattatttttctcacatgacaactactggagtaggggtgacggggtggttgaattcacaaatgtattcctgcaggtggttttattggcaatctgttttgctttgtggaaaaagcttacactcagagtataataaaatataattattatattataaatattgattaataatactaatactagcagcagtagaaatgaaatctaataggtacatgacttactatgtgcctggcacttttctcaatgcgtaacatacattagctcacttaatcctcataagaacccaatgaagtatataccattatttttattttaccacataaggtacattaaggtgaagcaaattgcccaagaccacatagctagttagagtgggacctgaatccagacagcctggccctggggtctgtgcttttcattgctctgctgcagagcaggaacatttggggtgggagtaggggtgggctcagatgcatcccatgtcagccatgtgacatgcatcttgtgtgtatatcccacatggttttccrggacttacctctgcttgtgtgtgaaacatttgagcctctcatagagtctcacctgcccagttctctgctcatttttctctgctctgtttcccccacaagcccccctggtggacctcactccaacccacagtggatctgccatgctgatgctgctctcagtggtgtttgtggggctggcagtgttcgtcatctacaagtttaaaaggtgcgtgtccstctatccacgttcccccacccctgacctcttccttctccctgacaggttcagaagcatgtgttacagtgatgtgcatagcagtgatggtttctattaatattttaggaagatcccggggattaatgtttatgcccagatgcagaatgagaaagaacaagagatgatcagtccagtcagtcactctgaaagcaggcccartgtccctcagactgaactaaggaggcctggccagcttatagatgagaaggtggaatcccagctcataggtaaatgattcccagtagccaccagctgttcggctgagtaggcaatggctgactctctctctaacccctttctggcttgacataaccactttcttttgctctaacacccctgagagaaacagctaagatggctttttccctgcttcctctgattgggatgggggaaaaacaaacaaacctcttgcttctatctagtttttttctctcattagtttattcctccttttgcaaaaccctccctaaaatattgggcttaaaatgttaaaatgttatatgtttatgggcaaagagcaaagcatttgctttaatagtatataagaaggagaggcctcagaggctaaggctggtggaccagagggctgggcagggtttgcaggacatggtatgtattgactagaatgaaacatggtagcctcaactggatacagctcttaaggagggcaaactgctctggaacaccagtagagaagtgacataatgagagtggccagcctgatcctccagggaattttttttttttttacatctattggtagtctaggaactttccctcaggagatttggaacctaagattgaggacaagaggcataatgtttgcagacatccaggcagtagagcatcctgagagagaccactggtgggtgagactattacagagcagattagcaaatttcttcctctttttagactgtcccttaccagaagttgtaaaatggactttctcatatttcaatggctctctctctgcctgtgaagtaggcatgggaatccaacaacgaggtatagagaatctgacgttcacttgctagattctgctatttattgcagcagaaattttccaggaagctagacaaacctatgaagccactattgctgatccatttctctgtctggttcctcctgtctgttggcattaggagttgaagccttatatgtttacatctagatcctgcattgctgacaacagtgaataaattattatataaccattcatgctccactctaatgtgataatgccaaaccacctagaaggcctttacataaaatttttaatcttacttggaaaacaatgagtatgtaaacggaaacataaccctctttaaatgaatatgggaaaggtctgtggctgtgttaaggggaaatgtaaatgcagtgactggctcctatcatagataatgataacaactgcagtcacatctggtgtccgattttcacagtgcactttcttttatttggagaggcaaggtaataaatgtgtgattgcttggggctaaaaagaaaaaagtcttttctgccttcaagtccagagargcattcaccctgtctactcattcctaaagcttctaagtgcatttttggggatcgtttggttctcagtcgcatttccgtagggtatgaagcacagcctctgtttgctttattaaagtagtaattcctccttctccaggaagatatcgcagcacattgcaaagtctctgacacctttccctttccagtgtcattaaatgagtaagtgttacacrttttctcttaggagagtagctttaccctcccctccctccccttctactcaacctggtgactcatctctccgattgcaaagagcaagacacgccactccgccttcaacgccaaagcggggatctgctggggcacagtatgcaatttaaggaaaacccccaaaggctacaggcgacctgctgatcaggaaagaatttcgctcttgtcaagtacatcatccttcatgaccactaactttgtgttttttttctttcctttgttgttctgtttcctattttgccaggaagtatttccatagttgctgagaatcaaagcacaaaagaaatccctacctatgtaaatgtttgaatggaggacgccagtaaaaaaacaaaaacaaaaacaaaacaaaacataaaatataaacaatcaaaatccaaacaaacaaacaaacactcactgcatcgggactttttaattcttcagacacagacaacaagggtttttagctttaagcctgtgcatgtggacaatactctgagaacatgtctggaggggcagtgtacaggtgctctattttaatggaaaacactcccctctccctctttcttcttctctctcttttttctgatcggtcgtgtttgtagaaaattcataacatatataggccaaggaaatctgcatgtatttttggaaatattcttggctctagatttatcagctattttagcattaaaggctgatgggtggattagctaccccagctcctttcataagacacaaagacgtgcacaggagtttgaaaccctgagctgtttctctgttccactttccatactgtcatttcccttctaagttagctttggtagctctgttggtcagcagtggccacaaggctgctttctgcactctctgtggccacaggaacaaagatgcgagttgaagatccctttgtgccggtagaataaggaaggaagggaggcagggaggcaaagcatgtcagaaacggaccttggtttcctgttcacctctttccaccatgattgcctccccttgcagctttccctactcctgccccaactgcagtaggaaatggaatcccattagttacccattgtcctgtcttcacatttgtttgtcatccatgtgtgaccatgatctgttgatatctttgaatctcttccctccaaaccccaagtaagttgtccttcaactgttctcagtttttcttcccaaacatattgctagattctggacattaaccctgacgtttcctaaatactggcctggcctgtgccgcccctgcccccactactcacaagtttctgagccctttgtcagttttgtacattcccaagcatgccagcttctgtgcccatggaccttgctgcatcctgcacagcagggttcagtttcatgtatctttgtcttttcctctagaacctgcctttttcaaatatccctgccttttcccacctggaaacatatactgtatgcgaaagagttgatatatgcaaagtaattcaaacctggccatgtactttggaaaagaaagcatagagatgaattgtggtgttctcacaccttaacgaaaatctcgtgcgatctgattccagaagattcttgtgagaaatgttttgaatgtgtgacaatttcgcagggcaatttcctcctgtgacggttgctgttacctggtatttccactctcacagtagaatagaaatgtttgtgaaataaaactgattttaactggaaggagaaacaggttaatggactttgtgtttaagagtgtcaaacagtctgagagaataaatgggggtcttgtcttacattagggtgagagtttgattatttaggatgatcccagtgatttcatgtgtgctctctgacctctgagtatcatagtatcattaaagtaaagatttaagtctgtataaaggaggagagttactgattggcaaaaaagattggcacaaagcatgaagaaaccccatttttcccagggtaatcatgaaagaaggctcagagaaagagggaaacaaaagcctgttcagcagaggcccctttagtattatggactgggcaaagcccactataaactataggagaaagaagttctgataaacctcttagtatgctcagcctccttctttgctatgtccctaagccaacagggtataacacaggccctggtgataatgagggtgtcctaaagatcctgatgtccatgacttcatgtagttcaggcacagaaagaatagcaaagctgctgtcagaagtttgtcaggcagagatgtttatggttgaggataccccatatgaatctgggaaatgggctaggcctgaggcagtcacctatttgtagaactcaattgatccccaacctgccaggcttcctatctcataggaaacatcctcattgatcctcttcagttggagtctcccaaatttaatgtggaagacaaagtgttggaaaatcaaaagaggctcactcaaaccagcacagggagtcctcagagttgcagttcaattcattttaattagaaaagtatgaaagaggtataacactcttattctagcacagtgccttgcctagagtagtagtatgaaaactatttgttgaagaaataaatgaatggaaagacatagggaagaatgggctgtaaatcctaattaaaaatagaggtcgacatgagatacctggcattttgggaagtgaccaaagatggccagctagagattcagcatctccaggatcctcatgtgcctctcctcaaagctccctcccatctgtaggagattagtgaggcaaggtgctgctcagagaggaggacctcattgttcttaggaccttggccagttgttctcaaagtgtggtacctggatcagcagtatcactatcacttgggctagttagagatccagattctggatccataccccatacctactgaattagaaactctaggggatgaatagtggtgttctctgttgctaagtgacagtgggcccagccacctattttaacaagccctcccagtgattgtgatacatactaaagtttgagaaccattgtactaggccattccagctgaatctcaaacagaaggcagtaatgagagcctacaaatgggagggacctaagtgcctacctactcgctaatcgcaggtgcaaacacacaaggagtttggtgggcttaaggtcagaggagtgtgtagggagggatgtatgtggaaggtaagattcagggcaagctaaaaatccgatactgcaacgttttccaaaatcccagaaggcaaactgtgcatgttctaccctgaaccacccaagcaacactttctaccttgccttatttttaattggattcactgtccaaaatgcagaggtttgctttgcttttttttcagaagttccaaacagcaactttgagagcagtggggtgcttggcagctgttctgtgttttccaggaatccaactgagcattgaaatctctcatttgccgacttatttttataggaagccaattwaaaaaaaaaaaagttttcttatagtattggaactacttctaattttaaaatgacttttttgatgtattttttgttaaatactatgtagtgtaatgtataattgctcttgtttattgcttttacaatcatatttattaaacagataatgtctctaaagtctttgcctcaggtatttttttttttaatcctaaacccttggtgttcattctaaatatagaagtgttgcatgtataggatttcataaaggctaattgcataagaaagagtaaacaccacaggcttgaggtttttggctgttttttactaacaaggcagaatgtatgtactacctgaattctacctgcatttcaattaactatacaatgtctgtttattaaattactttgatttaaaaattagtccaaactggttattttggaacgtacatgagtacgtgttcgttattattagttcagaattcgaaattattgatggggaacaaacccattcaaatttgttcataaccttgtggttaccaaaggaccgaacctgcatggaatgaactgaaacatggggagtggtaaaaaacagcagatgagtaaaaacagctgtggacctggaatcaggaaagaggagttcgcctctggctatgccagctgtgtgaccttgagcaaatcattttaacatataagagctttagtgctcttgttcatataatttgaaagaagatcccttccagctctgcctttccaaatactatgggtgagtcattccccaagagtcccaaatatttgatttaaagttagcagaaaataacgtggtagactggatccatcttttcagccctgtggcttgcctacgtaagtggcatttctccctgggcatcatttggtgctgatatttggctgaaacatttgtacaggcataaaaccctccctagccttcccgaaggcctccgagacacagagtggtgttgcttcagctcaatctcagcatgtgtgaaacttcctgttactttaggtggcccttaacctttccattcccacagactaaattcctgaatctttattcctttccaggccagagcccatgcacctccttcctatcaggagcaatgtatcacctgtgtcaggcaaacaaacagacagcatccctatacacgtcaaacagaggggagttaatacagaaaatgtgttgctgggttaatggaagcacaaaaataccaaataggagcaggtgaggcaactctaagatcagcctcagttggaagcctctcacttccctgtgctggagagatctgggtattaccagagccctggagtcaggaccaccaggttgaaactgaagtcatggaggacttgtctggcaggagctggagccatggaggagacgtgactgctacctgtcctgtgatgctgcccaagcagaggggtagggagaagtagctcgctttttcccttgctctggtcttctctgctgttgccgatccttttaactgcacaaacccagccacaagccagtgggccgtggagcctgggaaatgttgttttctggaatacaaagtgaaccgcgagggagtgggaaatggatttgagagaacacaggcaggtgactggcacagcacccctttcatggccagcccatatcataaccaatatatctcccccaacccaaatgcaccaggtactgtagctcacacctgtaatcccagagctacgggaggccaaggtgaggggttggttgggggagattgcttgagcccaggagttccagcctgcagtgagcgatgatcatgccactgcactccagcctggacagcagagcaggaccttgtgtctaaaaaataataatatgtaatcccagcactttgggaggctgaggcaggtagatcacatgaggctaggagtttgagaccagactggccaacatggtgaaaccctgtctctactaaaaatacaaaaattagctgggtgtggtggtgcatgcctgtaatcccagctactctggaagctgaggcacaagaatcacttgaacccgagaggcagaggttgcagtgagctgggattgcgccactgcacgccagcctgggcgacagagtgagactgtctcaaaacaataaataatacgtagtaggtgctcctttctctgtgactatgttcacgtatttttctttaaacatcacatatttagaacttggctgtatgtttatttgtggcacttacgccttgctcaccaaattctacactcgtttacagaaggatctttattttattcattttattatttcagcatttaggactgggcattgccattagggggcactagataaatgtttgctggaactcagcccttgattttcagcttagtgttgtgagcaagtccattttattcagtgatgatctctgaggtggcttcacagtccgattcctctaccccagctagcacctctaattacatgttcagttggtgtttgtcaagaatcaacatatccctgcccatctctgttaccactcaagctgctgtattcccagagctattcttagacattaagtgaaataattgcagtttaagaagaagaaaaaaaaatggctagaaactagcataaaaaacaaaggtctaagtttgatttctggattactattaaaatgtgttttcctattccccaaggagttaacaatactgtgaaaatgcatgttagtcagaggcttgtatagtagggaagtccaaaataattccagatggacaaatacaaggaaatggctgttataaagtttttgtgctaaacacatggaaagagacccgtgttttacagcatagagatatttattgatcagtgtgtggtggacactgttttaggcagtgagaatcttctgtgaacaaggcagaaaacatgtctggctttatgaagtaatacctgagtaggaacaatgaacaaataatataatttaatgtaacatatgcaatgccatcaaacatataagataatttcaatatatcaaaatgtaaaaataacatgataggtgacggggcggccagagtgactaggggtgggggcgggagatggggagagttggtcctcggaaacaaaaatgtctagatgctgaacaaaaacctcttcaggatctgaaggctaaaaaggagacagccatttagacacctgcatggtcccagtatgttcaaaagccaccttagaacaactgtgcccagaaaacaaacaattttgaacctaaacaacagttagaaatgtttctgagtttaagggaaaatagctcttccattgcacataagcagggtctttcccagagatcatctgtacactcagttgcactattatgtaacatgtgtttccaaaatcatccctctatgccaaatggtataataaagcccataaagcttaggaaaaaagatggggctggggcacaacacacaaaaactttgtcatatctcagtgtaatgtgtctccgggcacatttttaaaaaggtacaaaccgaataaaaatggtagcatagttttacacacactgaatagttaaatacacaaaacacttaccttgaaaaagacttgaagtttgcttatgagagtgggcgttggaatgcctacagcatgtgagttattgtgaagtggtagaagggaagttacctgaaatcagacagaaatttgcaataccaaatacagataatgtggctgtaacacacaaggcaagtggacgcagccggcagatgtttgaggggtgtgtgtgtgtgttctgtgtacttttacacagctgatttcagctggatgcagttttctgcattcatctagtttttctcattgacaaaatcatgcataagcaaatacagcatttgaattatcctcaaattcttccttaatatatcaattacattagaacaaatttatgttttcaaaactgcttgatagcagaactgactataatttaggtggcagtttaaaagtactggtagagggaagaaaccctacttgacagcagaggaaaaagataaggaaatagtgctaatcctcattaaaattgtcacctcagcctgagacctttcagtgtagggaccagcagccctattcacttacacagaccttagaacatcatccaatttccacctaccccagcaacaaatatttagaaacaggctttgacccaaacaatgttaagttgtggttagaaccccttgttaaagaaaaacatggctggccgggcacagtgaatgacacctgtaatcctagaactttgggaggtcgaggagtttgagaccagcctgggcaacatggggaaaccccttctctaataaaaatacaaaaattagctgggtgtggtgatgcacacctgtaatcccagctattcaggaggctgaggcatgagaatcgtttgagcctggcgggtggaggttgcrgtgacccaagattgcaccactgccctccagcctgggcaacagagcaagactgtctccaaaaacaaaccaacaaaaaaacatggtgtgaaaaagacatttatgaagtatttgaaggaaagtaaaacagctgaagatttgaaatgtttaaaaataaattcaaggccgctagataatcataaaacactttataaacaatactaagtaaaatatttcaatatatgcatttctattttcataacatctttctctttatgtgaatattaataacagcttgtagatgcagaaaaaggattcagtaagcactatgtataaactagttaacaaacaatcaatatatatgcatataataaaatataatttcgttaaaactcttttctaaagaaggacatgagaaatgtttcacatgatgttaagagaaagcagaatttaagactttcatagtataatttgtacagaaaataaggacagaacgagatgaaaaatactaacacaggttatttctaacttgtaaaactatgggtgttttaattcccttgatctttgtttatatatcttctaagatattctaatatttgctaattaagttagttatgtaattattgtaaataatatataaaagttataggaaaattcataattgttgacagcatatacttaaattcctttaataagttaaaaacaacttctctagataagacaattttttaccttatgtgtatcaatttaaattcatattgagatacaaatattattttgcaattatggcacctgcagtttaactcatgaaatttcaaatgtttacaatttttaaacagtttaactttgtgatccatgtgtatatatgtaatatacatgtacacacagacatatatatacagatatatatacatgcatgtaataacattttacagtataagtgtaaggtaaatatgtgtacatatatatttatacattattttattttattttattgatttatttttgagacggagtttcactcttgttgcccaggctggagtgcaatggggcgatctcggctcactgcaacctccgcctcccgggttcaagtgattctcctgcctcagcttcccgagtagctgggattataggcatgcaccaccacgcctggctaattttgtatttttagtagagacggggtttctctatgttagtcaggctggtcttgaactcccgacctcaggtgatccacctgcctcagcctcccaaagtgctaggattacaggcataagccaccgcgcccagcctatacattatttagatatgtgcagctacacatagaagtaaacactcttgcatagatacaaaacaacaatatggtaatagtagttagttatggttcataaacatacagaaacatgtgctattaatgggcctagacccattgcttgactgtgtgttgagtatcgcaaaccaatactgtctgaagattttgttgttcctcggtaatcatgactggggtaagcaagagaagtgaaggcagaagagttatttctaggggagaagatgcaaacctgctggaagatacccttgctgtaacttgtgtagcaaccttcttaattgcctaaccagcagccactcactttccttaacacccttcagccacaagaagaatgccaaccttacttaataacagcaccaagatataatacctcacatgcacatacatacatacatacacacacacttgacaaatgacagagactagcctcaccaagtgtctgccgaataactggaggcaggaggttctcattggccaaggctagggcacagaagcaatgctgatagtcaggttgtgagtgaaccaaagtctcagtgaaaagtccagggccaaaaacactggtgtgagcacatgtgaacactaagtgcaaaggggcaaaggctaccaagattttaattcccaagcgcacagttaaacgttacctaaaaataaaagatgtgaatgaagcaaaagtgtagaatgaggaagttgtgagtgaaaaatatacgaatgatgaa

SEQ ID NO: 6783 - DNA, 60463 bp, Homo sapiens
tcaacacagaatccatccaacagactttatgatcttttgcctggagcaataaacctttattataaaactgctaccacttactggctattgttacatgccaggcactatgctgtgtattttacatttactacttcatttaatccttgcaaaaggttgtcagagtaattacgaatgaggaaattgggttcagataatacataacttgtccatgccagcttttctcattccaaaacctgtgcttacagccattctgcgacactgccttctacaggaaggtagtgggagaagccggggttcctgtgccatagataggaataccagtattctggggggatgtcagcacctccctccttttcaagcctttaaggatattatcctctgccttgcaagctttctttccctgggctcacagcctggggacagacacaccacgtgcttggctcaagagcctttaccaggagcagagaggaaatgccaggaagtgggagggctcctggtttctccagacaagaaactggagagggcggaggagtcagggacatcctgtctcactttagatgtatggctatccaccagaaagaagctgccagatgccaagcccagtgccacaaaggtcgccaatttacacagatggagaaacattctgtgggtcaagagtgtgtcatcaccagagaaagatggattagtacatattttttcttttttttttttttttgaggagtcttgctctgttgcccaggctggagtgcattggcatgatctctgctcactgcaacctctgcttcccggtttcaagtgattctcctgcctcagcctcctgagtagctgggattacaggcatctgccactatgcctggctaatttttgtgtttttagtagagatgtggtttcaccatgttgaccaagctggattcaaactcctgacctcaggtgatctgcctgcgtcagcttcccaaagtgctgggattacaggcgtgagccaccgctcccggccaggacacattctttatttgctcagtgtttgggacactatgacagcaaaagtgtcttggcaaacctaaaattttatggaaagtggctttggaattaatggcatcactgttagtcattccgtatctttgaatactgagtacctggagcaggtggttgcttctcctcctcacaacctctgaaagtttttgctcttcatgccaaggcataatgggggcaggaggaggagcagagactacgaaatagtaggaacagagactgtgaaataaatattcagaaatctggcatttaggccagactagcctgctaccccggagattatagtgatatctgggagaacacttcgttgtttaaagtattgcttaaagcctcaaatttgttcaggtgtcaaagactcattcctttaggacaaaggtatgagaaagtctgtttcagccacacaggataaatagcagatgactgaagcacagaggagacaggcagggcttccaggagggaggaattttcttctcttggcacaaacgttttcagaaacaagaccagagcgttcttgtcagtcagccaaggccacacctcatcctcagctttgtaggagtcgtgggtgcctgtgtgcatcattactgacaggatttgcatcctggggattttgttttgttgcagccctaagagccatgatcttccagtttgatcttaactctgctttcctctggctcctcaaacttttgcttagtagaagctgcatcttcagaaccggcaccatagctgtttgtaagagctgagaacacaaggggaagtttgcagttcacaccctgataggtcacagccatgtttacttgctcttatttctagaatagtgagtacgcggtgtgctctacctttaggaatgtccccgttaggaacctgtaagcccgaactgaagagaaacttgctgtcatcacccagcagggcccccaggaatactgtcttccatttgttaggaatccaccagaggcctagtatcttagggcaggaggctggtaaggtcagagctctctgccctctgcctttttcccatttcacagataaggaaactgacgctcaggtagtcttacggacttgctgaagccttttccaggaatgcaccggtaggtgctccctttgcctctcccccagtgtgatcacaggctcatcgcattgcattccacttaggtcaagcacctttttctgcctctcaccttttccctgggggagaagtagagcccaaacatgccaaacctttacttttcacctaaacttgatcaggccactgatttagaaattgaagggaggcaggcagaaagagggagctggaggaaggagagctagaaagttgctagaggttttactaaaacccaccatcctggatacagctcatcttatctgacctaggacgccgaacagctggccttgcatctagtttatagactaggctggtcactattgaggaagccacaaatcaggcagaaagaaccctccctcggtaatagtctcttcaggaagcagagatgggacaaagtagcaaggaattaaagagttaccccaggcagagggggctgcactttgaacctctgctggccacgcacagacaacttctgttccaaagcaccatccgatgaaatagcatggcctctcctaatcataagggtaacttctaggcctaagaatcccctagaaggaaggagggctggggagcaaaatagaggacagtgtgccccctccagcagccacagtccttacaacacccaccgccccccaacctggttttaacctcaggctttccattccagccaatcaaaggcatcacacaaattgggctagtaacaatggcaatgcttttccagctcataatggccattacctgaaccgctgcatctctgtctctgagggcaatggagaaatggaaggggctgagctcagcagagaataattagggcctacggaggtaagccaggtgtctgtaagtgtggggtgctcctgaactgagcgattaaggcagtatgaatttagccttctgtgttgatccttcagaagtacaattctgtagggtttatttttaattaaaatattcacttttctttcttattgcaaagagattaagacaaaaaatgaaaattaatataaacaaagcaaggacaaaccacccctaattcctatgacacagagcgagccacttttagtggtttgttgtatgtaatctttccttttgaaaaaaaaaacaaaatggaatactaatatatattattgtatgatgtgcttcatcagttagcaatacactgcggctatctttctaagagaatatatatatatttatatatagatatatagatagatatctatttatatatagatatatatgtatagagatatatatagatacatatttatatagataaatagatacatatttatctatgtttgcggttcacaccctgacaggtcacagacacgtttacttgctcttatttctggaatagtgagtacacggtgtgctctaccttcaggaatgttcccattaggaacctgtaagcccgaactgaagagaaatttgctgtcatcactcagcagggcccccaggaatatatatatatatagaaatatatatataataatatatagaaatatatatataatatatatagaaatatacataatatatctatatgtatttctacatatataaaatattatttttagtgattgcatgccactcagtcatatgaattcactacatgttatttatcctggtctctctgttggacaatgaagcttgtgtctaaattttgactgttagaaataacactgtgtttaaatctgatcatatgattttatttatttgtaataaatcccccaaattagagttttgagtccaatatgcacacattcttaaagtttggtgcatattgaagaactgctgttaatgaacattcctaccagccagtgtatgtctgtttcttaaactcccaacaacactgaacatcatcagtattttcttctggttttgaccatgctcacttgtaagcatttaagaatacaaaatacttatacttgttatgattaatattaatttgcttgtctagaggcctaatactgtgctgaatattaggatccaaaaaagacacacacagtcacctggctcaaagattctcaggacaaagacaatctgtaaacacaaagaatcagaaatgacccagtgtgggaatacaaatcaaagaaagtatacatatggaaggtgggggagggaacaaaaagtgcatagataacatattgtttccagtgttctagttttgagaccatgacatgtgcaatgacacatctattaacagaattcctttactgattcctaataattgtgaggcaccattctaagtaatcatgcaatctcacagtatctttatagcatccttccaggaggggtgttactctgctcattttgactttcaggaaactgaggcacagatttaactgacttgtccaacatcatgtaagcatctgagccaaaaatgattcatgggattttgcttatggttccagtgagtttttggactcagatgattttgcaaattgactccaagccgtcctagcagaggagacagagaaactgcaggtcagtgaagaagcagttatgatgaatttggtttggagaaaagcaactcccctaatccatgggtttagaaatggccctctgagatagccaaagctaagtctccttaattccatcctgggggcttgctcctcaaggaagataagtagagaatagctattggctattctttccctcttctcacttcagtctgccaggggttctcatactttagtgtacttagggatatatgaggacctgttaaacatggattcccagagcaacctcaaaacattctggttcagagggtctggagtgaagccctggaatcttcatttctaaccatcaggagagactgaggtaggtggtccttagatcaagacttgagactcatagcgagtcgactgtgctcacataatactgagatgaacgtgagatgccagccccttccctgccagagtaatcagaaagcaagcccacagtaggtgggaattcaaccctttatattcatgtggattttcctggctgatagctgggccatcttacttggcagtagcaatggcttctcaagggtcctgtcatccctgtgatatttcagacaattgagagctgcccccagctccttgccctgacctgtgtagagggagggttagtatttcatgcatcaataaccaatctcaagcgccctaaaggcctgggtgagggatacagactgtgtcaacctttcagtaaaccttatagccataagcttacttatttcataaaaatttcctagaagatggaatcaggaagtgataattattatcactattactgggatcatcatcatcatcaacaccattgtcaaatctaatactgatggactggctctctttgcccaggtattttgccaagggctagtcttgtatgatctcttttaatctttaccatatcacttcacggaagaccttattacagttttatccctgttttacagagcaggagattaaggcatagaaaggggaagtaatatgttctaggtcactcaactaatgtgtgatggagtcagaattccagcccgggccatctgactccatttgagtcatttctgtggttcttattttaccggtggagagggacagaggggtcatgtgacttgcccaggaatgtgaagtttgtcagggatgtcactggatcaatcaccaggaccctgctgactagctgccttggcctccttctgcaaggctgctgcttctagatggtattaagacagactcagaaaagggagagtttcrgttaattaatggcactgaatagaaagcaagctgtgatcctcggggaactctacactgtcatgtaagttcctggcgtgagtaatcaggaggctgagcctctcacagttctgcagtgacacaggtgttacatgccatccatggctctcaaaccatgtcttgaggccccaattgagtctgggctctgttcagggattgaatgtcatgctgagcacccaacactagttctgatgctctttgccagtgtgctggtgacttgccttgaggctgctaaactcaccgtaggcttccagaccccctggaacatctcccatccattcagcatgcaaaggctgggtgcaggcctccagattgccatggacaaggtcaactcagagctagtggaccttggaaatttcaccacttacaccaactcagcctgcagcaccaaggagtctcttgctattttcaacaaccaggtccagaacgaacagatttctgccctgtttggaccagcatgcccagaagcagctgaggtagagtatatatagcctctggaaactttaagtttccattggaaggggtggccttcaagatgatggtacagatttgagtaatctcctgacaaggatcacattattataacaataaccgtgtagatcttgaatatcatttttgagatgcaattagtctatgtaattagaagagttaacattctctttaaagaaagcctttctttctttctttttttttttaatgctctgttgtccaggctggagtgcagtggcatgatcttggctcactgcagcctctgcctcccaagtttaagcgattcttccatctcagcctcccgagtagctgggattacaggagtgccccaccatgctcagctaatttttgtatttttaatagagacagggtttcatcatgttgtccgggctgctctcaaactcctgacctcaggtgatccactggtctcggcctcctaaagtgctgggattacaggcgtgagccaccacatatggccagaaagcctttcaaatcaataattgtttattcacctaccctcttcctcctcttgttgactgtctgaagttgatgctattgtgtatagactcttatagttcactctcatgttcctaagctacaaagcttaggaaaattaagaagaaaaaaatgcagccaggcgcagtggctcacgcctgtaatcccagcactttgggaggccaaggagggtggatcacgaggtcaggaaatggagaccattctggctaacacagtgaaaccccgtctctactaaaaaaaaatacaaaaaaattagccgggcatggtggcgcatgcctgtagtcccagctcctcgggaggctaaggcaggagaatggcgtgaacccggaggcagagcttgcagtgagccgagattgtgccactgcactccagcctgggtgacacagcaagactccgtctcaaaaaataaataaataaataaataaataaataaataaaagaagaagaagaagaaacaaatgcttggttttaaatagaaaactatcaattgtttgagtaggcttttctttggcgtatataataaattaatcagtgataatgcaagtcaatgagaaagaatcaagtatggcagcctaccttacctacagcaagaaaatgagggaaatgaatgacttgtatttgtttggttgttgggatgaactttgttggtgtccttcagtatcatgtcgcctgaaaagtgttgatgcaaaaggtgaacaggaaggagcagcacaggtcttactctcaacaatgttgcagaactatcattagctggagctgcagaattaagtttacatttaaattggacccattctctcctggaattccccatctgacacatttctatctgttcaagggttacttgtctaagagttaatatcaaatgtcatggagcctttctttatcccttcacctctgccctccttatccctaattccccaatcgaaagtaattgtttacttctctaaatgcctataaatctattatctatgcatcttaaagaatatatttaatcttaaagctattttttatataccttggttcttgtaataaaccatgagctccttcaagagcaaggtctccaaagatttttatatgtgataggcccctaattaaaatgaatgaaaaatgaataaaggagaaattaagaaagagagaatgagtagttatgactgtgggccatggaaccatattacctaatttccaaccctgctccactatttgctagctatgtaacttacatctctgtgtcttcctgttttatcttaaagagggggtaataatacctagaaatgttgtgaaagttgaaatgacacatgtaagctcctagagtgctcggcacagagtaagtgctcaattgatgctcgctttcgttatctttgttctatgaggctgacgttgtcatcaacattacaaaagcgagggcccagtatgacccacagactcacagaatctgacgtttatgcagatgtctcacactggggtttgcgtgtacataaactcaattatacaaagacatcctttgggttattttcaaggttatcggcttgctggcctctgagtggaacaccccatgtttgactttgttggacaaaccacaaaactgtctgacacctgtgtgaaacttgtgtcacccaagcaggacattggtgatgtgctccaggaaagtctccagtacctgggctggaaacacattgggatgtttggaggctactctggggcttcctcctgggatggagtggatgaactgtggagggttgtagagaatgaactcaaatcccattttatcatcactgccagcatgagatacaccaacaatagtctagtccttcttcaagagcatctttggaggatatcatcaattgccaggggtaagtagaaaagtcttctgttgcttttatttggagagaaaaatgggacaagcagatttgaaaaaaaaaaaaacaacccaaaaaactcttcacttttctatgagtgtaaaagcagatggaaacaaggtacaaaattaataatatataaaagcaacttcctttattgcttgacatcactaacaaaaaattgtgggtttttttttttggtctaaagtaaaaccccacatgctacagtgttatgatacacagcgcaagttctagaagcatcttacaggtgggctgggtcctggacttcactatttgtttacagcatgggctctgcagattgacagacctaggtttgaatccagtctctgacattttagctgtgtcctccttgggtaagtaccttaatctctctgtatctcaaatatcttttctataaaatggagacaaccatcctacctatgtcacagaaaggggaggattaaataaggttatgcctgtaaagtgcttagcaccatgtctggacaagtagttggtcaacatatgacagcaattatttttgtggtgatgcctataaggctcaactttctagcatgaattagtaactgactcctttctgttcctcaaataaactgaactctctccagccctgagactttagggttttctactcccttggcctagggtgtcacctgcacccactccaaccagtgatgctaatgtgggactctaaggcacaagtggctctcacttgtttttcttccacagctacctccctgtgtccctgttgaatctctaataaagggcttgaaagaccaacactgatccaatgaggcaattgttatgtggtctcagtcacattccaccctacccagcaccttcttaagggtagcgtcctctcatccttgcatccttgccgactgggtccagagcccacctcctcaggaaggccttctctaaccacttgatgtgaagctgtttcccctccccacccattagcatcacagcatccgtttccaacctcactaattagaatcttcaatgatctctttaatctgtccacttgtatgctgtctgctggctcgttcactgctatgtctgtgcccagcaaagtgcctgacacataattggagctcagataaatagactataaattacttcatttaaaaaactagctgggtgcgttggcgcacgcctgtaatcccagcactttgggaggctgaggtgggcagatcattcaaggccaggagttggagaccagcctagtcaacatggtgaaatgctgtccctactaaaaatacaaaaattagccaggtgtgatggtgcatgcctgtaatcccagctgtcctggaggctgagacataagaattgcttgaacccaggaggcggaggttgcagtgagccgagattgtaccattgtactccatgcagcctggtcaatacagcagactctgtctcaaaaataaataaataaaaaataaaacccactacttcatttgtgtattctgaaaatgaacggtgatgggattaaacggcagaaaagtaccatggcctactcctccctcyggccagcccaactcagaaagtccaaatgcccttgaaagtccacatgtccaaaggtcctctgtgaactcctcttagctgaagtgtggctgacaagtcacaagccaggtctgctgttctgatttttgagccaaaaagaaaaaaaaaacctagagcacagaggtgatcccaaacttttttcacttgtacattgtggggaggctgcagcaaagacttcagtgctataactgctagtttgtacacttcaggtttggttaaagaatgtaaaaactcagggactagtttaggcattcctgtttcttaaggcatgcccaaggaaagaaaaagttcacgtctcatttacagtgactttaggccagacttagagtgagagcatgcgtgagaaagcacayatacacaagcatgtgcaactggcggactctggttttcattcttatagttatcatcttaacgtgcagctcagaggatgcaaaaattattcttctggctgcagyaaacctgggactcarcactggagaatttgttttcatcattttgcagcagttggaggtgggtaccgttgaccactcaatggctctggtagtaasaggtagcaagtatggagcactcgttrtgacccacatgtattrgctcactgagcactcactacaaccctgtgaggtaggcactctcgcgtcctcttcttaarattaggacactaagasagagctggaagaacttgcccagagttcttctccacagctagtgaaaggctgaaccaggccatgaactagrtcagctggcttgaaggcctagcccgctgtattccgtatcasacaacaacagttgaggaactactgtcatttctacygggcagctgagaccttcccaagggaccctcagacacaagcggctctcacttctttttcttccacagctaccgccgtgtccctgctgaagctttaacaaagggctggaaagaccaacatacagatgcaacgaagcaattcttaggcagtctgattcttttggtaatgagaatggctaaaaacacaactgcttactatgaggactgagttacacattttacacacgattgcacttaatattctcaatggctttgcaaggcagttcctaaatgcattatttatgtgcctgtacattttgtatttggtatttcgaacagccttggaaggtagatattattgttattccaatgtacaggtaaaaaaacccaaggcttaattaaggtaccttayctaagatttcagcactcccaagtggcatacctagtcttccagactgggcctttcagtctgagctcaccccacacaactctgccttctggagagcttatggagtactgggcctcactgtgagtgcttaatacattaacgcttattgcagcccaccaccacaccatggggtattttggatctggaaattggtgggttcttggtctcactgacttcaagaacgaagctgcgaaccctcgaggtgagtgttacacctcttaaagatggtgtgtccggagtttgttccttcacatgttcagatgtgtctggagtttcttccttttggtgggtttgtggtctcgctgacttaaggagtgaagttgcagaccttcacggtamrtgttacagctcttaaacgcagcgtggctggaattgttcattccttcacgtgggtttgtggtctcgctggcctcaggagtgaaattacagaccttcacagtgagtgctacagctgttacaggtggcgcatccggaatcgttcatcactcccagtgggttcacggtctcggcagcttcaggagtaaagctgcagactttcgcaccatgttatagctcacaaaggtaacayagagctagrgcaagcagcagcaaaactttagcccaaaaagcaagacaacaaactttccaaaaagaacccaaaagggttatcgctgttagcccacgcagcyttttattcccttatctgaccccacccacatcctgctgattggtccacttaacagagagctgattggtccattttgacagggtgctgattggtgcgtttacacaccttgagctagacagagtgctgattggtgygtttacaatcctttagctagacataaaagttttccaagtgccgacccaactcaggaaccctgctgccttcgcctagtggatgccgcctgcggagctgcctgccagtcccaagccacgcacccacscttctcagcccttgggcggtcgatgggcggggccctttggggacgctggggctgcgcggaagcccactggtggcgggggggggcggaggggaggcatggcagctgcaggtcctaagccctgccgcgtggggaggcagctgaggcgcggtgagaattcgagtgtggcgcggacgggccggcagtgctgtggcacccggtgaaccctccgcagccgctggcccaggtgctgagcccctcactgcccggggctggcggcgctggccggagctccgagtgcggagcccacccccacccggawctcacgctgtccagcgagcggcacccagccccggttcccgcccgcgaytctccctccacacctccctgcaagcagagggagctggttccggcctcgggcaacccagaaaggggctcccacagtgcagcggcgggctgaagggctcctgaagcaccgccagagtggacgccgaggccraggaggcgccaagagcgagcgagggctgctagcacgttgtcacctcacttttatcatcctcgttttacagaagaggaaactgaggttcagagaggtgccaaaacttgcccaaggccatccaactagtatgagggagagctagcattcaaacccaggtggcctgggctccttttctacctctcatcaagtgcactgatgcatggaaataatgcacgtagtatctgcctcacagggggctattgtgtctgtgcttgtaagcatcttacrcaacaggcatctacaaaagctacttgccttttcctatggacacggtgcattatttttctagcagttttatctttctaaaataagctttttaaaaaaatcacaagaagctgaaataggacagaaraaaataaagggagatatatagtaatgtcccagatttttctttctttatcatgaagtctttcagatccacaaaagcatctcagatttctttgggtagggagctggaatcctaaaggcatgccagactttccagaacactctcttaccctagatatccattgtgaccgcctccctttctcttcacttttcctctcatctctgccttcaggcacattgttttggcagggaaacttttcamctcccctgttgctttctcccacacattgatgatccattccaactggtgtgtaatggcagaaagaaggtagaactaagaatacaccaatgtctatgcaattgaattcatgctgcttcatgaaagaatagcataaatctattttatgaaactattcccagtataggtttaggtggaaaaaaatcaagctgvattatggtatgatatcatcatatatatatatatatgtgtgagtgtgatgtcatatatatgtatatatacatacatatatgtataatgagtgggtatatactgttcataatagtaacgtagattataatgataatgccacaagcaaaaaaaatttaaaaaaagcaagaatctatagtcttaagctttttaagtttttgcaatcattgttagtaggtaagctttctgcatcttagcagctgtatgcaccaggaacattttttctttttatttgtggctttccttccactgcttatatgccagctagagaatgtggaccttgtattgcaggccttctggaatcactgtgtttccaggaattagaatgtagtggttcaaattaaacattgtgttacacgcagtgcccttgccaaggcatttcctaccgaataacaacatttattttattactttttaggaccgtttttggaaggaagtactgacaaatcagaaaatgatgcacctccaaaaggtgtatgggtcactgcttctcattgccctcagctcctacagaaaaggcygtsgagacgaaggcttttggaaacaagtctaccaaacaccgaggaggtcgcccttccgcagcaccatctcctgggaggagcaggtgtgatgccgggtcttccagctcaggctccctcctccycttctttgatcatatttgtgtttgcctttgcatttctccctcttatttctcctcatctctccctaccccccttacacacatgcaggtgcacacacacatgcacttccccatcttccacgcccaaaataaacagcagtttgatgctctcttgtgaatttatacctcagaggttactgggtgaaaggcctttggagcagaggcctatgcccccatcctactgctgctgtttgctaactgtaggaccttgtagtgaattgcttaacctccctacacctcggtctcttcttctgtgaaatgggactgataatggcatctacctcccaggctgtggtggtgtgtatttagtaacattgtccatggaagaagcaaagtatatatcttcttcttttgagggaaggtctcgctgtgtcacccaggctagagtgcagtggtgcagtcatgctcactacatcctcgacttcctgggcccaagcaaccctcccacttcagcctcctaagtagctggaaatatagacacatgccatcatgtcttgataattaaaaaaaaattttttttgtagagacgcgatttccctatgttgccraggcagctcttgaactcctgggctcaagcaatccttctgacttggcctcccaaagtgctagaattacaggcgtgagccactgtgcctggcccagaacagatattaatgggtacccagaccatgacaatttccttccccaggaggatgccaggacctagacccaggatggagtggtcagagatgtggagctaggacaggtcagggccagcaggtgggctggaaaagggaggagatgatcaggagagagagggtccgcctgtggtaatcccagtatgtgtgtgatgaggaggcagtatctggctttcacagagaagtttttgaagagagacctttgtccagagctggagctacttccagtgtggggccaagctgaagcctaaggtgaccacaggccactgatgacaaggagtttgattagaaatgagggggccgattgtggatcccaacatataagacaagataaccaattaaagaatatttgagtaacagtctactaagtgtcagctttgtatctggtactgttgggagaacagtgcctggcacttagtaggcacttgtattttccttgactgcccaatagaagacatcacgtcctgaagacctactaagggtcagggactgcaatggatagtttacctattatgcctcatttaactattgtcacattcaacccaacagcagttttatccccctcctttyttttttttttgagatggagtctcgctctgtcacctaggctggagtgcagtggcgcaatctcggctcacagtaacctctgcctcctgggttcaagtgattttcctgcctcagcctcctgagtagctgggattacaggcacctgccaccacgctgggctaatttttgtatttttagtaaagatggggtttcactatgttggccaggctggtctccaactcctgacctcgtgatccgcccgycttggcctcccaaagtgctgggattacaggcgtgagccaacgcgcccagcctatccccattttataaacgagtgagctgagattcagagaggctgtggaacttacctcgggactcatagccagtagggagctgagctggtctagttccagcatgtaccctctttccctgaaaccatgctccctcccacctgtggcctgaagagcgtccctgaaggatcagaagatctaagtgggaaacgcagcattcagaaggaaaatgaagactgcgacgtctgggtttcatagtgcaggcgcaggtgtatgctggaccctctgctctgtgggatgggggaagaaagtgctgtgtgccactgccgggcggacggaacagagattcctcctaatttagtgctggacggtgacccaagaggccaagaacctcttgagaccctgctttgcttgtcttattgaaggtragcccttactctgcctaccttcacgacgccgtcctgctctatgctgagaccgtgaagcaggtggtaaaggctggaggcgacttccaggatgggtggcagctggtcagcgctctgaagggttccagtcagaccacagtgcagggtaggtggcttactgctggagggtgttctaaactcagacctgcggctccagtcggtgggggctttgagatcttgggcatgtaattaaaggcctctttcagggcctgcctcacactgaactccagaattcatctttcttatggggattcctgtcttccttctgtaagtgtagttgaggttaagacctcccagctcccacagttcgctcatccttctggccagagcctgcccagaccaggagaggaggctgctgggcaccttatcccctttcccctgggaattctcccccgcagttccattcaaactgagtccatcaagaataaaattcagaaatgtgagacctgtctcccggggtcacttcccatctgcagcctctgtgatgggggccctggcaccacagacttctgaagatgggttgtagtctcattcttgctttcctggtggggatgagtataggttggggagtgaacygctttcaaatcacattcagctgaccaactgctttgatctttcttgttctcgttttctcagttgtaagatagggataacacctgttaccacatgcagaaataataaccagcatttagggagggcttaccttacactaggccaagtgctaagagcttccgagtattacctaattgaatcctcacacagcccatgaggcaggtactatttctatctgtattattcaggtgagtaaactgaggttacagaggttatgtaccttgtctaaggtcacaaagttattagatggtggagccaggattcaaaatcaagtctgccttctccagggctcatgttctttgctatcctgtaacataggagtaatgagaatatgacatgcacctggcacatagtatgtgctcattaaatagtaggttctttttttttttcttttgagatagggtcttgctctgtcacccaggttggtctcatactcttgggctcaagagatcctcccgccttggtgtctcaaagtgctgggatcataggtgtgagccactgtgcctagccaaatggtcactatttttatccttgctttggcttatctttttggcttttggcttataaattattacctaaaatttgtctgaaaatttaaagacagcagccaaggcctgctctttgaagttttcatagaagcaggtcgcgtttaccctattaatgccttttgcaagtggaaatattcaccaacttctctcctttcctttcagaccctaaggcatttgcttaaaaaggggagaggtcacaaggggggatccttctttctgctctcagtttaatcccctctgccagatcaattaattcctctttcctgtggttttagaaattcttcatgctggaatgaggggaggttgtgaagagcagtgaggccctttaagagcctgagtcatcccactttggttctgggacccgtgggcccctttcagggactcatgaccaaagggccctcctcaccccttccaaactggcttctgttcccttatgggctacaggactagccttggcagaactggagtatttgtctctgcttcctgtgttcatttctgccacatggtgrcaaccactccatcggccagtgccgaagggcttttgcaccattccagaaggaaagcctcttctaggaggtcgagttagggagcagaatcccccaaccccactggctttggctcagtgaacgcaatgcacactgaaagaagtggccctggttgtcgcaggagctctggcctttcccctgcaaacctcaggctcaatacccacattcaggatgcccacggatgtgtatgcagaaaggcagtgtggcatgctggaaagaacatggcacttggggcctgataggcctgggtttgtgtaccagctgtgcctcttcgtggccctggcaggaagacccgaggagttcatgcctccaagctttgcttgttgggagcagatgatggtgccccttctgaagggttaattaggattagacatgggaagtcaacaccacctgcagtgcccagcacttattaggtgctttatcagtggtaattttgtgttctgtcccctgtgggacaaaatcagcaataagtcctttgtcagaacctacgtactagtttggggtgtgaaggagctgtgcttccaagatgcgttccttcagtagtggagttaatcacgttctaagaaatagcaaacagcacatcaggccctgtaaagcctctgcaccaagcctctgcaaagggcctgcaaggcctctgcacccagaccaggagggaaggggcyrccatgagaacagagattgcaaacttgtgccccagggcctggcagcatggaggcgtggggtgggtggggtcaggggaggaagatgggaggaactggaggaagcagctgtccctcggccccagacgactgctgacatgttgtcacatctgattgttcgagggaagcataaatctcaggttttaagtgaaattaactggaaacaaacttttttttttatttttaagtgctggatgagcttccccagtgtgggcctgagaaaatacatctgcctgcccagtgtggccctttaamcctaacaggatgctatctctgaactgtcttcttccctttgctggtccccattgaccctgtctcagattcactgaaatgacagaaaccctgtgtctggtttttaatggctgttggggaagggggttctgttgatttgagttggggcaggctggcattttgagccacatgttgctgtccctctcctgaccttgtgcaatctcctgtctttctaggaatcacaggccctgtgtttgtggatgcccagggagaaaggcacatggattactctgtctatgccctgcagaagtctgaaaatgggccccttttactttcttttcttcattatgacagttatcaaagtaatcagatactggccggacatttctgcaagtgtagattgtgctacagaaagagacataggaagaggagggccctgggaaggccagtttgggatccagtccctagaatcccccaagtagcctggtgctcttagaactcatgaagatagactttgggcctttaaggtgattttattcccttgactgaggttatggcttgaccgtttcagatttcagtgtaggacagagtacccacgaactgcacctccaccagggccctgttctcctctcgtgttccaaccagtggtcccattggccatggtctaggggagaggccctgggcccagagcgggtggtggagcacagcgtccccgaagggatgggtttacaggccccgaaatggctcacctagacagcctgactcccagacacatttggacaccagcaaccagaacccaggaatcctggggaaaaaacaaaacaaaactttgtttttgttctttcagctacaaatcaatgagaaaactaaaaggaaacctaagatgtaattcaatttccactcacccccactgccactacttccaatccagattcaacttgaggctttttaaatttttagacagtcttgctctgttgcccaggctggagtacagtggcacaatctgggctcactgcaaccactgcctcccaagttcaagtgattctcttgcctcagcctcctgagtagctggtattacaggtgcatgccactgcacccagctaatttttgtatttttagtagagacggggtttcaccatgttggccaggcttrtcttgaactcctcacctcaggtgatccacccacctcagcctcccaaagtgctgggattacaggtgtaagccaccacacccagscaacttgaggcttttttctccccttctcttatggaattttaatggaccaaaatgggccagaaaacaaagtaaccatggcaaactaggtctttagtattgtcagaacaggcacactccacrtaggaggagatgttttgttctgtgaaatgtcaagctgctatataacaagatttgtctacgtcaaacacagatgaaagtcccagcaacattgacttggcatgtcatcttttaaatcaaaagagacatggtttaagtcaaaagattgaggaagctatttcaacagcaaaaagatactgccttccttgaatgagattacctgaaggctggatttgaagagcctaggagagttgggcaaactggacagaagtttgaattgagagaccaaggcttgagttttgcaaataacatgcatttttccgttgtctctgctgtacatgaggtagagtcaaatagaacaaactgagctgacgctgacctttatttttttttttaaagacccacagggaatttctccaatatgacctggccscatggctcccttcctgaagacagacctggctgtggattttataatgagctctgtgaaactcagtctgcttttacgggtaagtatggctgtttggagaacgtagcagggaaagactttctatagtagggtctctgtatggcaggcagcactattgacattttgggccaggtaatttttgtgtatggggaggctggcatttcaagccatgcatccctgtatattataagatgtttagcggcacccctggcctctacccacagatgcctatagcagccctctagtcggaatgagaaatgtctccagacatggccaaatatcccctaggaggcaacatcacctttttcccctgtggagaatcactgctctaagggaaactggctcctgagatttgagtctcaggaacttcacctctagggaggttgaaagagtctggggaggggagtgtgccccagtggttaggagcccagccctggaattagatggatcatgcctggagaaccaccctaaggagaacacacagtaaatgttttgtaaacactgctggtggagttagaagtcatcattattatttctctgcagtggaactttctatacaaagcgggaggtgaatgcagttccagtgggaactagggtggtagtcagggaagaattcctggaagagacaagtcagcgtagactttgtgtgtcctaccccagaccttccagaggacagcctttgaggaacctgctcggctgggcccagctgggcagggatgtacttgctactgctcttgggcaaggcctgggtaatatgcctctaccctccaggcgtgactgctgtgcttctgacattgatgatcctcattcctgtcttgggagctgscatcataggtctgattttaaggmtgcagaggcaaaacaaagacatctggtggcaaatcaattttgatgatatcaccattcttccccagaacaaggtgaggccatatgtgacccagatgtcccatttcctggtcactgctggagatgtgtggaagggacctcatctaggagcttataagagcaagaggctaatttattcagtgagcacttcatgaagagtctgcaggcctgagttctggttctaggcctcccacttgcttgctgaatctgagaatgtcattttacctccccaagactcagtttctaaatacttacaaatgattgacagtctctaaagttccctttgctctgttactctgtgggtgagaactgtagatggtgttcagatattaaagctgtctcctggggaggatttagttattttattttttgttttgtaatttttttgagatggaatttcgctcttgttgcccaggctggagtgcaatggcacgatctcggctcactccaatctctgcctcccgagttcaagtgattctcctgcctcagcctccccagtagctggtattacaggtgcctgccaccatgcccagctaagtttttctattttttttttagtagagatggggtttcaccatattggtcaggctggtctcgaactcctgacctcaggtgatccactcgcctcagcctcccaaagtgctgggattacaggcatgagccatcgctcctggccggatttagttattttcaaaaccacattaactcctttaatcaattgatgactaatacaataatgttcatttgcttgacagggacttgaccattaactacaggccaagcatcatacaaggtatggggatatcccacaaatgagatgcctccagagggaggcaagtgtcagagaggtgtttccacggtgagatggaagccttgcagatggagggactgaaggtctcagcatctggaaggctttggagaggaggtgacatttgagaagagtgagtttgcaagtgatgaaaaagagtgaagtacacaggatataatgagatgtgggatggtcagggctgggaagcttagctggtaccaagtcagggaggcttcaacatgctaagagcaggtgactgtgattcattagtaactcatctccaaacgtccccggggattcagacacttactcttccatcttccaccaaagcagctctgcttcgatctacctcatttctacattagggttccagataagattctccttgaaaacaagattcctatgctttgaaggtgttttctaggtgttgggaggcactgagagtgttaaacagagacaacttggttagatgttctttaagaaaatggctctaaccccaggccacacatctaattaagtgccacagccagaacttgagtctgggcagtctgacctcagagccttccctcttaacctacacctccatggtggtacagatgccatagaaggcatggatgattggatgatgctgtcctagagtgatgcatgtaacaggtcagaaagatcagggttcaaatcctggctctcttattattaactgtctgaccttggcactcagcttcctcatctrtaaaatgcattcccttttgtacttggccttgctgctgagagtgaccaaattacttcctgttttacagccatcccagagagscacacctgtgtcaaaaggcatcaacagtaactcatctagtgtgatgatttctgtggacctcagctcttttgtcaagagccagcagtgggaagagctcttctatgccgcagtagggctttatcaggtatttctgaggccaggtggctgcccgtagatcttagtgtatctctgttctgttctctgcatcgtttctgccaggcagggcattctgaatagaagaacattctsctagcaaaagccaaggtggtcttgtgactccatactagtgcttcccaaaccttaatgtgcagatggatcacctgggactcttattaaaatgcrgattctgggtcagtaggtctggtgtggcacctgagattctgcattttaaataatctcctggccgggcatggtggctcacgcctgtaatcccagaacttcgggaggccaaggcgggcggatcacgaggtcaggagatcgagaccatcctggctaacacggtgaaaccycgtctctactaaaaatacaaaaaattagctgggcttggtggtgggtgcctgtagtcccagctacttaggaggctgaggcaggagaatggtgtgaacccgggaggcagagcttgcagtgagccgagatcacgccactacactccagtctgggcgacagagcgaggctccatataaaaaaaaaaatcttctaggtgattcccaagctggcttctagattatacttagctttgtccaaaataaccttctgtgatgatggaaatgtcgcggatctgcactgtccaatatggtggccactagcctcctgtgactactgaacattagtgtgcctgggcaactgaattttaaattttatttaattttaattaatttaaatttaaatagccttatgtgactggtggctcccttaaaggacagtggagtcctagagtgtggattatttcatccttgctactttggcatggatgaatcagttgtggggcctggtgcttctgcagtgtagacagtgactgctgctgcagcttagaacgtaatttccacttgtcctttctcaccttccctcccacacccagaccatgatcgctgtctgcatttagcaatccttccaaaattcaagtccccttggggtaagagtatatacaaaattgtatttattctttaaaatgggggtcccagagagtaaagacagaaagctccgagcaagggaagaattgtttattgctctaaattggggttagaaaagactagagccaaattatcccctatgcattgaaacttgattttttaaatgtttgcttacttgagttctcaaactacaaaaacctcctgggatattactaaataccttagggaccaccatccatacaaaactctacgtggtcgtcacccagccacataaagaaggaagtagcaacacatagcatatcgctgtttgattgatcttccaaaaatatgtctcctctcctctctgtgaaacaccatcactggattccccacctctgttgcctgcatgatagtgccaaaactctttaataagagatttaagcctcttgactccctagtccttatctatttttctaatctttttttcccctggcttatattctgtgctcatccaattggtcttgcctattttgccacgtatgtttcaccttctgacaatgccacaccccttccacccaacccatgtggaatcttcttatccttcaaagttcagcttaagcatcaccccttctaagaatccttttcttcatcccacaggcattccttcctctgtggccctcccatcacagtcctgagtcctttgccattgccctcatatgaaacgtgaaagatcttgggttgatatttaccttctcttgtggcttaccttctcttgggtccagattctatgccttcttctatccagctcttaccacattatgatatgtttttgtggtgactgattaagtggctctctaaaagcagactccataggcaatacaaataaaatatgccatttactgaaaatttgatatatgccaggtcttgagttaccagtggtattttaactgatttaatgctcagaaaacgttatgagattggtgtttttwaaaaaaaaaaaaaaaaacttattttaggtttggtgttatttttaatcccattttacagatgagaaaataaaggcttggagaagttaagaacaactcaaggttgttaaggcagtaagtggtagcactgggcttagaatcaggcaactgactccaaacctacgcttatcactgtaactcactatttcctctgaatgataatgggacattattatataataaaaagtgtatagtcttggagtcagactttcaagttctcgctgtactacctacaaatatgcaacttgggcaagttacgtaacctcaacaatcccatctggaaatgggccaatcatacctacctcacaggactgtgatgccagttaaaggagatcttagtgttaagcagctagctcagtgcctggccatgcacagggccaccgaaggggttgatttgggcagtgaggagcttgatgaytggctcctaggtgcatttctttccagcttkttttctcccctccctagccctaagtggagctttttctggttcattctgagttaagaacattccactttttctttgattctagggaaaccatgtggccatccgttacgttggtgaccaagcagaagcctgggttaggaagccgattgtgctacaggaaatacagctggtgaggccccctgcccagggtcagtggagagacaaagcagtgatgctctctgcccctcctctgccagctccctggttccaaaggagcagagatgggaggctgcttcccttaacgtgacccatctctccctcccctcgacagcccaggctttgaatctcagacctctagcctctcccaggcacctgaagcctgggatcattcctacctctgtttttttccccatcattctttctggccttgattctggctcttcatcctctgtgtctgtgatggctgcttgcctacctaccagccttgaacctsgtacttggagggagtcagtttcatgggcctgacttcctgctccttctctgtgatctgttgtgggccccacattggcattgacagccataagcatggaagcagggctgagtccatttactgtgacgtggttgagttaatcaccgtgcgtgaggttagactttgatcgttcctctgatttatttgctgcagacagacttcctgggtttacctcccagckctgccacttgtaggtgttactttaccttacctttcartggcagttcccttatttgtaaaatgggatctgtaacagttcttatctaacaaggtctttataagaattgactgaaaatatgcaaagcacatagcatggtcctggacatagagacacactctatacatgagctattgtaaccatgattatttccagatgggtgaattaaggcacgagagcattgttcccttctttggtatttgcaccgaaccacctaacatctgcattgtcacccagtattgcaaaaaaggaagtcttaagataagcaaaasagtaaaatgctccttaggtttgattagtggyagataataaagaagtttctcagtgccctctgctattcatccaaggtcagttcctctctgttctagttgcaagacctgaactatcttgtcaggctaccttctgggaatcaaattagccaaatgtctgcttcttttgttctgggggaaaactgagcttggtttcttctcttaggatgttatggctactcttgaactgttgttcctggacccatcctattatggtatgtgacgacagctttctgtcaggaacaaggaagtgtttgtaaaactcgagactgcatgcattctcaatattgagtcaggttatggtatctcctgggaagatttccagttattaggtttaatgttttctgccccacattgcgttagttctggccaaaaatataagctatattagagtcaaatctgttcaatygttaaagctcactgtgcttcaggttgagtcactaggaatcttttgaattactgwgtttttcaggatgttttgagaaactcggatcatgaaatggattggatattcaaactctcatttgcatacgacatagtcaatgtaagtataacacaaacttaccaaagaatgaatatgatagtgtttttgagttgctgtgtcttgaaataaactgtaatttttcttgaaaatgttagacctcttcagatstcctcttcagagtgattccagctctaaaatctatcacttctatctgattttttcttttcttcttccctgattacagataaatatatagagaggaaagtattttatgctaaagttggaatggatgctaagtttacccaatcagaaaagagcagagtatttacattgtagggtagaactttctatctcaaagggtatctcatcactaggttgtaaattggactgggggaagtgattcctgatattcttccctgctcttcagcccctgatttctttccctaggaaatggggatgccacattaaccacatagctgctgacctaagagttgggccatagattctgatctgaggaggtagaatctttgctttggcacaggggactatggtggctgcaaagaagggaataatagtaacactaaaatatatagagtgcctactttgggccaggcactttccagtactttgtatatattaatttattgaattctcacaagaatgtaaggtagatctattgttacttttattttacagattaaaaaaacacaaagcacagaaagttcctatgaccttcctgaagtctcatggctatgaaatactagagttaggattcaaacccaggcattttcaagtcctatacccttaaccactgtaccatactgcctctcagtaggaagcactagagcttgcttttgtgttttaccacagggagaagtcagtctcacaactagaagccaattaggggctgggggggcgtgtaattcagagggagttggagagagaccaattcctgcctgttgccaggaaggcagtggaaatactgagaagtggcagctggatccaaagcccaaggtgacactgtcttgaagggccatgccctaggtataagctggtgatgagggatggagagggcaggagagggaggagattcgctgtggggcgagccatgtcagtgtggaccagcatcctgaggctgctgtctcccacctgcgctaaatccagctgttctttcttaagcttgctgcctatacttttaccaccagaagcgacaaagccagtgacctgggagtcagtccggtgaggaaacctctcagtcatgggcagcacgrtgaagggtggtggtccactgctagtcattagtccaaccatcaatcaaccaacagactcctgtggggaagactcatctgggtgttgagagggcaaaaaggatgaaacacaagctgtgccctcctggattaatgggccactgacttattgagtgattttgccaggccacttcccctctctagaccttgacctccacgtaggtagaatgaatgaggctggcccaattgaagtctaasggctttccttcaacaaggattttattgctttttgtttctagggagctgagtcccatatctctgtgagactttgatttcctaggctttagcaggaagccagcagattgttataaagcaaggtcaataggcagaagcgtctctgtgattgggtcttcatgggcaaccctggaccaccactgttattatttcattaaaattttattgagcatctgttaagagtctatcctactctggtcacttttgtaggaagaaaggacttgtttccagctttggatggcttaaaagctagggaaaaaaatagtctggagatgtacatataaaattctttaagtggcagtggttataaactgggaggatgcgacattggcatcttttcctaccctgggatcttctctccttcccttcacccacttattccttctcttcccaccgagcacaaagaagtattctggactctaattatctgcctcctgcccccatcaaaacagccaacatcatttatattggaagtgaagagtaagctagtaagtaagttctcaccaagccatgaatgactaacagatttgacctttttagtgtaggcatcagatttcaagaagcattaacccaaaggtttctctggaaaaacgctatggcaggtgggcatggcactttgaaggggaagagctccctggtggtcatcacctactctagctcastgagtctaccctctactctgtgccaggaaaacagaggacagcttggcattttgctttggaaggatcattacctcctgagatggagtgtgcacattctgggatcatgtagggccactactgatgacacaataggctagatcaaggcacaggtaggccctttgaggttaattactctgccaatgttctttgaaaggggactgcgagtaacagaaaatgtactgtactcttagagccttgccatgggtctgggcattgggccaagctccgtgggggcgattgtagtttggaaacaagtctctctatgtctatttgatcagcacctcctctatatcaggtatcagagagactctgagatgccatagacatttcaaggcaacaaacatatattgatcaagcgcctaatttggatcagacccgattctgggcgtaggaggcacagacgaatgagcctcattgtcctgtccccaaaaagttcaacccagttgggcaagcctgggaaggagtttggagagtataatactcttcttgagttacaaataggccttcatgtctaaataagagaagtcttgatggattaagaggatgaaggacaattcagcaaagaagttgtcgttgaagtttgaaccctgactgccacttactggccaggtgaccttaacaaccctgggcctcagttttcctgtgtgtaaagataacatcagtacctgactcatagggttgtgtgaggactaatgtatgcaaaatgcttagtgccatgccttccctgtaacaggcgtccagtaaatgttgattgttagtagtagcaatagtattatcacgatcatagataattctattactggtgctaaaagaagtacatattcttgttttaatttccccaacactcctatggggcaagtctgcactgtccaaatatgatagccaccagccacatgtggataatgagcactgcaattgtagctagttcaatttgagatgtgctataaagtttgtactgaattttgtagacttagcaaaaaaaaaatataaaatatcttgctaatatatttatgttgattacttgctgaaataagatttttcaatacattgggttaaataaaacattataaaatacatttcacctgtttggtttataacatggctgctaaaaatgtaaaaatacacatgtggcttgtattatgtttttattggacagtgatctcaataattagcaattaactccattattaattcatttttaactccaatagtagtaatattggagtaacatgatctccatttccaagagggaaaaagtgaggcttagtgaggtgaagtcatctgcccagctggtaagacgcagattgggatttgtagccagtctgtctccaaaggctgtgtttgctcttccatgcgatgcttccttcctgctaagtaccagagagtacagatatagggcccagaggtaggagtgctgtctgccacccaggaatttccagtagggcaagaaatgtagctaacagacagatgattgaactgatactggtgggctaggggaggtccccaaatgctggtgggaccttgaccccagccagtgtgcaagctcttaacaccactgtgagaaggaattcaaggataaatcagaaagtagtgaaagtatggagatttactgcaaagtgaagagtacacactcaggaaaggggagygcgggcagacttgagagagagtcacgcaatggaatttggggcttctaccttcatgagtttctttaaccaaggggtagaacattcatgaggattcctggaaaaaggtggagatttctgggaactgtgatgttacccatttttacattaaatatggctgttcctgggactgttgtggcactggtgggtgtgtgacctagtatgttaatgagcttataataaggtcccaggtgaaacttgggtcaaatccagcaccatgttggatccaattggtcttagctggcttggcccacaccctgttcttttcagggtcttrtcagccctgaaaataatggcttatgcagctatttcagttcctttttgctagtcatgtgtaactgcctggaattttctgttctcctgcagccactcctgttattcctgtctcagagctgccaaaagtgcataaaatctggcatgtaaataataaatcctttcatagctctatttgctctctgataatatacataaaaatcatacatttccatcaagatagaaaataaagacatgcatgccatctcttggagaggaatgcacacccagaattccaagcgcccctcagcatgtcattttcaccctaatggaaggagctctgttaaaatcctakaatataaaatcgttgactgtaaaatatctcatacttggggtaggcatggcactagcaaaggcaggaggaaagcagaaaaaaaccttgtgtgtatcagggacattcctgttgaatggagaggtctcctgctggaatcagagaactctggatcagacacaggtctcacctgatttcaagcttggaccttagcctattggagcctccctggggaagtcccagaggcagccccagccaggcccctcccggtccagttgagtgggcggcagtttcaaaatgtgattcaatgttaccatctaaaaacaaataaggcattttgataaaggaacatggggtagggggtggagagtgattggggcaggggtgggggcatgtatccattctcctggatgttttcggtattatctcatatttctttgttgttgttgttatttattttttgagatggagcctcactttcttgcccaggctggagtgcagtgtcgggatctaggctcactgcaacctctgccttctgggttcaagtgattctgattctcatgcctcagcctccagagtacctggaattacaggcacccaccaccacgtccagcaaatttttatatttttagtggagatrgggtttcaccatgttgggcaggctggtcttgaactcctgaccttgagtgatccacctgcctcagcctcccagaatgctgggattataggcatgagccgcccagcccctatcccattttttttttttttttttttgagacagagtctcactctgtcgcccaggctggagtgcaatggcatgatctcagctcactgcaacctccacctcctgggttcaagcgattctcctgcctcagcctcctgagtagctgggattacaggcacgtgccaccatgccaggctaatttttgtatttttagtagagacagggtttcaccatgttggtcaggctagtcttgaactcctgacctcttgatccgcccacctcggcctcccagagtgctgggattacaggcatgagccaccgtgcctggcccttatcccatatttctaatgcaatattggcctcagggctctggctcaggtgggatagttacttggcctgtcagcactgctggaggaagagatgcacccctgtgctggtgaagctgcttgttgtctggggtgaatacccgaggttcatggtatcacgccaaggaaattgagtactcacgacacccaagaaatgggtttaggagcacagttttaataagcaaaagaaagagaaaggagaatagctccctctcttatgagagagagggggcccacagcgaagtgcaccagattttatagactggcttgaggaggcagtgtctgatttacatagggcccaaagattggttggaccaggtgtgacatttacatagccagcgatgaagctggcttccccaccttaatcttctattatgcaaatgaaatctttgcctgcctggcgccatgttgcctactgcttaccgtacgtgtggtttacaaagaaaagggacgatggagcccctatctgaacatgtctagtccctaggtagcccctttcctattagcacaactgcaggcattcacccatgcaagcttctagcctgcctttctatgtctgcagcttgattttacaggctgctctttgttagaaaagaaaatgatttgggggctatcacacgtgtccgtatagaagaccacctaaacaggctttgtgtgagcaacaaggctgtttattcacttggatgcaagtgggctgagtccaaaaagagagtcagtgaagggaggtaggagaggggtagctttatagaactggggtaggcagtggaaagttacagttagaggtggttatctattgttagcaggggagggggtcacaaggtgtatggtggggagatcataagactcattgtccagaagaagaaagtcacagggtcrattgatcagttggggcagggtaggaacaagtcataatggtagaatgtcataaggtgggttaattagttaaggcaggaactggctgtttcacttctttgtggtgttccagctactccagacttcttggctcctgcaggccatctggacatacatgtgcaggtcacatgggttacaatggctgagctttggctcagaggcctgacgggctgctttccatttaaaggaagaccttaccgaggactcccatacactcactaagtgtctaaataattcctttattaactgtttttttttttggttttttttttttgagacagagtctcgctttgtcgcccaggctggagtgcagtggcacaatcttggctcactgcaaactctgcctcccgagttcaagtgattctcctgccttggcctcccaagtagctaggattacaggcgcggacaccatgcctggctaatttttgtatttttagtagagggggtttcaccatattggtcaggctggtcttgaactcctgacgttgtgatccacccacctcggcctcccaaactgctgagattccaggcgtgagtcatcgtgcccagcctctttctaactcttatatcactggtgcccaagaggcccaagaccctgtccttgggttcacttatctgttcaggatgttccccccaccccattcctccctgggacctcctcatagcccctcccacacatgacttcactgccccttctcagttagattgtgtcattgtgtaattacacattggggttgtgtcattgtgcagggggagtatgtgctttgaccctccttcctccctcttccctcctccccctttttatctcccatcacccagggcacaggaaagacgaaaatctagtggtttagaagaagctgggcttctaacccaatcccacctgggtttatatcccagctctggtcctgacttcttgggagcgatttaacactccaaatttactcatcctagcctgatcactaggatgtatttattttaagctggcctggccttcttggcttcacactaaggagctggaaatagttttctccattttgggtgtcccagccccagytgactccagggacaaggggctatgctggtggctcctgaacaaatgaacacagagatgggcgcatcccctgccccaggcccctctgtctgtgtttctgtccatctgtctctctgccttggttccttccagcagtgttatcarcacctggtctgcctcatttgctcattttcacccttgcagggcatgctgttcctccacaggagccccctgggctcccacagcaacctgaaaccttccaactgcctgatggatggtcggctgcaggtgaagctgtcgtgattcgggctgtgggaactcaagcatggctaaaaatacagaacatatgatgagacagtgaccaaccactcaggtaacctttggttgatcttgcacccactagctattggcagcatggtcagaggttcctggctccatctttgcttcctgatgctcatctgtacaggtatccacaggtgggccttcctctggagctgatgatatgtggctgttccgttcaactgaggagaacgagaaaaaraaaaagtatctgcaggtggcatgagttcgtggggtgatgtctgggtttggagactggttctcgtcctagctcagctgagccacctggagcaaccattgcccctctctttagttctctttgttccttcccacattcatcctatgttctcagcttagaacataagatccgccagatattttagagataatcgagttccatagttctctctcttctaggtcctggtccctctacccccaaccaactatcaactgaatcaaaatatctgaagatggggtcttggcatctgaattgttttttaaatgctcccaagtaattctgctgtgcatctgaagacaaaaccattgcctcaagtccacttttcccttccctatgtgccaagtggggttcaatgactcttcctacctgtccagttaattgaatgccttggattcgtacctttgcatgtatcctgggctctcctgagaccagtgttctcagccctgatcccctttttgctggagcagcatgtcaccaggagcttttttgtgtcaatttgggaggtttctatatcatatgataggatgatgtcttacagaaggacaagggggatgggaatggttgcttatgcctgaaatcccagcactttggaggctcaggtaggaggattgcttcagtccaggagtttgagaccagcctgggcaatatagtgagatgctcccgccccaccatctatacttaaaaaagaaaaattagctggtgtggtgacatgaggctgaggtaggaggatcacttgagcctgggaggtcaaggctgcagtgaactgtgattgcgccgctgcactccagcctttagagaccccgtcaaaaaaaaaaaaaaagggatggggagaaattttgtttttattattaattaattaatctttttttttttttttttttgagacagcgtatggctctgtcgcccaggctggagtgcagtggcgcgatctyggctcactgcaagctctgcctcctgggttcaagcaattctcatgcctcagcctcccgatgtagctggggatcacaggcatgcaccaccacgcctgactaatttctgtaattttaatagagacggggttttgtcatgttggccaggccagtcttgaattcccgatctcaagtgatttgctttcctcagcctcccaaagtgctgggattacaggcgtgagccaccgtgcccggccaagacctgctggcagctgtcctagttccccttctgcatcctctaatgtatatcttttgttttaatgactattacctataatgacataagcctatagacttcactgcagaaaaggaggtgtgtaaaatatctagaatagacccataaatctatagagacagaatgcaggttggtggtgattaccaggggttgggggtcaggakaacagggagaaacggcttcatgagtaaggagttgactttggagtgatggaaatgtttccgagctagacagaggtggtggttgcacaacatcgtgaatgtgctaaatgccactgaattgttcatttaaaatggttaatttttttttggskgggggatggaatctggatctgttgctcagggtggagggcagtagtgcaacctcgactcactgcaacctctgcctgctgggttctagtgattcttctgcctcagccccccgagtagctgggattacagatgtgttccaccatgcccggctaatttttgtatttttatttatttttattatttatttatttatttgagacagagtttcgctcttgttgcccaggctagagtgcaatggcacgatcttggctcaccacaacctccgcctcctgggttcaagcgattctcctgcctcaacctccccaggtgctgggattacaggtatgcaccaccacacccagctaattttgtatttttaggagagatggggttcctccatgttggtcaggctgggcttgaactcctgacctcaggtgatccacctgccttggccacccaaagtactgggattatagacgtgagccaccatgcccagcaatttttgtatttttaatagaggagtttcaccatgttggccaggctggtctggaacccctgacctcaatttatcctcccacctcggcctcccaaagtgctgggattacaggcgtgaactacgcctggcctaaaatggttaattttatgttctatgaatcgtaccacaattgtttttaaaaataaaggcaatacagagaaggaacttgaacatgaaaaccagctgtaattttagtcttgagtaaaccaccgttaacatgttagygcacatccttcctgctaattttctctgtattcacacacacggacccctgttagctcttcaaatcagacaacactggggctgatggctcagggctggatrccttcctttctcctgtgccccaaaggatgaagaggtgkcttttcctgttttgcctggcagtaccctcactccatgcggacatcccattcttttgyagagctctactggactgccccagagctgctgcagttcccggagatgccctggtcgggtaccccgcaaggagatgtttacagcttcgccattctgatgagggagctgatctaccattgggaccaygggccttttgatgacctccacgaggcaccrgatggtaaagcgggacagcctgcttgggaggttttggtcgtgtgggccagctttgaaatgctggttttttaaattaattgttttattaatatacaatttattccattattttttattgaaaaattcatgctctttcccagcaagcagtctcagaaaaaaattaaagaaaaataaaaattcatattctttttttaaattagaaaatgaattgcattttggttaccaaaaaaatcaagggaccccaaattatataacttgttttgttacagcagccagagggatcctattagaaaatgaggcagattatgtcacttctctatcagaagcctcccctggcttcccatctgaggagtgaaaactaagtcctcctcrtggcctacaagaccactgaaggcgttgaaaccgtgtaacctctgcggccttctggattagtttcctagggggccataacagtgaccacaagcttggtggcttgaaacaccgatgcttattccctggcagttctagaggccagatgtctaaagtcaaggtgttgtcaaggctctgctccctccagaagctctagggaaggttccattctctgcctcttccagctgctggtggctgccccagcattcctgggtttgtggccacatggcctcaacctctgtctccgtcttcacattacctcctcctctgtgtacttatcctggctgtgccacttatgaggacatttgtcattggatttggggcccacccctataatccaagatgacctcctcatcctgagatcctaaacttaattctgtttgcatatttggtttatatcccctttcccaaataaggaaacatttgtagattctggggattaggatttggacatttccckttaggaaccacgattcagcccactgcaccttcctactgtcatctcttatggctcattcctttcagtcacattggccaccttcatgcgtctccaacatagacaaatccatagagacagaatgcaggttggtggtggttaccaggggttgggggtcgggagaacagggagaaactgcttaatgagcaaggggtttactttggagttgtagaaatgtttctatcactctagacacatttctaccccaaaccctttgtgtatactgttccctctgccgggacacctctcgcctcatattcctatgtacaaatttgccccattctttcttaagggctacaaaatttttcactgtgrgaatatgccataagtggtaccttgatacacattttggaaattgctgcaatgagcagctctatatctttgcacacatggtgaatgttgtttcaggctagatttctagccatgaaattgaggagataaatatattttaactatattcaaaatccatgataaatgctgttcagttgtccacttacaaaggatattttcgggcttttttttttttttttttgctgggttgtctcttaatggctgatgcctggatctcarcctgagattctgatatcattggttcggggtgctgcctcagtgtcagggtttcaaagctcccggggtgattgtaatatgtagcagctcaggctgcttggagagaggataccagtgtgtgtgtgtgtacacacataagtgtgagtttctaagtaaactcagcccactttctctcttgattttttttttcttgctttgcctaccatttctagcctatcctcagtggtctatctcaagcctcagctttagatcattatctgttacctggagactttttgagtcaggagcccactgtgaggatatgcaattgcttttagaccagattccagtttctaatttctggctaaataaagcagaggtgagattaatccaaaaagggtaactcaaaatccaagcgcatctgactttggcatcaagcacacacacaaatatttccagactgagcccaggcaggagcccacccacagtccctcagccccttcaccgcctaggttttgccagttgggatctgtaagggaagatactgtggacaatcaatgtatttccccttcgttgttgagctcacaaaattaactgagagctggctacatgggactatgtatccacaggactgcaaccaggaagaatacagtgtatacctaatttatgggcaaacagttcttcaattaacttctgacactttcctataaacaaagcttgtactgggaactgagtagctattgattctctgggcacgcaggacccatggttctcaaactgtggtgggcatcagaatcactgggaggcagttaaaacacaacattgttgggttccactcttggggtttctgactcagtaggtctggggtgaggcctgagaatgtgcatttccatcaccctcccaggtgatgctgataaagccacagcttgagaagtactggccttggtccttgtggtccttggaccagcagcatcagcatcagctggaaacacgtcagaaatgcacattttcaggccccactcctgacctgcttcattggaaactgtggaggaattggtccagaaatctgtgtgtcagcaagctccccagcgattctgatgcacgttgccaaagcaaatgagcaacagtgctaacatgtctagtagacggttaaagattataggatggaaacagctggttagaagttactaggtaattcacacatgtgctctgaagtgcagtcccatgggtctgaatttgctctcgaagtcctatgtcatttttctgattctttcatgcatttcttagagctaaacacagaaagcagaagatgccatagtaattcagtcactgcttttgaagccattgctgtctcatgtctcaaattgtacttcatttgggaagtaaaacacaattttccagagtactttttttttttttgagatggaatctctctctgtcgctcaggctggagtgtgatggcgtgatctcggctcactgcagcctctacctcccrggttcaagcaattctgccttggcctcctgagcagctgggactacaggcatccaccaccatgccaggctaatttttgtatttttagtagagagagggtttcaccatgttggccaggctggtctcgaactcttgacctcaagtgatccgcccatcttgggctcctaaagtgctgggattacaggcgtgagccactgcgcctcctagagtgctttttaatgcacatactttcagaatacttttaggcattaaacatgtacacttaaacaagatgacattttatgcacagttttgtaacctgtatttttttattatattaaactaacagtcatatattattcagatttcctagttcttacctaatgtcctttttctgtctctgaaccccatccagggtaccacattatatttggttgtcatgtctccttaagcttctctgggaaaatttctcagactttattttcaatgaccttgacacttttgaggagtactggtcagatactttgtagaagttctttcatgtggaatttgtctgatttgtttttcttttctcatggttttgcgtatatgtattttgaaggatgactgaacaagtaaattgtccttttcattgattattgctgttgatgttgaccttgatcacttggctggggaagtgtttgtcaatttctccaccataaagttactctgatttctcccttccatacttagtctagggagagaaatctctatgtgaaacccacacttatgagtgaagagttaggctgggcgcggtggctcacgcctgtaatccccacattgtgggaggccgaggagggcgaatcgcttgagcccaggagtttgagaccaacctgggcacacgggaagatccagtctttacaaaaatacaaaaattacctggacgtggtagcgtcccagctactctggaagctgaggtgtgaggattgcttgagcctgggaggcggagtaaagatcctgccactgcactccagcctgggcaacagagaccctgtctcaaacaaaaaaaaaaaaaaaaaaaaaaggagagggaaaaagaaaaaaaagggtgggaagttaggttccacctctttgaggagggaatacttggaattcttctccgtgggagatttgtctactgtgcccattcatttatttcttcaagtacttaggtcagtatggactcatggatatttatttcatactttgagttataactgaatcactactatttattttgtggcttaaattgttccagttttggccattccgtttcaggtggcttctgtgtctctttgacatgtagccatcgctgtggtgttttgtcttgtttctgtgtatttccttactttctggtaagacaagaaagtctcattttgcatatccctgcgccagtgctagaagcaaccagttctctccaacaagccctggctgcttttgttggagaaaggtattagaaagttagagctgacactagatacgctcattgctaccggagtgttgttgcttatgggccttctcagtggacagagtagggaaatgygtgtgcatactaacccgtatgtatacatatctctataactacacatgcacccatacacatatatctgcatctacattaaactaaacatgagttcccattgacgtctccaaatctaactcatcgccatcacggttcattgcagtcttccccattacttttctgtaaattccaacattgagatactggctcccaccatccaccatccatgtactttgttcgatccctatgtgtgtgttcggtgattttagacttgttaatctgcatccccatgagaaacagttttaccaactagagtacgatgattatgaatagttccttttgcctttagtcttagaaagtttctagtgatttcacaagcgatgtaggtcagcattctttctcactcatcccattcagtaaggttatgccatatatttgtaacactgttagattcttttatcgctgtttgcattctatcttggggttgcctaatttcccaattggtattttttaaagtttgctttccttatggcttacttttgtgctattaagctctatgggttttggtaaatacatagtgtcatctatccaccactatagtatcctacagaaaagtttcctcatcctaaaattatcccctgcacttcacctagtcaacgctctctgctcctcaaactcttggaaaacactgatctgttttctgtctctaaaattttgtcttttctagaatgtatatttccttaatttctgggaagacaagaaagtctcattttgcatatctcctgccccagtgctagatgcagtcaattctccaagaagccatgacttcttttgttggagaaaggtattagaaagtaagcagataacgaggtcaagagatcgagaccatcctggccaacatggtgaaaccccatctccactaaaagtacaaaaattagctgggcgtggtggcgcatgcctgtagttccagctactggggaacctaaggcagaagagtcgcttgaacccaggaggcggaggttgcagtaagcggagatcacaccactgcactccagcctgggcaacagggccagagtctatctcaaaaaaaaaaaaaaaaaaaagaaaaaaaaaagaaaagaaaaaagaaagaaagaaagaaatgatgctagatatgcccactgctgcttgcgtgttgttgcttctggggtgccatgtaaatagaatcatacagtacacagccttttctgactggtttctctaacttagtaataatgcatgtaagacttatccatgttgttgcacacacagtatttttatttttatgccaaaacatgtatacattgttctcaaaatattattttcttgacaacatctggttaagcagaatgtttaataaatgtcagtaggagccagtgaagaagtgggaaaaattaggtttagaaaatcggacagagaggcaggacatgatggtaacatttattacgtgttaaaatagcatttctgcgacatattacagaaaatttaacaaaattgcatgaagcgcgctttgggggtttccaacacgaaatgcctatacattcctgaaatcatatagagatatgcttctcctcaagcaaagttctattttaaaaaatcttgatttgaaaacaaattaattaggaggatgtttgtttatatgtttttcattagrattgttcattttccaggcagattctcagagtattcctattaaaatatccagattactttggaattctaatctgttctatttatttaaaaactcagtttacaaatrtaagagcacaattactattgaaaatgaagtgtagtaagtggcacaaagttctgatgtttggctgtctaaacccaacatgaatttcagaaatcatcaaccaaatcaaagaccctgcagcagcagtcccactgcaaccttccctgcccgaggagaagggcaatgaaaagatcgtggccatggtgagggtgtgttgggatgaatctctggagaaaagacccagtttctcttccatcaagaaaactttacgagaggccagtcccagagggtgagttagatgtgcaacagatatttgctctcactcagttaaccattaggattttagagctgctgggcatggtggctcatgcatgtaatcccagtgatttaggaggctaaggcaggaggatcccttgaggccgggagttcaagaccagcctgggcaacatggtgagtttctgtatctataaaaaataaaataaaataaaaaattagccaggcgtggtggtgtgagcctgtagtttgagtttcttaggggggctgagaattgcttgagccctggaggtcaaggctgcagtgagctatgattgtgccactgcactccagcctgggtgacagaacgagaccctgtttctaaaaaacaaaacaaaacaaaattaaatctatatggccgtgattggttctatgtgactcattcccttcctccctcctcccttcctccattcctcccttcctcccttccttccttcctttcttccttcctcatacactcactcagtgcttaccatacacaaaacactgtactacatgctggttacagtggagtgagaaatttttcctttatttcataaatgccacaaaaatggatcagatattaataattctactgccttctttgtctatctcaggtgtcactaatcaattaaggcccttgtttccagggagttttgacatggcttcagagtctttttcaaatcagcattccaagggttaggctaatcaatttggactggactgtgggataaaaattactcaccacccatagagtaggttatgacttaaattacgcattcctctccaacaactttctcaatagtagcttcctttacaccagataattgtatcatcttttagtacatgaatttaggaagacatgcccatgttagaggtagcttgagttggtagaaagagccccaggctaggaatcaggtgtctactcttaatttggaccttcagctatgcattatttaaaaaaacaaaacaaaacattttttggagtcagggtctggctctgttgcacaggctggagtgcagtggcatgatcttggctcactgcaatttctgcctcccggcttcaagtgattctcatgcttcagcctcctgagcagctaggactgcaggtgtgtgccaccatgcctggctaatttttgtatttttagtagagacagggtttcgctatgctggccaggctggtctcagactcctgacctcaggtgatctgcctgccttgggctcccaaagtgctgggattacaggcaagagccaccgtatctggcctcagctatgcattcttaacacaatagccctgggttctgcatttccaagctcgtaatagtttttaaattttaaaaatcatttttaaatgatttttaaaattaacaaatgaggctgggtgtggtggctcaagcctataatcccagcactttgggacgccgtggcaggtggatcacctgagatcaggagattgagaccaggctgaccaacatggtgaaaccccatctctactaaaaatacaaaaattagctgggcgtgatggcacacacttataaccccagctactcaggaggctgagacaggagaatcgcttgaacctgggtggtggaggttgctgtgagctgagattgcagcactgtactccagcctgggtgacagagcaagacgccatctcaaaaatgtaaaataaaataaaattaaaattaaaattaacaagtgaaacattgtttatatttatggtataccatgtgatgtttcggaatacgtatactgtgtagaatgattaaatcaaggtaattaacctaaagatacmtcttaagtaagcttaagatacatccccatattttttacttagaaaatatggacctcaatgttatgacaaatctattttcctatgtgagtctaggtctcctcatctgaagatgaggaatttaaatgagttctctgaagacgcttcgaaaacaaaggactaatagaatctagaagtgcccttacattagaccgtctgaaaagaaaggaatgacccatcctgaaatctgcattctcaatgtctgttgggaggtggggaatgggccattgaaggccaccatttgttgagtgcctgtggccctggacgtgaccctagacactttatgcatgttatctccctacatcctcagarcaacaacgtgatcgtatgtacatgaggtacgcgtgattatcttcattttccaaatgagtaaagtgaggctcagagaaatgaaggaggcagcttagagggctgatgaaaggcaggctctgtcctgtcaygcggctgcaatgccattgtcacttccccgatgtccgttggcaacccttaactaggacacctgaaaggcaagcaatattttcctggaatgtgtagctggaagctctgttccactgaggccctaagggtcttgggagaaaacatcaatgtctggtttcttttaaagycatgtgagcatactggccagtgtgatgagcaagctggaagtgtatgccaattacctggaggaagtggtgcaagagaggaccagccagctgactgcagagaagaggaaggtggagaagcttctgtccaccaaagtgcccaggtattcggaagcactggggccttgaagctgcggcatcaccatctagcagccccacataggggggattatttccatgattatttttctaagagaatgtcaggttcttctaaaaggggtcaggcatttttttttgtgcagtttggtacacctgtaaagggagatagwggcaaactctcctgaatccatagaaatagaggctgtagtcggtcttttacgtggagggtggtggatgcagcaacaggagagtagccactagatggcgccctcgtttcacgagtccgactaattgctacctcccctgtatttgattgtaggtccaaaacctccacacagtttaatatgtacctgtggcttcacattcaaatattgcttcatttttggttctgtttctatatgttcactctctcaacacttggcagaagtatttgctgttaaaattccygtgcgcttcttgcatgtctagaccaaagaagtgggggsagggatttttaatgagattggttgactgaaatgaaattgatttgtggattggtgaatgattatattcccttccacaactgcagagtctttacaccctaactctataaccaatatacataaagaaaatcctttttgtaaaggcattatgtgaccctctctcctactcccccacaatttatacacgtcaattaaaatatctctttagagagaatgcaactggagaagtggatgttaaaagaattcctctagaaaatgaattttgttaaccaaaagcttagccattgaagcaaaaggaccaatgaggacaactttgcaggagtctgtaggagatgagatgaataagatcccattcaaaaatgatccgtttctctggtttcagcttcactggagaacaactactagccggaaggtccgtggaaccagaacatttcgaatctgtgacaatctttttatctgatattgttggattcacaaagctgtgttctctcagctcccctttgcaagtcgtcaagctcctcaatgacgtgtacagtttattcgatcacatcatcacaacttatgatgtttataaggtgagatgcctcatcctgactgtgcgatcacgtgtgctccttgcaggctgtctccggggcatgatggagaatggaactgattccagacatcagccaggaggaagctccatttcagtctatgtcacttcacggcagaaactcaatattttatttctgtttgttttcttggaaaaggtcttgattagtcacagatgtatgtgcttgtcaaaactcaccagtttcctctgtttccttccattattttatctcacagtaaacactttttaaaaagaggcattgaccttccactggctaattccttcccgtctttcctaaatacatttccttcagaggcagagaggctcctgtttactgtccttcaaaggttgtccttggatcttgtgtgggtctcacctctgttgtcctgatccttagcaattaagagtgaagaaagattcccacttttagactatcagacttgtgactaaaagcggggcagcaacaattccctgccgggtgctactgtgggagatagaaggacacggtcacctggagtgaaaaccatttttgatggggaaaacagaaatgttttggctcttcatgactgccgggtggtggtggtgatgagggctgctttctgtgtgttctgactctttagaaggggtcagcccatgactctagggacagtaccgtgtgcctgtgctcatacatgcctggtgggcagccacaagtgcaccagcactgaccacaatcccagggccctgtctctgcctgtggacctggggatagcgagatttgggggacagtgtggtcatatggtcacatatctcagtgacacagtgacacgtcttcaatgtttatctcccagtgttccccacaaatgatgcctctgttcaagggtgaaagaaaggatggtatagataacctttaagagtagatcacacacacccaacaaaatcagaacctgccctgcttaggaggatatcttctgggattttcctcttagtattaccttctcagttgtgttttgcttgagctcatattaaaacttagtttgtatttctaaaggacgttaccacggtggggagaggaaacccggaagcaggtgaggcttgtcgaatagttgactttgcgtaatttcagggtcaccaggacagaggtgttcttactgtctggctaatgcctgaaattcagcctttaccacatcatctttggattctgctaaaatgcaaatgtatctggaaagggctgtaactttaagcttctacttgtcatttatttctctattgtgaatgacagatctgaaagctgattttattaggaggatggagggggaagaggacagacaggcagatacatacattatatatatataatgtgtatatatatataatattgggtgagatggtctctgcttgacggatccacctcacccttcaaggttgactctaggagcatactgctccctgtctcactggttctgaatttgggctggggaaatatagtcaccgctactattggatttcagaggaggaaacagtgactgtggggagggaggctcagggaaggagggtgaggggggctttgtggaagagccatgacaagggcaggaactgaagaaatgctggaacttgcatggggtggaggtcagggagtgtgacgcgtccaaacatggggcctcaaggttggggacaaatgaggggccttaatctctgaccccaccccmacccttggcctccctcatggaaaacaaaggtcactctgtcactttgttttcaggttgagaccattggagatgcatacatggtggctagtggactccctaccacaatggaagccagcatgtggctgagattgccaccatgtccctgcacttcctcagtkccaccatctgcttccaaattgggcacatgccccaggagaagctccagcttcgkattggcctctacacaggtagacaaaactgatggcctgatggtccagggatggcagcaggtagttccgggttccactcctaggtccagggcttttaggaacctggacattgaacagtaacatctttaggggaaataaaagtttgaattgtctctgcatgtgtatttctatttagctaggttgcttggtaacaacaaggacacacaatggcttcaatgtattcaaccaaaagtaaggactgggcacagtggctcacgcctgtaatcctagcaatttgggaggccgagatgggtggattgcctgagctcaggagtttgagaccaacctgggcaacatggtgaaaccctgtctgtactaaaatacagaaaaccagctgggtgtggtggcaggcacctataatctcagctactcaggaggctgaggcgtgagaattgcttgaacctgaaaggcagaggttgcagtgagctgacatcgtgccactgcctccagcctgggcaacaaagcaaaactctttcaaaaaaaaaaaaaaaaaaggaagagaccaaaacccaggatgggttctacagggctaattttcttccatgccttagcatcaaatgccctttgatatgctctgtgtttgctaactcatgggcatgtgatctgtgcagaagtgatgcatgcttggtttcacgctctttctgtcactgtctggaaattcttaatcatttttgcacagagtgtcctgtgttttcactctgcacttgttccagcaaattttgtagccagttatgctacctatcttccaaggctcaacaaagataaaacccgatcctcagtcagaatgaattgctcccatgtttgtaccactattggcattgttcacagctctagttcgtgagtgacatggtcatttaatgatgatgtcgctttccagcaggtgtttgtgggttctgtcggtttcctttctgtaaaccctaaaacctattgccaatttgccccaagagggtgcatcactacatttgttcatctgatgcgtatcgtcgagtccagcctcgggcaatgcagagcggttatggcctttggttcttcattctttaggtcctgtggtggctggtgtgctggggattaccatgtccagatactgtctatttggagacactgtcaacatggcatccagaatggagagcagcagttcacgtgggtatcactgacaacactttgtaaacacaatattgttatctccctccaggcccctagctttaaccaggggatacttttagaagatgcatttgctttttgcctactgttttccatctggaggttaagatcattatccacttcaggcaacactgatcacatgctttatagacagggttttgcactctgctcttgttagaaccatgcaaatacacgcagcctccttttttctatgactttcagtcctaagcaatcacaggcacatataatcacttaaatgaagagcaggagttggaaagctttttcttttttttgagatggagtctcactgtgtcacccaggctggagtgcagtggtgtgatcttaggtcattgtgacctctgcctcctgggttcaagcgattctcctgcctcagccttctgagtagctgggattacaggcatgcgccaccacgcccggctaatgtgtgtgtgtgtgtgtgtgtgtgtgtgtgtgtgtgtgtgtgtgtgtgtgtttagtagagactgggtttcaccatgttggtcaggctggtcttgaactcctgacctcaagcgatccacccacttcggcctcccaaagtgctgggattagctggcatgaagcactgtgcctggcccggaaaaccttttctatacagggccagacagtaaatatttcaggcttcaggggccatagaatctttgttgcaactacttaagtgctgttgtagctcaaaagcagcaatagacaatatgtcaatcaacaggcatggccatgttccaataaagctttatttgcaaacacaagtagtggactggatttggcccataggtgataatctgcccttctccgaggtagagtatattcttggtggtacagaagaaatctatagccaggacctccagggaatattacattcttttgctttatagtaattttattgcattaccattcccaggcactcgtatgccatttgtcagatgagacatgtaaaaaagaattactcagtgatgtcagtttcaaaaaggcttagatgattaacattgttttatattgtaaattttccacattatataaaaacacattcattgtttaagttaaccgagtctcaaacaagaattttttttttttttgagatggagttttgctcttgttgcccaggctggagtgcaatggcatgctctcggctcactgcaacctccgcctcccgggttcagcctccccagtagctggggttacaggcatctgccaccacgcctggataatttttgtatttttagtagagacggggtttcaccatgttggccaggctagtcccgaactcctgacatcacatgatccacccgccttggcctcccaaagtgctcagattacaggcgtgagctaccatgcccagcattcaaacaagaattttaaacctctctcttatcttgtaagtaaaggtttttaggataaactttgaagctagagctgcttataaaggatctagacctgattctaattgcatttctggttacaaacaacattttcagtaaaatgtcccagctgaggagcccagtgaactgccctccatggggattaccttgtatgctgaatcagttctgccttctgtttccaaactgaatgcactaaggttttgagcaggactcaacaatgattgagcaatgtcagaatggttgagaatcccaacctaagagtcccagacttcagagaagtcgtctgtgatttgcttaatgaaaagtcctggtgatcagagaattcaagcagtgtaggttccctctccaaagcagcccctaccccactgacactccactgataagttgataactaagcagtgactggtttatggcagctctccggattcatgtctctcagagcactgcaagcaccctggtggcattgggagggtacgatttgctaaagagaggcaccattccagtcaaggtaagaccaggccaaccatgccctgcctgccctgtttgggtctctgatagagacatcgaggaacttagcgggatggatgcatctccatggagtgatgcagggagacctctaaggttcccctggaggcactcatgactgccagatcttcttccttcagaggagaagaagttccctcaaatgatcaaacgtggaatcttcaacagagaacaccttaactcccagctaaaccaaccccttagggaatgctttctttttttcttttctctctctcgtttttttttttttggctacaaatggtcccctagcttcctcttgaacaccccagtccagaaaaagaagtagaagggaaggcagtggcatcaactccccagttttgcttagcctggccttagcattctgtattcaatcaactgacttcagtaagaggaagacttttctagaaggcggcatttagccatagcttggaacccattcctgctactgaccagctgtctgagtttgagggcttgtttttgtcatctgcaaaatgggggtggtgataataccgtccttgaagggtggatgtgaggagtaaatgtggacatggatgtgaggcgcttcactgggtgtcccactcatactaagagtgcagtagattttattattatttttaaaagattttctttgcaacaagctttagtctccgtggactgtcaccccctaggacattgctgcctggccatgcaggcttatcagcaaagcccaagaaaatcagtaagattttatctgtaaggaggccttttgcttgtggagggagggagctcccactgtcccagcaagtaagacagacctcagacatctgcccagaggccatgcattacaggcagcccgccagccccaccccaaccctgccagcgattccccagggccttcctttgcctcccacagggcaaaggagagcaaacaactttctggttgaaagataaagaaggcttcactcttccactcccgaatttactgaggaaaaagccaaagtcccagagatattgtgaggtgagtattttctttcaagatgtttgtggagtcacatgaaagtctttggggacccttcttcaagatgcagtcgatatcccatttaagaggtgtggttctggggcattgatccagtctcccactagggggagccgtctagctggccccctcttccacctccaggtgtttgctcccagcctgtgcctccagcaaatgcagatttggaggagctgaagatggtgaactcatttcctggggtgccagggctgacttgtggctctcagccctgtgcaactgccctagctgccagatatttacagcccattaacttgagaatttgtgttgaacccagtttcattctgcaggaggggaaagtggagaggatgaagcctgtctttcttgtgcaagatgcctgctctctaacctttggtgctgattttccttatcagctaatcagcttgcaaggagataggagctcatatctgacagcatcttgagaatgtgttcaggaaaaaaagctctaaggcatgagcagccactgaaatccaacagggccgaggctatttcaagcagtcaggccctctgcagttattggaaagcctggttctgagccctgagttactgtgagccgagcagctcccaaatgcataatgccctcttcctgatgtattgcctaatttctctcctattcaccgagcaaaaactcctgcagtcaaggcttgaatgttaagtagaatttctcagtcatttatgaagagtttaatttaaaaaaggttccagtagacaaagacgaacccatccattcctgctacgatggttttctcttctacataatgaataggattccatgttgttttattgagtggatgttttaatagatttactgaaccactaatgcatttatagtacttctttcttcatctcttgcaactcctcacatccagatatctttcatgtggttgctcctgaatctggcagagcaatttgaatgaaatattgtgtttgagaccttttcctgttgaacttcccatgacagaaggagcgaaaatcaatgagaccagaaatagtttctttcttgctgggtctctgagctgcctttgctgagatacttttgagacctgtatgggaaataaactactttttggcttattgaaggcttttaacaccaaattatataaaagatttggtggaattcttgcctttctttaggaagagggacacaaaagcactttcacttcccaaataatccagtcttcattgggatcctaagcatttccattaccagtattttgcttctgcccagagagggaagactgaattctacatccatcacacactctgttttctatatgaaaattctgttttcattgtggtaggcttcgctcctccccagaggccttaagcattggggactgaaggctttagactgatacttaaaaggagagaaggcagaaggcatttatgtgaagaggagaggagggctttctcctgctactttagcatggagacagtaagccaaatttatcttctcattccccataactccttttcttgagataatggctctggatcccaaacaccttgctcaaccatgaaaggaaacaaggccacctctgctatgagtcctcctagagagctaggatagtccccatccatccatccatccatccatctatccatccatccatccatccatctatccatccatccatccatccatccacccacccgtccacctattcatgtgaacatttctttaatccaaggagcatttgttaagcacttactctgtgccattctggggtacacaagagaatatgaactttcccttgatctttggcttgcagtctagttagggagaagaaagcataatttcattgcataaagcaatattaaggactaatagagctatatacaaaagcgtagcagtaactaagcagtccatcactgtgacattaaaagaacattagaaaataatacacagatgaaggaatggggccaggtagggcaattgcctattattatcctgtctttgtattgtgtgtgtgtgtctgtttttcttccagccctagcccatgtgcttatgtaagttatgttcatgtaatatagatttagttctgcctttcttattgaacatcataagcatttggcatctagacacacatacacacaaaaacacacgtgtgcatatgcagacatccacgtgtgcacacatgcacatatatatgtatgcacaccctcatatatatacacacacacgtgcatacatacacacacatatgcacatggagaaagagagagcgagactgtctttatggatcacaactaagaattttgataagaacacttttctaaatctatattcagtatttgttctatgtcagctaaggatacctgggggagaattagttttcttctttttcttaatgtttctaattgtgtttagaactactgagaatttacaagagattgttttgagagtaccttgtcttattttctcaaagaagaagttatgagacaagaagggtaatcaaacatcatgaggttgttagttaatgtcaagtcaaaacacatccagtcactggtgagagacattcgggctctataggcagggatgacccaaaagaccttttccccaaaatgttaatcatacagattggctttacctccttgcatcagaaacccaatactgggagttttttaaatgtaaaggtaggatagaataattagaagtctgtggcaagccgggtgcagtggctcatgcctgtaattccagcactttgggaggctgaggcaggtagatcacgagatcaggagattgagaccatcctggctaacatggtgaaaccccatctctactaaaaatacaaaaaattagctgggtgtggtggcgggcacctgtagtcccagctacttgggaggctgagacaggagaatggtgtgaacctgggaggcagagcttgcagtgagctgagatcacgccactgcactccagcctgggtggtgacagagcgagactccatctcaaaaaaaaaaaaaaaaaaaaaaagtctgtggcatatatgcgagtctacgaagctctagttgtagaaacccctgggagaattggggaattagctgtcaacatgatatattaacactgtaaactgtagtcataggttatttattttaaggcattttatttattccatagcgccaggtagagatacaagatcataaaacacaatgatgaaatacagcaaaactaatacaacattggtttattctgacagcaaaggatttgaacatggctatgagtatgctatttaagagttttctactagaaccaataaaatatgtcttctgtttttcctgactataaaaactctgaatttacagaaagaagagatcctaaactcgttggaactccagcttagagaccaagtctagaccaaattgagtcattttactttagcctattactaaacaaacatacacttcatgtatccggagatttcataactagtttaatctctgagttcactaacacaagttgtaaaagaatcatcaaactgcaaattgcaaaacttctcaaataccttaaatacagagagacaaacccatgtgttgttttcaaattataagcctactaattaagtctttacataactaaggacttagaactctgccttttcctatcacaatccagccaattctctaccagaattggttcattcagtttgtattttgttgacaatgtaaatcatttatatgggcatattctggatcactggggtggccagttaccaagatgtgctactgcatgctttcattggctgcatttgcatttgtgtttctgattttgtgttagcttcattctaatgattgtaagtgaatgagacaaaaacagatgtaagcttcgatgtttaagtaaaagctaaatgagatcagaccatttcttataaatgaaaacttcttagtagagcaaatagagaaaaaatagcattgagtgtcacaaggcatttatctgtaggattgggtcaccaaactcacagcacttgtgtcattggagtcactttatagtcatgtttccagcagcagtttcactggggcaatgccgtgttattaggttaaattaatgtgagttgtattcttcttgtgattattctttttgtaaatattcctatttaatttgtaattttcttttgactttagaagtatacatctgctataaaaacaaggagtttctacctatatcatgtttatatatttaacaaatggtataataaaaacaaattaggtcagtactaggggctttcaagaatctatttcctttatatcattaggtttgagcaaaactattgtattccactctgaatcccacatcatctcccatgtcatcagttgaaagattggaactccctgcgtgggggctcagctctggtccttaagtagaatgacactgcctcaatgacaaagctcctttttggcaaagtcagctattaatgtgcgttgtgcatttagtgttgactttgtagttgcaccctacattctcttcaaaatgctcagcagtacttggttgggtctgctaaccttttaaagttaaaatagctttcaaaggaatttactgcagccctgacttgagtatggagaaaggaggctcctcccccagctgtagaaggactgtgagatctaagggccacgggaagtagcctaagtttttcttagaaagaaaaaggcatcaccaaattcacagaaattattggagtgcatatttggcaaagtgctattctctgccccccaacaatgtggtcttctgtttgttctttttggcagcacaataaatgtgtttgtcattcgctgaggactattgtgggtggaggagcggcagctgcctggctaactcctataacacggcacaaatccccaacatcatgatgaggtggtggagaacatctgtggaccagaaggggagggagatggcactcagagacagttctacaagggtaaagccaactcaacagaagagttaactcaggggtcttcataaaattccacacattttagacaaagtcgattttgttcatcccttggggattctgtagctcacatttatcagtacaaagaacctgacagataaacctaggttgtggacctctgacaaatagaaatcagtgatggtgcatggtactctagggctttcagtgtagaacttaaaaacgatgagaatctaggattggaattttaaaagttgatttacatgattctcctgtaatgatgagagcaaaatctgtctgtgagattattaataagtgaactgtcttaccccatctcctcatgtagttgcttccttcttatcattcaggtgagatcttgggtcttagctgaaatgtttcttcctctaaggggcttccctggctgctctctaaatcacgtcccccattgaaccccaaatactctacacatattggcaagggaaggggccttgtctgtcttgttcacggcagtagccacaagaccagttcccagtacagtcatcataatcatggctgaccctgactgggtgtttgctgtttgctgggcattgttcagtgcccttagctgtaattaaatatctataccacagccatgtagataggggcaattattagcccaatttcacagaggaaactagggtatggaggaggggtgaggtcattgcccaaggtcactcagttaataaaagacagagccataacaagaattcaaatatttgttgaatgaacagatcactgaaaatcttgttctgtaaatgttggaatccaagggaagccatctggggatggctttactaagacttggggaagtgaggtccagttctgcttcatccgatttaccttcggttcctccctctcttcagagttcaggggctggtcagagggagacctcttgatctcgccccctctgcgccactcaggtgtgctttaaagtataattttcaatccttaaaagttttgctggggccaaagttaagcttctcttaaaacactctctgccttttaacagcatagccccacgaaatcccagaagtgtctcttttccttaccty
